United States Patent Application Publication US 2008/0114160 A1 - sequence listing, part 29

SEQ ID NO: 8181 - DNA, 1154 bp, Oryza sativa
ggcggcgacgaaggcaagccggcggtgaagtcgtagacgcccaacagcggcggcataataggccagccgtgtaggcggaggcaccactcggcggcgacggaggcaggccggcggtgaagtcgtagacgcccaacagcggcggcataataggccagccgtgtaggcggaaacaccagtcgacggcagcgaaggtgagccaacggtgaggatgtagacgcccaacagcggcggcataataggccagccgtgtaggcggaggcaccactcggcggcgacggaggcaggccggcggtgaagtcgtagacacccaacagcggcggcataataggccagccgtgtaggcggaaacaccactcggcggcgacggaggcaggccggcggtgaagtcgtagacgcccaacagcggcggcataataggccagccgtgtaggcggaaacaccagtcgacggcagcgaaggtgagccaacggtgaggatgacgatgcccatcaacggtggtgtgaccaaccgaccgtataggcggggacaccagtcggcggtgacggaggcaggccggcgtgtagatgacgatgcccatcaacggtggtgtgaccaaccgaccgtataggcggggacaccagtcggcggcgacggaggcaggccggtggtgaagtcgtagacgcccaacggcggcggcataataggccagccgtgcagcgaaaacaccagtcggcggcggcgaaggccagccggtcggtgaagacatggacgcccatgaacggtggtgtgaccgaccaaccgtataggcgatgacaccggtcggcggcgacggaagcaggccggcggtgaagtcgttgttgctatcagcaatggcggtggcgaggacaagccggcggagtggactcgcggccgatcgaccggaaagctgagacgcctcgagtccatgaccagcatcaatcgcctcaatagtgccgcgtagttatatgcgaacaacaacaaaaaatagcaagaaattaatctgagattaaaaatcaatatgataaataatgataaaaatcagattgagtttccccctgactgatttggatcaagtcagagaagaggagcttgaagaagtggtcgacggaaaggaagtgaaaactcccaaagcgaaagcgaagtcggcgactcatgaa

SEQ ID NO: 8182 - DNA, 3056 bp, Oryza sativa
ttcgtacaacttgaattttctttcatctgttttgagatttgaagctagttgagattcttccaagtttatgtaaactaatgtggttggttaaattatacaaattgcttttggtggaatggttgtgtctctgtctctcaaagcagcatgtgttgttttcctaaactagagtagcaaaaggaaacatatccatgatgggtgtaacatgattatgttgtctgatcatgtctcagaaccagtttgtttatgcagtatattatgatataatattccttctaacatattaaattcaatacctttctgtattaattttaggatagcttgatgggtggtggaaggtaagccatatataatttaaacccttttgaaaatgcaagttcgcaaagagccttgaacgcaaggaagtgaacattatgtacaaagatagaataagaaaaatgagcactaatagaagttcacaagaataaatgaacagtttgtcattatgatgtatcatttaatatgtaagtatttctccaagtgtcttaaaataatattttaaaacacccttacaatcagttgtctggataatggagtgcatctgttacttcctactgtaggaaggaattatgagacaaaaagctaacaagtatgtacttataagataaattgaacctgaaggaaacagagttcatcagttacgacagaataatgaggaacttcacacatggaccttataacttgagcatcagcatttaacaatcatgacaagtacaaagtgagtcatggtgcagatggaggacataaatgttgcaatcaagtggccacacatgacacattagaaatcaacttaatccttcgaaaccaaaatgttacatcttcgtagtcccaagtatattgtagtctacttaaagccccaagctctgaagaatggaatgcttgactttaaaggcatgcatacatttggaacagtgttttgaagataccaattttctgattctgggagatgaaggttcacttgtttcagaggcaccaaattgtagaccactgtaaagaaaaataaaacaggagaattttcagatggtatgacaatcatatactgtaggcatagacatagccatgaaattaacacataaatcatgtttgaatcagtgttcatgccctcaatattcgttcaatttcgaaacaggcaactcccaaagcattcacctactgcaactgtgcaaaaccaaaggattgagttttatacgaagtagcagttgagattttctttgttacacataccttcaaacaatgaaaactacaataatgtgagaattagatataactacgaaacttttaacatgttaaataactaatctacaggagtgttatgatttcagtctacctaccatcacagcaagccacaagaaagagatgcctttattttttaatatttgcctcttttatgtattttgtcctatgatataggggctacgggttcaataatttgttctcattgttcattggtctatatactacagtcctatcattgagctttgtaaaagataggctggactacatgaaattgagtgctacagcctactggtatgaaactgttgccaagtgtcttaacattatctccaatcctgttgattaagagaactcctgtgggtaacaaaagcaatcatcacatccaggcttgttacaaacttagacaaagtttccagtccattacctgggctgaaggagcttgtcatggaaaatggaacatttgtcagaactctcacataggctggtcctactgacatccaaaatatagaacctgagctgcacagtgaggtggtcgagtacttgagaacttccttttggtcataaagattggtcattgggatccttcaaatcctgggcctgaattggccacacaactagcccctattggcacctaggctttgttgtcccaattcaattacaagggggcacccccaaattgggcccccccccgggggcccccaaacccaaaaaccaaaagggggctgaaaccctggcacccatggtctgcggttctccatatgtttattctccctttttaaagtagaggaaattgtcctttgcctcacccgctcattgcagagaatccaaactcataatccatcagtttagttaattggtgttggactatagactatagagattctggttgcttgtgccattctccaactctgctatatagatggctttaggaagacccatactgattcagaactaatcatctttgggagaggagagatactagctacacattcagattcagagctaacatccgcagtcaccattgcttcattggaggagagatcattgggtagcaatggcagcccaccatggtagcagcaggaagacaaaggcagagcagtggctattcggtggaagatggaggagaactgtgaaggagacaaagcatcctgttgcctctgaagccaagcctccagctccaacatttcctacagccattcagaaggatggcgacatctgccttgagaagtccagagttcatcttcctggcctgggacagagggagatcatcgatatcgcgcccgggaggaagtcaatgccggaggtggagatcaacatgaaggaggtcagggagatcatcgatatcgtgcccgggaggaagtcgatgccggaggtggagatcaacatgaaggaggtcgtctctgtgcttggtgtgaaggtgatggctgcagacatgtcgccatttatgcagctgcatgctttccggtgtgctaagcggtcccatgatagcttggacaagttcagctcaaggcagctggcccatgatgtgaagaaggtgagcttatttttttttctttcaatttgtgatctttcgcttgtttgtttacttttgttttgtattctgaaagggattgcactgattccgttcattgtatacgctccttccctttgtcttttggacgggttctttgtgaaatcaaattttagaaacttatcatttatgttgtcaattatgagatgcacttctagcatcttctgtatcatgcaatgcacatagccttaatgctgaaacacgtagtaaaatcatt

SEQ ID NO: 8183 - DNA, 7303 bp, Oryza sativa
gacgccccccagccgagcaggcggaaacaccagtcggcggcggcgaaggcgagccggtcggtgaagacgtaggcgcccaacagcggcggcataataggccagctgtgcaggcggaagcaccaatcggcagcggcgaaggcaagccggtcggtgaagacgtagacgcccaacaacggcggcataaaggccagccgtgcaggcgaggacaccagtcggcggcggcaaaggcgagccggtcggtgaagacgtaggcgcccaacagcggcggcataataggccagccgtgcaggcgtggacaccagtcggcggcgacgaaggcgagccggtcggtgaagacgtaggcgcccaacagcggcggcataataggccagccgtgcaggcgtggacaccagtcggcggcgaagtaggcgagccggtcggtgaagacgtaggcgcccaacaacggcggcataataggccagccgtgcaggcgaggacaccagtcggcggcggcaaaggcgagccggtcggtgaagacgtaggcgcccaacagcggcggcataataggccaaccgtgcaggcgagaacaccagtcggcggcggacgaggcggccggtggtgatgttctgactgatccattcctagagcgtaagagataagcttaaagccatgaatcccttttatgcatatctggatctggatcctgcagaacaaacatataggatgagtagtatctgatataaatataatactcgagaaaaaatcaagtattttaaaatatttataaatatgtatttctcctcttgtcaattttgatttccccgagcagatgactcattacgtttaaacgctctgcccaactagtcatagccaccaagcactgggagtcggcctaagcacttcccaaacatgcatatgagtgacatgagttcttcattaatggaacaaagtttcacggatcggagtttactactcgggtacttttgcaattattaagagcagaaaataaatttatctcatctctatgcttttgatttattccgaataatacttagcaccttgcgttactcggtccatccaacgagcccccgggtgctaggaatcggcccaaaggcaaccatccattggcaaaccaaacggaaagcataggaagatagaactccataactcgataggtacttttgtactcagattatgtcgcaagcaatcaagatgaatattataaaaaatatgatataacatctgtagcccccgactcactactcaatggaagaccaattggtgtagtgaggcagaggaaaaggaaaaatatcatataaagaataaaataaatgacgacttagctttgtaatattccccttggtgatggcagaagtagccaatgtgggaacgaagcagtccatcaatggtgacaaaaacaccagtcggcgccagtggaaccaagccagtggtgtagatgatgaagcccattaacagcggcgaagtccgtcaaccgtataggcaaaaacaccagtcggcagcggcgaaggccagccggtcggcgaagacgtggacgcccaacaacggcggcatgataggccagccgtgcaggcgaggacaccagtcggcggcgacgaaggcaagccggcggtgaagtcgtagacgcccaacagcggcggcataataggccagccgtgtaggcggaggcaccactcggcggcgacggaggcaggccggcggtgaagtcgtagacgcccaacagcggcggcataataggccagccgtgtaggcggagacaccagtcgacggcgacgaaggcaagccggcggtgaagtcgtagacgcccaacagcggcggcataataggccagccgtgtaggcggaagcaccactcggcggcgacggaggcaggccggcggtgaagtcgtagacgcccaacagcggcggcataataggccagccgtgtaggcggaaacaccagtcgacggtagcgaaggtgagccaacggtgaggatgtagacgcccaacagcggcggcataataggccagccgtgtaggcggaggcaccactcgacggcgacggaggcaggccggcggtgaagtcgtagacgcccaacagcggcggcataataggccagccgtgtaggcggaaacaccagtcggcggcgacggaggcaggccggcggtgaagtcgtagacgcccaacagcggcggcataataggccagccgtgtaggcggaaacaccagtcgacggcagcgaaggtgagccaacggtgaggatgacgatgcccatcaacggtggtgtgaccaaccgaccgtataggcggggacaccagtcggcggcgacggaggcaggccggcggtgtagatgacgatgcccatcaacggtggtgtgaccaaccgaccgtataggcggggacaccagtcggcggcgacggaggcaggccggcggtgtagatgacgatgcccatcaacggtggtgtgaccaaccgaccgtataggcgaggacaccagtcggcggcgacggaggcaggccggcggtgtagatgacgatgcccatcaacggtggtgtgaccaaccgaccgtataggcgaggacaccagtcggcggcgacggaggcaggccggtggtgaagtcgtagacgcccaacggcggcggcataataggccagccgtgcaggcggaaacaccagtcggcggcggcgaaggccagccggtcggtgaagacatggacgcccatgaacggtggtgtgaccgaccaaccgtataggcgatgacaccggtcggcggcgacggaagcaggccggcggtgaagtcgttgttgctatcagcaatggcggtggcgaggacaagccggcggagtggactcgcggccgatcgaccggaaagctgagacgcctcgagtccatgaccagcatcaatcgcctcaatagtgccgcgtagttatatgcgaacaacaacaaaaaatagctcaaggttaggaatctgtacttcacccatatgtaaacatagcaaaaaaaacatttggtttgagagatcagcgcacattgaaattttgaagaagctaagtgtgcaagttaagaggtcattagatgaatatacggaaaaaaattcacatggacaatgaagagcagaaaaacagaggcgcacaacagcatcaaacatgggtagtgcgagtgatagctaggtacaaacatcctgcaattgtaaagatttaatatattagtgcatggtatggcatcctggtaatttagctagggatcatccaggaaaaccagacatcaaagtataccatagatgtgactgcttgcagtacttcttggtaaacaacatttttggttttcgtacaacatgcctcgtcctcatcctctatgagaatcctaagaccttctcttgatgttgatctagaaacagcaacataaagttgcccatgtgtgaacacaggttttttcaagtacacgctgactcgtgaaagggtttgtccttggctcttgttaatcgtcattgcataacaaacacgaacagggaactgtcttctctaaagcgtaaaaggccacttaggacttgtggtggtaagtgcaattcgtggtatgaatgttgtctcgccaatatttgtcccagttaaaattacacactctaacaacctattaccaagagaagtgaccaataaccttgtcccattgcatagacccatagattgatttaggtttcgtagtagcataatcgtcacaccttttttgagcacaagcttgtgcgatgggaagttgttgacattaattgaattcaaaaattcagggggtaaaggatgtcaaagtcaggtaaatgatctcttgattttgaaattgtatcacatattaaatactcctttgcgtcgctgggtatcatgtcaacaatacaatcatttatttcatcaactgttgagttattcgggcaaacaattgcccgacatgcaaggtaagaatgatctgtatagcaatttgcaaagtgtggaaagatctcatctactatagcccttattttgtcaccgcatgtcttgatcaaaaggtcatcagggatatcaatccatgttggctcaaattcgtcaagcttttttgttgcaggcaacctaccgtcaccaagtgctaggacccaatcgccaaagttgctaagatcgacacggttttggtcagtaacgttaccatgaagaagtctcatgtttattgtcagtctaagaagaacaacatgccgccaaagaggagagttcgtgatggatgcatcgactatagaagcacgtgaaccttttcttatgaccggcaatatttgacggaaatcacctccaagaacaacaactttaccaccgaacggaacaatgctgttagaaggcgtgtgctcagaaagcaaatcacgtaacgttcgatctaaggcctcaaagcatcgtctatgagtcatgggagcctcatcccagattataagagacgttttctgaatcaaatctgcaagcatagttcctcttttaatggtgcaaatgttgttttcatctatgtcgatcgggattttaaatctagaatgagcagtgcgccctctaggtaggagtagagaggcaacccctgaggaggcaaccgctagaacaatttttttctcggatcttattttagaaatcagtgtattccacaaaaatgttttgcctgtcccaccatggccatagacaaagaataacccaggcctgttttcgttcacccgttgcatgattgtgttgaaaacatttctttgatcagtatttagcctaggtatattcaaattagcttctgcagttagggccgcaacatcaagagcaagttcttcgtcaaccatcctatttcctgtaatgtcatctgaataaattgccggctgcggtaagtcgtaatcatcaatgctaccaccactgtttgaaaacacaatgtgaagttctttcattaatagagacaggagcctatcaggaggtattacgtacgaaggattcgataaagcagttctgacacgtcgctgaatgtcatcggtaaaatatgtccaatatttttcaaagagcgagcgcacatatccaacagaacaaaacattacaacgggagcaaacaactgtctcaattggcccgaagacgcagatactatagcctcatcaaatagcaagtgccattcgttatcgctttcaagtaggcctcttgcctcgcatgcttgcctaaaggtcggataaacgataccatcataggtcctaacatcagcatagcacgttgcacctttcactatcattaatagcattcgtaggtagtagagctcaccgctaactgggctgacatagtatatcctgcctattttttcacatggtgttctaggacgccaactacgtgagatgctgtcccatgtccactctctcggaaaatcacagtaagtaagcgttcggggactgttatgttttctggtagcctcgaaccactcggttagcatcgtttttttggctacagggctggatagcaaggactttaggtcagaaccttttttgtatcggacaaagttcatgtttggaaggtgcacagctaggcgttctacagaaggcactctgtagtgaatgtcaaattcaaatgcatgccaaagggactcacaggtggacagaaatcttgcatcgatatattcttgtatttcatttcgtggagcagtacagttttcagctggtttgttcggtgcatttccagaaatctcaaagaatgcttttgttctatccgcccctttagtgacatatttgaagagatatttaatcatattagatttattgcaccattctacattaatctgagcctggtattttttcagaagttccatgttgtagggaacaacccatctgttgtcaagtttaataccatttttgagaacataccgaccatcattgctacgtttgtaaacagtgaatacaaattcatccatgatggtctcttcttgaaaagatttagggaaatgcttagagcactctcccttcttcatacaggagcatgttttgttcacatcgccacaagggccatggatcataaattcatcaaccaaggcatagcctaaagggtcggttagcacatcaggtatttcagcggaaataaaaccatcgacaataggagcactaaactcaatatttcctgcagcaagccaaaccaggcaatggatatgaggaaggccacgcttttggaactcaactgtatataacactacatatagggatagccaatgttaggacctatacagaacataaaaatggaacttagaaactaggtaaacatcctactagcaaggactggaccaaatgtctttccttctctaatatctgaaatgaattcattcactttcatgttaaacaccctcacaatcatatcggaacgatcgcttggcacctggcctggctcaaacagcaaagcatcatatatttcttgccactttgagttgcatgtaaaggtcacaaaaagatcaggtgaaccaaaaacccgacaaatagccatcgcatcttggtaattttgaaccatgtaacgacgccctccagtaaaactggagggcagcacatatcattggccgacagaatccccggaatcaagaccatgatcaatcgcatcagctattccctggacagattcagaacgcaggtcgggctggttgtcgaaaatgtacttaagcctagattactcaacagttgagtatgagtcaacacataaggaatcgctaagacgaccacagcaagtatatggatttggtttgttcaatcggtaatgtaaacgatagtggtagtactcaagcatggtaacatagcgtctggaggcaccagtgatgctaggaaagtcagtgtactttatacctagatggaatcctcgttcaccataaggaaagagcaaagggtactgaagagccatataggatgggtgcaaagctgagacacgtcgcaatctagcatcgcaagactaaaccatcacatcatacatgtattcgccagctgagtaatctccagctactataccagcaatatcaccactcgttggcaaattgtactggatttcatctcttgaatcacaaccaagcaatctaagtgcaatcttttgatcaccattatcttttagccgatctctagcaaagcggaatgccttaaccaaatcattatgctcatcaagcatagaactaagcccattaacaatgtctgggtctggttcatcagaaggattgtctttttcgtaaatattcattctgtttgcagtttcattttcagtgtcatatatgtaaagttgtgcaaatttaggtcgtgagccttgctgtggcagcaggctgccaataccttggtggacaaccccattaatcttgaacacaca

SEQ ID NO: 8184 - DNA, 739 bp, Oryza sativa
taccagcagagcctgcggcgctaccatcagcgccacgtccgggcccgatcactctgcgtcgacgacctcgtcctacgccgcgtccaaacgcgtgctggattgagcaagctctcaccaatatgggagggtccgtatcgagtgatcggtgtcccccggccgggctcggtacggctggccacgggcgacggcacggagctgccaaacccgtggaacattgaacaccttcgtcgcttctacccctgaaggggggggtcgggtgtcaggttttggctcgggccaaccccgcacccccctcgggtgtgcagggttggccgggggctaccacacatgcacagtcttacttttcttatttcagcatttcaataaaagaagtttcaattttctaaaggttgtgtctgtgccgtttttccttttgaagaatcttaacttgaaataaggtcactcgtgctcaaccttgccctcgggggctcggttcggtcagctaaaatcgccaagcggggcccagaaccgagccgtgccccggggcatggtgaactccgggggggaatcggcaaaaacccacaatcgggtcacccatacccctcggtcaccacgttcccggcctggccagtctcgacatgtggatctccccaggcactagccccgacccgagccatccaagggcacgaacccttatttcaagctaagacgcaaaaggaccacggcacagatcatcctcatctcgtatgtatagcaaaat

SEQ ID NO: 8185 - DNA, 1034 bp, Oryza sativa
ccgttcaagtctctaatttttccttaagaagtcaagaacccatttttgtgctttgtttctgctgttatgtggagtttattagagtaaaagcctttttcttttccgttggtcgtgtagacgctgcagcttcggaagatccgctcttcgtggaagttgaagccagcgtttgggaaagcgagcaaggcaagtcacatcatccttgagcatattgaatcccagtttacaaaattatttttaatttaaattaatgcattatcgctttatttaaattcccgcgttatcactgttttatttagccatgcctatttacctttgttatgaccatactattattgttattgatattattaccttgttcaccctagaataaacaaaaccccaactagtggaccctctatttatggttccactagtatgaacttaggtagatgcttcgctgattaataggacaacattaggtggttttataattttagactttgggtatattcatatcatttggtcactatggaattgttggtttatggtggaattggacatacacctctcttcctctttcaaaacccctaaaacctgttttcggtggggtttgggtgcatgccagttgtgggaagtagcaccccggccactataaggattaagctcgggcctctgttgcaaagcactaccgtacttccacatgtctagtgggtaaggcttagtttgtggctcagtctggtcataaacaaaagtacacggattggagatggatgaagtcgggggtcgatggacattctccagggcaaatgaaggctacacgagctgcggcccggtagtcgagatgtcatggcagagggttggtgccctgctgctagggggctcagtcctgcctgcctgtcccgggtgtcccggccgtagggggattgggtcggtactcttgtttatggctaggatgggttgggaactatgtcacgtcttccgtccgtataccgtggtggtatgtggcacgtggttgcacgcgaggaagatgtgtcttgggggtaaagatgtacacc

SEQ ID NO: 8186 - DNA, 1744 bp, Oryza sativa
  unsure (1)..(1744): unsure at all n locations
ttagatctagcggaaacttttgagaacctccgctccgcccgcataaagctgaaccccgataagtgtgtgtttggtgtacctgcgggcaagcttctcgggttcttggtctctgcccgaggcattgaggccaaccccgagaagattcgagctattgagcggatgcgcccccccagcaaacttagggatgtgcaatgcgtcaccggttgcatggccgccctaagtcgtttcatatcaaggctgggagagaaggcgctacccttgtttaagctcctcaagcgctcggggccgtttacttggacggaggaagctgaacatgccctcactcagttaaaggcatatctcagctctcccccagttctagtcgccccggagccaaatgagcccctgctactttacttagcggcgaccccccaagtagttagtgcagcattggttgtggagcgcgatgaagacaatcctcatttcgtgcacccccactctgtgctaacttggcccgggagcgagcggggaggagaggcccccgagtcggacggtggcctacggcccctgacgaccggagccggccctctgcccgcttgtcagacggtgctaggtgcccccgaccctcagaagggccccaaggccactgcgggaaggccgcacttaacgccctttgaccccgaggctaaccctgtgctgactcgaccgggaaagagcagggagaagaggccnccgagccgaacggaggccagaggcccctgacgaccggagttggccctttgcccgcttgtccgacgatgccaggagcccccgacccccaggacggccccgaggccactgagggaaggccgcccctttcatcctccgaccccgaggtcatcggcacagaaaacaagtgcgcccccaaaggccacttgaacgaagaaccccccgggggtacggcccctagtagagaggatcagccccaccgaagggtgcagcggcctgtctactttgttagtgaggccctccgggacgctaagacccgataccctcaggcccagaagatgctttacgctattctgatggcctcgaggaaactgcgccattattttcaggcacatagggtcactgtggttacgtcttaccccctcggtcaaatcttgcataatcgagagggtacaggacgggtggtaaaatgggcaatcgagctttctgagttcgatctgcactttgaaccacgccacgctatcaagagccaggccctcgccgattttgtggcagagtggaccccggctccagagaccgtctcaatccccgaggccagcacgaacccctcgcagctgcctcacaccacccactgggtgatgcagttcgatggttctctgtccctccagggtgccggtgcgggggtcacgttgacctccccgaccggagacgtccttagatatctggtccgcctcgactttcgagcgaccaataatatggcagagtacgagggactccttgccggactcagggtggcagccgggctggggatccgccgcctcctggtgttaggcgactctcagctggttgttaaccaagtctgtaaggagtaccggtgctctgacccgcagatggacgcctacgtgcgccaagtacggcgtatggagcgccattttgacgggatagagcttcggcatgtgcccagacgggataacatgatagccgacgaactctcacggctcgcgtgctcgcgagcccagaccccaccgggcgcctttgaagaaaggcttacccagcc

SEQ ID NO: 8187 - DNA, 634 bp, Oryza sativa
tgccgactggtttcttcacttccatggctgcatgattctgccagtgttgattggccttatcttcttcaccgccggtcgtctcgtctgctgctgactagtgctctcacctctacgtctggtttatacagttaccactactgatggacatcatcgtcttccgttgccgactggttatgccgccgccgactagtgcttttatcttcacaactgcgcgtcttcgctaccagtttgcttctgttgccgccgactcgtgttcacttcatcacggcgatgcaactttgtcatcatggtggagcaacttcatctttattatcttcggcactggcaaactctattgctgctacttcgcaagttttactacttcaccaaccacgacgtctttgtgagcctcgacatctcggcatgcgatgccatgttattttactacaacaagaggctctccaatattcaggatttctacttatatcttcaatcaagcaatgactactcgacgacaagaagctataattctcgactctatgttcagttgtttcccaactaaccaaagagtcgggggctacacaaatataaggctcaaaatttgacaaattttatgtcaagctgaagaaatcaattcatcagccaatgagtcaac

SEQ ID NO: 8188 - DNA, 20188 bp, Oryza sativa
taaggtagcattgatttgttgtcatgctaattcagttatgtatttaattctatctttagctctatttaagttctagtgctgtacaagtaatttttttcaggtacttaatacagttcttgcttattttcagtagcaggtcaacaggaatattgtgtctgggactgggatctggagttaaggatgcttcacaattcaaatttcacaagtatgtgaccatctaagcatgattcaatatttcgcatcataaacacgtgatttgttgatgaatattaaatactaaaatttggcaagacgtgtgggttcttggcaataaattggttctttgtactagcaattaacaaaatcagttagtaaatattgacatcgttctgctcaccaataggttgtgcctgttaattcttccaacatgctgtggccatgaccaaagttacttcctccctaattcgatgttaggtaacaatgtgctatttacagttcatttgttttctctatcttctgtaaagtccagatgctctaggattctgaaaagaaatggttaaatgtgaactaaaatttcatactaggctctgaaatctaatctatttgtttgccaatgctttaatctatttgaaaccatagtgacatgtcttgagttttactctctatgattactacacctgttgtctagtttctaaagtgtcttctgatacatgataatggaactagaagaactaaactctgcaaaactgtcacagtagcaaccttttgttcttttcagatcgtgtgtgtgtgtgtgtgtgagagagagagagagagatagagcatgtgtgctgatgagggggtataatctgctgttgcatgtcatacaacaccataggtttttagagctagatttactaatgcaatcaacatgtactgagaaagaacccattttatgcattgagaaagattagatgaagtaaaaaacctggatgcagttgttcttgttcttctgttgcttccaagttgagatcaaaagctcccaagttgagatcaaaagaatgtacaacttgatcatttccatggcaagcaactcgagcaatgtcatctacctagataacatgccttccaggaacttcttcttctagattggcttgtgcttcattgaggtcaggtaaagcccctccatcttcctcttcttctgctaatatgtttagatctatagccattgtgatgggtaggtgtggagttggtttgtaggatgatggatgaagtgataaaaggcttgtagctgcctcgctgcttgaggattatggagggtacccttgggcggcaaagcaccatccatggagtttttgaatttgattagaccagttggattattttaagcccttatgttttggcgccatatcactcgaattaggtgtataacaccaatctgtagtgttgatactagtagtagcacccaacattaattggatgcttcaaatattccttttgtacagatgtggcagtgtacttgtcgtactcctactaagcattcaaatgattagccccaatcctataaattgagggcaaaatggtcattttcacacaacactattttttcctaactaacctagaacgtcctcctttctgggacggagggagtaatttgctacaaaacacactaagactattaaattattatttccattaggatcggagagagaatttaactaaaatgactttggtgccccggatttcttccaaccatccattcctctcacgcgtagtaaggctgtgttcgctccagcgtgttcccaaccggaacagtgcgtacggaaaacggaacggtctattagcgcatgattaattaattattagctttttttaaaaaaaaatggatcaatgtgattttttaagcaacttttgtgtagaaactttttgtaaaaaatacactgtttagcagtttgaaaagcgtcacgcgaaaaacgagagagatgttttaggaaacctgggggtaagaacacagcctgagggtgtacggtgcgaggaccggcgatgcgactgtatggtgtggcggtagcgactttgtagcgggtggctagcggtgtagcggtgaggactacatagtaggccaacacgatggcagcggccttgagggagagggtcacatgagtggactgtgacatggagcacagcagggagtgagcacgtgaggagcagcatcacgactaggtggtgcggcgggggtagcgcgctgcgtgaggagaggcggcagtgacctcacggtgggggtggctgcaacagtgatgatagcgtgactgcagcgaccttgctatgagacatgggtgcacagcgcttgtgctcacacgaacgtgagtagtggttgcatgactgcacgggcggcagcggcaaataactcggtgccggagaaaaactgaaagaagggagaagaagataagggcaaaattcatattttatgtggtttctctcgtattaattggatggataatatattttaatgcgtccgatgttttgtgacaaattaacatattatcaaacagattcacattcttgtggtgtctattagcaaataccatacttctcgagtgttctgcaataaattttgtcataaattaaccagttgtcgagactcgccttaattatcgaccgaatgccggataaatcctatttttttgtcaaatttcgatttcaataaaatctattgtttgcaatatgatttctcaaaaatcctccgaatttttcaccttttttagaggttcaaaattttcacttggaatccactttcgtctatggcgtcgaaattaaaccttgaaattccatgaatttattttatcagttttcattgaaaatgtgtgcttactaccatcggatgaaatcatgtgacgtttcggatagtgaaaatggcttacacatagtattttagctctcagaagcatcagataaacctaactagagggagtaaagggcttaccttggctccgggctgggctgcagcatcaacaccaacaaagacgccatctgatgctttgtccaaagaggatcgagatgcaaaggtccggttcaagctggcacagatggtggagctggcggcttctactgcttcaaggccgatggctagtcatccccggttgcagttggcggcgaggacgcagctggaaacttcgtcaggttctcgtttttcagttttgtagggtgtttctgaagatgaagatcatttacacttggagccggctacgaagccttggagtggtcctcttcctgcgcctcgtcgatcgccgccaagaacgattggaggtattatcaaagcagcgattcagggtaaagtttttttgtcgtttccttctacaattcagagtaatagatgttctccggtagtctcttccgttccggcgagatctcggtctcctccggcggtgagtccggttcctcgatccgattggatgcgtttccaaaactttcgggtgattcatctatttcgaattgtgaggttttggatgagtttttgccgcaattgccacataggcccagtattccttttaggcccacacctggtcttgtctctctattcgcaaaaacggggacagtgcgccagaaggttaggtttacggatcgatctgtgccgcctccttcgtacgccgctgtagttcgtcgttcaatggagagaaagaaccagcgtcctgttcatggagggggaggacaaggcagctttgctgctcgtgcaaactttcatccaggtcatggcgagggaggttttcaaggtgctcgaggccggtttggcagaaatcgctttggagctcggaattttggtggaggccggcaggggcaaggtggaagaggttggaacggcaatggtgggcaaccaaatgctggttcccatggcggaggagatggctggtttggacaggaaaaatttagaaataccgaaggtggttttggtctgcaagctaggccaatttttgggcataatcctgggctaaggtttgggcaatctccaacctttagctttggattgcagccggtcccgttgccgtttggtcagtttcctccggtgccggctggtggtggcgacgcatctctattggctgccggcagtggcttggcacaatttggaggagcggctgcacagtttggtggcgggatgattgcgggtggtgttgcgcagggatcgacagcagctcaacatggtgccgggttgacgggcgccggtgcacagactagtagcaactctggaggcaatggttctgtactggctgggattgctccttttggtgataatgtgcatcttcctggcggggtagctggtgatcggcatttgaccgctgtaggagaatctggtgcctcggctggagtggttgcagtatagacgatggttgggacttcacaaccaaccgttacgccatctactcaagagaatgcaggtagaggtttaattatgggggacaagagctctggtaaagcaaaggtggataatcagctgagtgtgcatgtaggtggcaaaggtattaacaagaatccatattgttatagatgctatactaaaggccatacgttgcaggaatgtacatctaaattttactgtgaggtttgtgaaagtgaggaccatataggatccaggtgtcctatttttaggtctaataataaaccctcagctgagttgtgtgggtatgcagtggatggtcttggtttttttcatatccctctttcagctggccagagaataaaacatgattctaaggctgccctagttaaagtaactagaggacaaatgacggtgcagaccgttgtttctgaattggagagattgattcctggaaattggaagtgggtggtggaagataatggagataacacttttcgtactatttttccttctgctgcggaactgaaacgcatggtagaatggggaatagtacatactaaggttagtgatgcagaaatgaagataattgaaaggggagttagtaatgaggtgaaatatgtgttgccaaaggtatgggttcaatgcaaaggcttaccttctgagttaagggagtttttaattatttgggcggttggttcaatgttaggtattacaaaaatggttgatatgaattttactagaagatatgacattgctcgtttacaagttctggttttagatccctctcttatccctgatgtggtggatgtggttattggggataatttgtatgagctgtgttttaaggtggagccagaaaatgggcttgatgtgcctgaacccatggacatggataatagtggtgatagagaagatggtaaaaatatggatgggagtgatgtgcaagataagggtaagggatcagatggaagtaattttaaggatggttccctactgcaaggtggtggccagtttagtggttctgtttcaggaaaaggaacgtcttctgagccatctactcaggttttgtcacctattattaaaggattctcaggttttgtcacctattattaaaggattgacagtatctgatgaggagtttgatgggcttgtggaggaatctgttggggcaggatcagttaagtctcatgaaagtctagctgttaagttagcggcagtacctgacacgattctctcccctactagacaaagcaagagaagagcaagtgatagtgatcaactcactttgcagagggctgaaaagattaaagctggggggaatttggaggttcagaatgttaaaggtaatttgcattttaatgattccttttttacatttgtcagataaagttatttcgtcctctctttctaaactgggttttatcgatgcaaacaatgatagtaattttgtgaatgctattaaggatataaggagtttggaagaagctaggttaagtgattgtattagtttgaaagacaagcataattctactgtttttcctgaaaatgaattgaccgacgatcagttggaggataattcagttttggaaaaactttgtagtgaaatcatggaggaggtaatggatacgggtggtgattatgattataatttgtatatcacctctgattctatgatatctccttcgataaaaaagagaagtgacaagaaagttaggtgtaagaaataattttacaatagtcttaatgaaaggagtttttttggaacagtgatgggttcaaggacccaaattatttctgatcttacaaaggaacaacaactagatttcattgctttatcggagactgttaagagagattttacatctagtgcccttaaaaatctttgtggcgggaaagattttttgtggcattgtaaacctcccagggggtgttctggtggtatgttattagggattaatttacaaacttttgatattggttcaattgatgagggcgatttttatattaagtttcatctttgtaacaaaattgagaagtttaaatgggctttagtcttggtgtatggacctgcacaaaatgatttaaaggaacattttctttctggattagttcatatgtgtagccatgaaaccttaccaattattgttggtggtgatttcaatattttacgaagcactatggaaaagaataatgacaattttgataatagatggccttttctttttaatgctatcatagacggtcttagcctcaaagaactctcaatgtctggaaagaattatacttgggctaataatctttcagtacctacttatgagaagttagacagagtattaatgtcgacggagtgggaacaaaaattcccactttccacgatatttgctcttaatcgagatatttctgatcatactcctctactcctgaatacaaactcatcttctgtatgtaatagtcaatataactttaaatttgagttaggttggctgttaagggatggttttgttgatatggtaaaggaaatttggttaagtgttgatgaaggaaatacttctctagagaggtggcaagcaaagattcgcagactaagacaatttttaagaggttgggctaaacaaactagtggtacctataaaaaggagaagaaagccctgttagaaaaacttgatttacttgataaaaaagctgaatcaaccttgttaactcaggaagagcttaatgctaaacattatatgaggaataggttagcttgtttgcttagagaagaggaaattaaatggtatcagcgggctaagaccaaagatattttggaaggtgactcaaatactaagtattttcatttggtagcaaatggtaagcataggaaaacaagaatttatcaattacaagatggtgaccacatcataaatggtgatgcaaacttaaaagcacatattaccacatattataaaggtctatttggtccacctgatgagtcttctttaactttggatgaaagtcttataggtgatattccccaggtgtcttctctagaaaataatcgttagttgatgaatttactgagaaagaaattaaagatgcagtttttcagatggaacataataaagctccgggtccggatggatttccggttgagttttaccaagtgttctgggacgtaattaaaacagacctggttgagttatttaaagattttcatagtggaagcttaaatctttactctcttaactttggtactattattttgctgcctaagtgcaaagaggctataaagattcaacaatataggcctatttgtttacttaatgtcagttttaaaatttttactaaagttgctacaaatagaatcactggggtagctcagaaagtaattagtcccacacagacagcttttatacctgggaggaatattatggagggggttgtcattcttcatgaaactattcatgagttgcatcggaaaaaaaatgagtggtgtcatttttaagattgattttgagaaagcttatgataaagttaaatggtcttttgttcaacaatccttgagaatgaagggcttttcccaaaaatggtgtgattggattgcttcttttatctaaggtggtcatgttggcattaaagtgaatgatcaggtgggatcaaattttcaaacttacaagggtttaaggcaaggggatccattatctccaattctttttaatatagttgttgatatgttaactatattaattaagagagcaaaagatgatggtcagagatctctggcttggtcccacatttagtggacgatggtttatctattttacaatatgctgatgatactattatttttctagagcatgatttagagaaatcaaaaaatatgaagctgttattaactgcgtttgaaaaactttctggccttaagataaattttcataagagtgaattattttgctttggtcaagcaaaggagtgtcatgagcaatattcaaatatttttggatgtaagctaggtgattttactgttagatatctcggcattccaatgcattttagaaatcttagtaataaagattggataacaattgaagaaagaattgaaaaaaaactcagtagttggaagggtaaacatatgtctgttggtgggagattggttttgattaattctgttttgtcaagtctagctatgtttatgatatcgttttttgagattcctaaaggggttcttcaaaaaattgattattatagatcccgtttcttttggcaaggggatgaacataaaaaaaagtatagattgacaagatgggatattatttgtcaaccaaaagatcagggtggacttggagttcacaatttagaaatacaaaaccaatgtcttttaagtaaatggttatttaaattaataaatgagcaaggtgtgtggcaagatttactgaaacaaaaatatcttactggtaaatcaattactcaggttgagaggaaacaaggggattcccatttttggtcaggtctgatgaaggttaagaattcctttttaaatatgggttcctggattattaataatggtgaacaagtaagattctgggaggataagtggctagggaactattctttgaaggaaaagtacccctcgttgttttctatagttagaaggaaaaatgcctcaattgctaatgttatgggttctgttccgcttaatgtttcttttagaagagctttagttggtcagaatctaattagatggcataatttgtgtgcttccattgtgcatattaacttaacatacgaggatgacatttttagatggaattttcatcaaaatggccaattttctgttcgatctatgtacttagctttaattaataatggttacatagaaagaaataaaattatttggaaacttaaaatgcctcttaagattaagatttttatgtggtatctccttaaagggattgttttaactaaagataatttggctagaaggaattggaatggtagtttgagatgttgcttttgtatgaaaaatgaatcaattcaccatctattctttcagtgccatttttctaaatttctttggagagctatacaattctcttttggactttatcctccacatagtatatctcatatgtttgggaattggcttgtgggtgttagtaaaaaaatcaaaaaacttattcttgttggagcttccgctatatgttgggctctttggcttagtagaaatgatatggtttttgataaaacaccatcaaaatcctatttgcaggtgcttttcagggcaacgtattggcttcggggttgggctcagttgcaaaggcatgatgaagatatcaagctaataaatgatgaatgtcgtaaacttgagacgacaattatgcatctatttgccaacttcgggtggaggttctctattagaattcagtagttaggggatctttttcttttgttggtgtctattagtttgcttagctttgtttctgctatcgtgaactttctgtgtgagttccataataattggctgtaactcttagagtaaaggccggaatgttacattccattatctaaaaaaaactagagggagtaactgggaagatcaacagcataccgtacgcttaattactctacacgcatgtaacccagctggtatatagcttttccacatttccagttactcgattggaatgcaatgcttttgagtaaaggccggatattatatttcattatctaaaaaaaatttaattatgtctattcttaagctatgattgagcttgtcttacgggaatattttttcccatgaatagctaaatgattttatgataactatttatgtacgagtacaaataaaataaattaactattataagattttaaaaatagattaaaaaacaatattactaagtcgtatatatttttatgcgaaaatcacatcgtttaattaggagtcggaaaacacatgccatagtttttataattccatcattatatacagagatgcaaaattatatgaatcaaatggtcaatttttcgtctacggctattaaaaacctcgaacgaaagtcaaatcaagaaagaatggggatttatcattggttagaggatggggtgtcgattgaccgtgatggctgtccacaacagattgtcgtatatgtgcatgcttgcatactcgggcgtacggtacgggtaagctaaggctgcgtggaatcacgctgtacacacatacgtagtatagagtaggatttggatggccattttcatgaacaagtagagagatatagatagatgtggcgaccattaattcattccttctgtggctttagcagtgtgcacggatcgcccttataagtgacactactttaaaaaatatatttttcatagcaccactcttttatttttttttcctcaagtttaataaacacacgcttgtaaagataattaagagggattccgatcaccaactgccagtgaaaattagttttcgttggttgtcgcttaagatatctgcttgcaaaaatagaggtatttttacaaacggttcctttaagcgacaaatttcgctagtagcggctaaggagtaccaactgaaaaaaaaagcaaaaaaaaaataagttctctatattaaaatttccactgatcttatatccccttctctcactcagactctccctcctagctcctccccccacctctccccttccctcccccacccctggctctcctcctctcggcaaccacggcaggctagcaacggctgacgcggagcacctgatgcagacttggcacctgacgtggggctgcattggctttcgatctccggcgaaggggtaagtcctacgttcggccggccctaccaattgtatcgactacattggtattgttcaaagctacatcgcttcgacctcttggatcgctctggtttggttggtatacttgcatacatatttatcatatatcttagttaatctagtttagcatcttaatttacttttgtatcagctgagattcgttttagggtttatgctgtatcggctaaattatcttgctaaattatattagctaagatatcaccaccctaaaaattagtcaaaatagactttatacttctttgcatactttgcgatgcatcatccatcgccaaagttgggcagagcaaggcgatcagtgtgtgttgggtcgtctcctatatatacagctaggcaggtgattgacaaatagctaatccttgttacatcgagaaagccagtccaattaagggggaaaaacacgaatattagagaaggatgtaatatcaaataaataaaatggatgaggcttcgaaaccaggctagctagcccaccatcttattaattaagctagccggaagacccctgcgtgtttctcaattaaggagagaaaaatgctacttcttcagttaactgtttttcctactctcttgcaaatttagtttataagccaactatttttctttttctctgttttctccgtgatcagagaatcattcaatcattcattttcgatgtgcatgttccattgttcctagatcttgatccacggatgaatgatccatactgttactgatcagtagggctttctgcatgtgtcgcgccctttcgaaccgtcgaaccgtccaattaatgtgctccaaggctgacaaatggtgtcttttgccgagctgcatagtctcgactggacacatatatattcatcagtatgttacatacatcattggattagtggtttcgggaatgtttttgcaaatacacatttcgccaaattctgatctgacgatccagcagcgcagatagatccacggatgcttccacaaaatattccattcctgcagtatatccagatctcaacaaaacgcaggtcgatcatcagtgtccactgaacaaaagcacatgccatgcatatacttgcttcatcgtaggcttagcagctcgctacagtgttgaccctacaatttttagaatcatgggttttcgcagcaacgttaattaagggcttcttggcagtagcagaggtagcaccgccgttgagtagaggtgataatagcattgtggagattatgggtaccccatacccacacggcatggttatccgactagtaataggggataacatatatgtatggaatatgtaacagatcatgacttgggtattacgtttccttttatattatggagcggcctaaagtcctgatttgataatattgtaaagtagatttaggaagccgataccgtgttggttaaggtttctatcttgtaatcctgccccccaccctatataaggtgggcaggaggccctctagggggcatgagacaacctgatcgtcagatctatactacacccggcggattcaaatccccaaacaggagtagggtattacctctcatcgagagggcctgaacctgtctaaatcctttgtctccacatccatccacttttaggtctcgtgcgctaccccgttttattattgccgaattcatgtttcgacagttggcgcgccaggtaggggttgcgtcgagtttcctatcaacaagcgcgatggaatcaatttcatgagtcgccgacttcgctttcgctttgggagttttcacttcctttccgtcgaccacttcttcaagctcctcttctctgacttgatccaaatcagtcagggggaaactcaatctgatttttatcattatttatcatattgatttttaatctcagattaatttcttgctattttttgttgttgttcgcatataactacgcggcactattgaggcgattgatgctggtcatggactcgaggcgtctcagctttccggtcgatcggccgcgagtccactccgccggcttgtcctcgccaccgccattgctgatagcaacaacgacttcaccgccggcctgcttccgtcgccgccgaccggtgtcatcgcctatacggttggtcggtcacaccaccgttcatgggcgtccatgtcttcaccgaccggctggccttcgccgccgccgactggtgtttccgcctgcacggctggcctattatgccgccgccgttgggcgtctacgacttcaccaccggcctgcctccgtcgccgccgactggtgtcctcgcctatacggtcggttggtcacaccaccgttgatgggcatcgtcatctacaccgccggcctgcctccgtcgccgccgactggtgtcctcgcctatacggtcggttggtcacaccaccgttgatgggcatcgtcatctacaccgccggcctgcctccgtcgccgccgactggtgtccccgcctatacggtcggttggtcacaccaccgttgatgggcatcgtcatctacaccgccggcctgcctccgtcgccgccgactggtgtccccgcctatacggtcggttggtcacaccaccgttgatgggcatcgtcatcctcaccgttggctcaccttcgctgccgtcgactggtgtttccgcctacacggctggcctattatgccgccgctgttgggcgtctacgacttcaccgccggcctgcctccgtcgccgccgactggtgtttccgcctacacctcggtacccattatgccgccgctgttgggcgtctacgacttcaccgccggcctgcctccgtcgccgtcgagtggtgcctccgcctacacggctggcctattatgccgccgctgttgggcgtctacatcctcaccgttggctcaccttcgctaccgtcgactggtgtttccgcctacacggctggcctattatgccgccgctgttgggcgtctacgacttcaccgccggcctgcctccgtcgccgccgactggtgtttccgcctacacggctggcctattatgccgccgctgttgggcgtctacgacttcaccgccggcctgcctccgtcgccgccgagtggtgcctccgcctacacggctggcctattatgccgccgctgttgggcgtctatgacttcaccgccggcccgcctccgtcgccgccgagtggtgcctccgcctacacggctggcctattatgccgccgctgttgggtgtctacgacttcaccgccggcctgcctccgtcgccgccgagtggtgcctccgcctacacggctggcctattatgccgccgctgttgggcgtctacatcctcaccgttggctcaccttcgctgccgtcgactggtgtttccgcctacacggctggcctattatgccgccgctgttgggcgtctacgacttcaccgccggcctgcctccgtcgccgccgagtggtgcctccgcctacacggctggcctattatgccgccgctgttgggcgtctacgacttcaccgccggcttgccttcgtcgccgccgactggtgtcctcgcctgcacggctggcctatcatgccgccgttgttgggcgtccacgtcttcgccgaccggctggccttcgccgctgccgactggtgtttttgcctatacggttgacggacttcgccgctgttaatgggcttcatcatctacaccactggcttggttccactggcgccgactggtgtttttgtcaccattgatggactgcttcgttcccacattggctacttctgccatcaccaaggggaatattacaaagctaagtcgtcatttattttattctttatatgatatttttccttttcctctgcctcactacaccaattggtcttccattgagtagtgagtcgggggctacagatgttatatcatattttttataatattcatcttgattgcttgcgacataatctgagtacaaaagtacctatcgagttatggagttctatcttcctatgctttccgtttggtttgccaatggatggttgcctttgggccgattcctagcacccgggggctcgttggatggaccgagtaacgcaaggtgctaagtattattcggaataaatcaaaagcatagagatgagataaatttattttctgctcttaataattgcaaaagtacccgagtagtaaactccgatccgtgaaactttgttccattaatgaagaactcatgtcactcatatgcatgtttgggaagtgcttaggccgactcccagtgcttggtggctatgactagttgggcagagcgtttaaacgtaatgagtcatctgctcggggaaatcaaaattgacaagaggagaaatacatatttataaatattttaaaatacttgattttttctcgagtattatatttatatcagatactactcatcctatatgtttgttctgcaggatccagatccagatatgcataaaagggattcatggctttaagcttatctcttacgctctaggaatggatcagtcagaacatcaccaccggccgcctcgtccgccgccgactggtgttctcgcctgcacggttggcctattatgccgccgctgttgggcgcctacgtcttcaccgaccggctcgcctttgccgccgccgactggtgtcctcgcctgcacggctggcctattatgccgccgttgttgggcgcctacgtcttcaccgaccggctcgcctacttcgccgccgactggtgtccacgcctgcacggctggcctattatgccgccgctgttgggcgcctacgtcttcaccgaccggctcgccttcgtcgccgccgactggtgtccacgcctgcacggctggcctattatgccgccgctgttgggcgcctacgtcttcaccgaccggctcgcctttgccgccgccgactggtgtcctcgcctgcacggctggcctttatgccgccgttgttgggcgtctacgtcttcaccgaccggcttgccttcgccgctgccgattggtgcttccgcctgcacagctggcctattatgccgccgctgttgggcgcctacgtcttcaccgaccggctcgccttcgccgccgccgactggtgtttccgcctgcacggctggggcgcgtcttcaccgaccggcttgccttcgccgctaccgattggtgcttccgcctgcacggcagacttattatgctgccgttgttgggcgtctacgtcttcaccgaccggccgccgcatccgcagctgactggtgtcaccgcctgcacggctggcctgttataacgccaactgatgctaccttcttcacggctggctacatcgctgtcactactaataggcatcagtatcttcaacacaagctgcctacgtttgccatggctgccgactggtttcttcacttccatggctgcatgattctgccagtgttgattggccttatcttcttcaccgccggtcgtctcgtctgctgctgactagtgctctcacctctacgtctggtttatacagttaccactactgatggacatcatcgtcttccgttgccgactggttatgccgccgccgactagtgcttttatcttcacaactgcgcgtcttcgctaccagtttgcttctgttgccgccgactcgtgttcacttcatcacggcgatgcaactttgtcatcatggtggagcaacttcatctttattatcttcggcactggcaaactctattgctgctacttcgcaagttttactacttcaccaaccacgacgtctttgtgagcctcgacatctcggcatgcgatgccatgttattttactacaacaagaggctctccaatattcaggatttctacttatatcttcaatcaagcaatgactactcgacgacaagaagctataattctcgactctatgttcagttgtttcccaactaaccaaagagtcgggggctacacaaatataaggctcaaaatttgacaaattttatgtcaagctgaagaaatcaattcatcagccaatgagtcaactccaggagtcattatcttcatctttgcttcggaacagacattctacttcaaatatttcggtttgaacgagttggacaacaacatcaactctcctccaagtgaagcatctacaacagctataacattaatttgatggattattgtcactgacatcatcaccagcacctttgcttcatcgcccctgacatctccgctgttgctaatggatgattatgttttcgccgacttattatttcaccttcacggttgacctactatgcaaatgctgatgagcgtctttgtcattatcattggttgctacactgctattggctggatcaccgacatcgtcttcttcatcatgtcggttgcgtttgtcgccgccgactattttcttcatcttcatgattggtggatttcgtcatcgcctttgatgcgtgtctacatcttcaccgtcggcttgctttcgtcaccaccgaccggtatcctcgccttcatggatggcttattatgttgccactaatgggcatcttcatcttcttcaccaactgcatcgtctgtcaccgactgattatttcgctgccatggctacacaactttatcgctgggcgctttcatcttcattgctggctgacctgactgttgccgactggtttcttcgcctccatggttatgcaacttcattacctttgattggtgtcactgtttttactaccactgacatcttccgttacttctgatgagcaatttcgtcttcatgttggtcatttcatctccatgccgactgcgtcagctattgccaatatacaattttgactatgacagaaggacaagctatatgctcaggggctcatcaactcaagcgtgaggattatatctccaatttggacttgttccggatacatcccacatggattcaaagtcatgagtctattttctatgctcaaagactggaccaattattattccccgtaagggctatcaaccgaatacttgcgccagtcgggattcaattattatatttattttagagtatcccataagggataatcattcagatcagaagctattcatatgagctacacttggtctatattacccggaagatttattactcgggagcatgttacatgcgtcatcctttaaagggtgtcgaaggcatattttttggcctaggcctaatatgtctgcagcccatatttttaggtgtggcctgtcacgttcttttagggacttaggcactttttgcttaggccaaagtgcgcgtgatcaagtgcccaataccttaaaatccttttataccgcagttactcaactttttaggagttggtacaatgcatcttaaaaggtgtcaaacagtaaagctttatatagctggcccgctgacttttttatatagtcatggtgctgtttgggtttttaagcaattgattggatacaatatcattgctttttgccacgtaagtgtgcatttttattgaccaatattatggcttaggctgattatatattgtgatcatttttcaggcggttggtaaatcctttatgagtttatttactcggattttataccacatatgccatatatttccaggtgtggtggaaccatgtgtcttctagggacttaagcacatctgttaaagcagtgtgcgcatggcgtatgcccaatactttggaaatttctttattcacaacatacaagcttccttatagctattttgctatgtgaattttcaatgatgtagccaactttaggttacactcatcatattttacaaagcagtcggtatatcacttggatcatattattcagggattcacaccgcatatgctacatattaatattaagtcgcttggttgactacaattatcgaaaccactcggtgcatctagtcgatgcacctgactttattttttcagccctccacagtcttctgatttagaaaaagtactcgggagatcatggcgaagatgattgaagcactcggctttggagtaatctagttcgagagaagattatctttctgactgtgaaggtctcaggggctactgtggagattatgggtaccccatacccacacggcatggttatccgactagtaataggggataacatatatgtatggaatatgtaacagatcatgacttgggtattacgtttccttttatattatggagcggcctaaagtcctgatttgataatattgtaaagtagatttaggaagccgataccgtgttggttaaggtttctatcttgtaatcctgccccccaccctatataaggtgggcaggaggccctctagggggcatgagacaacctgatcgtcagatctatactacacccggcggattcaaatccccaaacaggagtagggtattacctctcatcgagagggcctgaacctgtctaaatcctttgtctccacatccatccacttttaggtctcgtgcgctaccccgttttattattgccgaattcatgtttcgacaagcattttcggttaaataatttttattggcatctattgctgtcagtagtgaagacagcaacggtagagcctggccgcctgggcaatcgtccgacctacccggaagccggctccatcagttcttgggaatgcaggaaatttaaaaaactattttagcataatttatttcaaatatttcaaatttcctccaatcttaaagaggtctctaaatgtgtttataaaacttagggcatgtatctggttttctttgtttatacaaaactattaaaaaatattttcggttattggcaagaaccagttaatatattttggcaagggaaactcaagaaaaatcacaccaagccatttccacttattagatagagtttttaattagggattcattctaggttaacttaaacaatttcgtttggtgatttattaaatgcattaaggctaggaaagggaaacttcatggtgtgatagttaccgaatagaagcaggccacggttagctcatttaaatcaacacacatacaagatggaccaaaaacatggggagacaatgatttttttttccgaaattcagattacagggatctactctcattgagcagctccagaga

SEQ ID NO: 8189 - DNA, 5817 bp, Oryza sativa
ggcctcctcgtctcggtccggtggcgagggctgcgcggggacagccggatctggccacataagcccagatccggcgcctctctagcggctccgcgctttctagcgtgaggccagtgcggaccgacggtagtggagtccgggtggcaccgacgagctccaccggtctagcgtggtggctaagcaagtcgtcaacggtgtacaggtggttgtgtgcatagaacaggtacctttggtgtgtaggtggcatttggtggcttccattgcggttgctttgtttggatgagactccgaggtgaaatccttgcccggcttgccaatgctagcaatgacaacgctctcgggcgtcgttcaccttcttgaaggcgttgctactggagccctccttatctccacatcaaggggtttctccgggtgaaaacctagattcgtatgatcgggtgatgtcgccgttcggtcggcatgtccttcttgaaggcatcgttttaggagttttttccttgatggacagatatacttagtttttagttttagcttgttgttttcgccggttttccacaaattaaccatgtcgttgtaaggtttttgggttcggtttcccttataaactagatcaattctcttcttctataatgaattgctggaactccctgcctgctccctcaaaaaaaaatcacatgtaagtgtgcggcatcatcacccactagcaataattatctagagtattttaaatatcacacaaacatgatatgtcatttacaattttgttgtattttaagaactcaatatgcaagcattgtcaaatcattatctacattatttaaacatatacatataccatttatataatatatataacatgcatttatctatatatatcccacaacaaagtgcggggtatcaactagttctttaaaaatttatggctttgccactagcataagggagaccaaaggagtcgcgatgacataatacacatgagagccagaagccgcagcaacagcacagtgatggcaatggtggcggcgcccccttcattcggctagagcatcccattgtcgacctcatttccttccgtgcttcctccacctaccacctccccgttacccgtgttcctcctctttcggagagagagtgtcagccgcggcgcctctccttcgccacaagttgggacatcaccacgccttgatcctcctctgagccttattgaaaataccagatctttccccattggcccgatctaccgattagcgtcatgtgcatgggggcggctcggccgacaagccttgataggggggaggaggaggaggaaggagggcggtggtggggacaggaggaggacatcgagtggcagatggaatgaaggtgttgcgtggatgagtaggcaaccggctaaggatatgattggacggtttttttttattttgagaatgccctcatatcgttatgattacaacattgtccttataaatcgaattttctgttgttcacattacatttcacgcacaaattagagttatcttgtaaacattacgacaaagtgcaagtggtgggagcattgctttgctatttcattgtatcacgcgcatatatgaaaaaaaatgcaaagctctctatggcacgcatgcacgctggggctatccacatctagtcaactaaaccggacactaggcatggcgcaagcatccatgaacagtcccgatgattgagaaacctaacatcgtcggttaacctgcccaatcgaggagcttctgtgcagaataaaaatacgagtcacctattccgaggaggcaaaatttttttttgaaaaaccgagaaaatcgagatggttgccgatgttatcagctgatgatttatggttggagtcgaaagtctaaacatatgtagtttttttttatgacttcaacattacctgttcttatgtgtgaggactagtgggatgttatcctattttactaaccattgatgtgtttgtgtactactagttttctaactcatgttccatttgtaacgtgaatgttgtcttgttcttcataaaactcttgttgtaacaacatttgaaatacacgcactcatttcaacaaaaaaaattatattatgaggttgttgaatatgtctaagactaaaccaaacaaacataaaagcaaatcttacaatatatagtgcaaaccacatagacagtgcatacctgaaaactactacaatatccaaaattaacgtctgagatttatccacttcaacatgaataaaacttttactcctagattactgcattttggatcttaccttagttttcaagtttgcactacatatatggtttatactacatattttctataaatatttagagcctatttggtagggcttcaactccaactcagaaacaaatggtttcagctccaccaaaatgggagtgaagttggttagagtgatatgaaaaaatgaactataaaggtgaagcgggttttgggttgctcaacagctccacttcagaatttgctcctggagttagattgagaagtttgaaccttgccaaataggcctttatcttacgcctttctcaaaataatggcatatctcagtcaacaaaccataagttaagagaaaactgactggatgaatcaatccgtgcgtaaaacccattgttatgtaggctaatgggttagcgttcgcagcccgtgaacgcttttcgacaacccaacagcatattagcctcctccccatatcttcctctctctctatcttatcttctttctctcgctctcaacagctttgtccatccgtaaacacgacgacgcgagaagtcttggacgagcagcctccctccagcaagcttcaccaccaagtcaataattgtctccaccatcacccccaccgtgaaaccgctcggtctcactggcaccgaaaggcatcaacatgctagcgtgtcccagtgtccctgccccgtcagcctcctccctccatttctcctcacttgtcccatgccaccaatattggcccactgtcacctcctaaccccgtggcaccgacgacgccactgccacctcaccacccacccacaaccctcctagaccatccctccccacttccctccacagcgccaccctccttcccaaccccatccccgaaccttaaccctaaccctaacttggccttttttttaagggaatgctagtcgactagttctattgatcggagaacatagttacttcactaaccaaagtgcttagaataaaccctaacctggcccttatcattgtgcgttggagcacgttttccagatacctaattcgccatatctttcctatagaaggaacatccaggattccggggaaaacgtccataaaactaatcggacggccaggataatctgttacatcgctaaccaaagtgcttagaataaaccctaacctggcccttatcattatgcgtcggagcgcgtttgtcagatacctaattcgccatgtctctcctttagaaggaacatccagaattacagggaagacgtccataactaatcggacggccaggataatctccacatctctcaaccgcggcagagcaaagctaccctaatgggcttttgggcccagccgaggaagcggcccaatcaacacacacgcacgcccccaaacccccacccttctaccttcttccacctccacctcctcctcctcctcctttgcccttttccacttcctcctcccccactcccccccctcctccacacaagcacggagacctcccgcctcggcggaggaggagcagcagccgccgcaggcgctcgcggtcggggtcggggaggagggagaatctcgcgctgtctcccgattcattccggggggttgtgtggttttgagttcttggaccgggaaaagggggcgttcttggattgatcagtggaggaggtgggaggaggggggttggggagagagaggagaggaggcggcggggatggggagctgcggcgcgggagcggcggacagcgagtggcccgacggcgtgacggggcgggacgcggaggtcggggcgctcgtgtgggtgcgccgccgcaacggatcctggtggcccggccagatcctcagcgccgacgagctcccggagaactgcgtcgtcccgccgcgctcctccggcacgcccatcaagctcctcggccgccccgacggcagcatgtccgtacacacacacctcctccctccttcgtcgtcctccaatcccctgtctctttttcttctgattgctttgcttctgttcctttctctttgttaagagttcctgcatgcttagatgatccatgctgtagtctgttcttggtcttatggccatttagacctacctctgtttcgtgtcccactctgaatttgggcaaagaacactgtgatgtggttcttgatttgggaagaactggaagatagtgtattgtgcttgtcctgggtggctttctgaatttttagtatatgccttaagctcagcaaggctgctagtgccatgggatgtttggtgtgtttgcagttagcggtagttgttgttatctacggtggtgtagtgtattctagactataatcgtcaatggattttattttatttttgctcagcccctgtttttctgcatgatgagatatgggaattgggcgaggtaatggacatatcgattagtgtgacacgattatagcttttatcagtatacaccaaagacaacttgtgtcatgcttctcttgaaaattaggaggtaaattttcgattgaattcttgtgctctcttgatggtatttttatatcttacagatatggtatgaagtctgtgaatcttcccctgattttttctttttttcctgaagcttgctttggacttaagagcgaagattcatttatatggggaatcaatgtttttaggttgtatgatgaatcgatgactttaggttgtatggatgtcatcacttctagtaggtttagatggattttcttctaactgttcagcatgtccataaactaatgctattatgtgccttttctgaatgtgttacttcagaagagatgttttatttctattcactatatttaactatagttttgtttagcatgaattgtgtatgtgatgtattttctgtaccctaaatctgactattgtttttttaatcttacccactatttttaattaactttgcaacagtgactggtataatcttgagaagtctaagcgtgtgaagccatttcgatgtggagagtatgaggaatgtatagaaaaagcaaaggctcaagctcgccagcataagagggcctacaatgaaggaaagtatgtccgcagggaagatgctatcatgcatgctcttgaacttgaaagggctcgctttccaaatgaagatgatactgatgaacatgatactagtggcctattatttgaatcccaaaacagctattgtgcaaagtccaaaaacataaatgagctcaataaaaaatcgtctcgcactgcaagggatctgtatgatattgaagaggagtcagctaaaggtttgtctcaggccttaacattatataaacagccacagaatgtgtcctcttcaagcactaggtatgcttcatcatcaaggaagaaacataaggcatcaaatgattttgaggatgacacagttcaaggatcccaacgtatgagagaccttacggagattggatcaaagaaacacagttcatacgtcctaaatgggcaccgggatctaccacttcttgagagtgcaagctttggttatagcttgtctggtaccaatgggataaaaggtgatccgcagttcattcggcaacaaaaggaagcgttcaatattggcca

SEQ ID NO: 8190 - DNA, 12933 bp, Oryza sativa
atcatgcatgccatgcaccagcagatttgatccgaagttccgaacaaatttagccccacccgacacgaactgatcgaatgaatgattacacatcctacgttacgtaccgtgctagctcgtgatcagattactgtcgaccatgcgtggacacatatatatatatatatatatatatatatatatatatattcgtctaaaaatataaacacttttagcataataccaagtcaaatattcgtaactttgactattaatagcaaaaaaaaattaaaaagatcaatcatgtaaaattgatattactagatttatcattaaataaactatcataatatataactctttttatttaaaacattttacttttatatatatcgttggtcaaagtaacatctcgaagactatgtcgaagtctaaaaatacttactccctccgtttcacaatgtaagtcattctagtatttcccacatttatattaatgttaatgaatttagatagatatatatgtctagattcattaacatcaatataaatatagaaaatgctaaaatgacttatattgtgaatcggaggagatatattttaggacggagggagtactgtatacatgcatgcagctaataagctacaggactagctagctggctaacacaagtatacaaccactttgcattggtgtgcacggatcgactaattaattccttaatcagaaaagaacaaatcgttaataattaacgatggcctaatatcaagcaaaatgacagatgacacttagggtctttttggaggagtttctaacagcaggagattcttctagaagctattaccgctagaaactcagtccagaattttacttagattatgaaaaatagtagttgtagaattcagaaaataaattaaaagctcttctccagattgttaccagctgttttttaaatctttaaacttcctaaacatagccttagttgcctggcaggcaggcatgcatatatgtctggtagagatcgatcggatcggctaacgggattatgttcttgacgctgaaatgcgaccacccatatatacatacacacacaacacacatgcatgcatatgcaagaatgcatgccgcgcgtattgcttctttaaattctttctgctcacaccgttaatttggtagcgaattcgaatctcacgtggtgaatttcaaaaaaaaaaaaaggaacttcaaaaaaagagaatctcacgtggtgcccatgcatgcttctataagtttgtttttcgccaagcctaaaccattcacacatatatatgtgctcgtggctgtgctgtctgcctgtgtctatcttggaaatctttttatttgttccctgttgatggttggtgctcacacttgaaaaaattattgaaatgagaaattattatatatggcatatataatatatacaaactatgatatgaaccagagagtagcataatatatatgtgttggaccaaactcatcacttaacataatcacatcagctgaactgctttgcaatggctgtacactattttataacttagttatgacatgtactccctccgttccaaaataagtactccctccgtactcttaaagaaaatcgtttaggacagcgacacagtctccaaaacacaactttgacttcttgtttctataaaaatatttattgaaaagtgatatatgtatacttttatgaaagtatttttcaagacaaatctattcatataatttttacatttttaaactcaacaacttaaaagttattcatgatttatattcccaaggtttgacttaaacattgttctaaacgacttcttttataagtacggaggggtatagttttatattgttcttatccgacatttgaccgtttatcttatttactttttttataattagtatttttgttgttattagatgataaaatatgaataatactttatgtgtgattattatttttaatttcttcacaaatttttcaaataagacggacggtcaaacgatatgtatacccacggctgcactaattttaggacggaggtagtattaattagttaatcaagtcgtactagggaccacacattaattatgtgaccgttgatatcccatactctagttcaagttgtgtgtaagcaacaaacagagagaagctgaacactacaataactagctgcctgcatcaattattgggtcaagatattagacgactcgcactttgggtacggcgtggtcgtacagacaaatgtatttttgatgatctgatgttggatgctctggcaaagtggggcaacttacaaaaggaacaaaataatggcaggctacagtacttagatatatagagtacaaactagttatttaatatacaattcacatattatcgtctgtataatctttcaggagatatatatatatatataaatgcacatcttattctatgttttgccattaacaaatatcaactatagaaaaatatcatcatacaaacaaatttatctaagaaataccatcgccatcagttaaccctatccattttttctaaatacccaaagtgccctcacataacaaaccaaatcacaaacttgggccgatggacagtggccttgtggttgcagttggttccgtagccagcagcgtccttggccatctcaaggcagagggaacgaaggagctattgggctagagatcacattgccgacttcccgtgtagatgggcggcaacagagctcatcagaacctggtgaagcttcggaaggaggagaagggcccttcctaggatagcgactactctcctaggttatgcagtgacacaactacaaaagttgtggcatagattcgatagttgaaatcttgcagctgcgacatcgaggtctcacggtgatggtggatctagcaccatcagcggtggtatcgcagcagtgtaaatgaacaagacagcgaagtggagagagagaaggaaatgtcattgctactgtgccactgccatgttcaagcaggccaaggggcagaggacctgagtggcatcgctcatgctcgacggctgcaggcgggctccatcgatgtcatggtgagctttatccccaagcattgcactccagcacttcgccttgcagccaaagccatagcacgccggccccatcatctctaggccaccgttgttgtggatcggtcggcaacctcctctccgccacaccaaccatgtcatccctaggccattggcattgcctggtgaaagtgtatctagtctccgaagcgagttttggtgggctattgacaaaatggttaaggaaccaatgatttatcaagaagtgtgaagataattagtcctagggtgtttactcttacatggagtcaccctgtaaatagaatgcaaagcgtcgtgaggactcgaagtgttatttatttatttattttgtatcttttggtcttgagtttagaaaagtcgtactaccagaggataccaaatggtttcttgcatctatatcaaagttcccgaagttcaatccttctagatgagagatacagttgtgtcaacggattgtgtgggccagaagttcctagtggtttgggccggaacttccgagcccctatttttcagccaatgcctaagtgctaacaagttcttggcacttatggctagaactttggggcatatttcaagttcaattatgtgagtaacagctacattacataagggagtgggtatataatctcaccttcctctctagtgcaactttggccattccacttttgtttttctgtctcctagcttcttgtagggtttcttgagctctcaaggtgatttgagagtgcttgcatggatggtggtgaggatttatgtttctgagcgagctaggagaacttgagaacttggggatcatcatcggtcaactgctttgtgcttattgctcttggagactgacctcctagatgattaggaataatccgcgagcttcctcaaggtgtggattgcttcctcaaggtgtggattttctgtggcaagtttttgagggtggacctcatcttcaaaaggaaaagaggtaactttgaatgaatttcgaggtggttgctaggaagttatctttgtagagcaagcttcaccggtggttggaactcgttgttaaagctatgatcttggtggtcgcttaaaatcgagggaaacctaggtggttgcttggaggctaaatacttcttcctagttgtttgtcaagtgaggcaaggagttaattgagacctagctctctggagctgctcaatgagagtagatccctgtaatctgaatttcggaaaaaaaaatcattgtctccccatgtttttggtccatcttgtatgtgtgttgatttaaatgagctaaccgtggcctgcttctattcggtaactatcacaccatgaagtttccctttcctagccttaatgcatttaataaatcaccaaacgaaattgtttaagttaacctagaatgaatccctaattaaaaactctatctaataagtggaaatggcttggtgtgatttttcttgagtttcccttgccaaaatatattaactggttcttgccaataaccgaaaatattttttaatagttttgtataaacaaagaaaaccagatacatgccctaagttttataaacacatttagagacctctttaagattggaggaaatttgaaatatttgaaataaattatgctaaaatagttttttaaatttcctgcattcccaagaactgatggagccggcttccgggtaggtcggacgattgcccaggcggccaggctctaccgttgctgtcttcactactgacagcaatagatgccaataaaaattatttaaccgaaaatgcttgtcgaaacatgaattcggcaataataaaacggggtagcgcacgagacctaaaagtggatggatgtggagacaaaggatttagacaggttcaggccctctcgatgagaggtaataccctactcctgtttggggatttgaatccgccgggtgtagtatagatctgacgatcaggttgtctcatgccccctagagggcctcctgcccaccttatatagggtggggggcaggattacaagatagaaaccttaaccaacacggtatcggcttcctaaatctactttacaatattatcaaatcaggactttaggccgctccataatataaaaggaaacgtaatacccaagtcatgatctgttacatattccatacatatatgttatcccctattactagtcggataaccatgccgtgtgggtatggggtacccataatctccacagtagcccctgagaccttcacagtcagaaagataatcttctctcgaactagattactccaaagccgagtgcttcaatcatcttcgccatgatctcccgagtactttttctaaatcagaagactgtggagggctgaaaaaataaagtcaggtgcatcgactagatgcaccgagtggtttcgataattgtagtcaaccaagcgacttaatattaatatgtagcatatgcggtgtgaatccctgaataatatgatccaagtgatataccgactgctttgtaaaatatgatgagtgtaacctaaagttggctacatcattgaaaattcacatagcaaaatagctataaggaagcttgtatgttgtgaataaagaaatttccaaagtattgggcatacgccatgcgcacactgctttaacagatgtgcttaagtccctagaagacacatggttccaccacacctggaaatatatggcatatgtggtataaaatccgagtaaataaactcataaaggatttaccaaccgcctgaaaaatgatcacaatatataatcagcctaagccataatattggtcaataaaaatgcacacttacgtggcaaaaagcaatgatattgtatccaatcaattgcttaaaaacccaaacagcaccatgactatataaaaaagtcagcgggccagctatataaagctttactgtttgacaccttttaagatgcattgtaccaactcctaaaaagttgagtaactgcggtataaaaggattttaaggtattgggcacttgatcacgcgcactttggcctaagcaaaaagtgcctaagtccctaaaagaacgtgacaggccacacctaaaaatatgggctgcagacatattaggcctaggccaaaaaatatgccttcgacaccctttaaaggatgacgcatgtaacatgctcccgagtaataaatcttccgggtaatatagaccaagtgtagctcatatgaatagcttctgatctgaatgattatcccttatgggatactctaaaataaatataataattgaatcccgactggcgcaagtattcggttgatagcccttacggggaataataattggtccagtctttgagcatagaaaatagactcatgactttgaatccatgtgggatgtatccggaacaagtccaaattggagatataatcctcacgcttgagttgatgagcccctgagcatatagcttgtccttctgtcatagtcaaaattgtatattggcaatagctgacgcagtcggcatggagatgaaatgaccaacatgaagacgaaattgctcatcagaagtaacggaagatgtcagtggtagtaaaaacagtgacaccaatcaaaggtaatgaagttgcataaccatggaggcgaagaaaccagtcggcaacagtcaggtcagccagcaatgaagatgaaagcgcccagcgataaagttgtgtagccatggcagcgaaataatcagtcggtgacagacgatgcagttggtgaagaagatgaagatgcccattagtggcaacataataagccatccatgaaggcgaggataccggtcggtggtgacgaaagcaagccgacggtgaagatgtagacacgcatcaaaggcgatgacgaaatccaccaatcatgaagatgaagaaaatagtcggcggcgacaaacgcaaccgacatgatgaagaagacgatgtcggtgatccagccaatagcagtgtagcaaccaatgataatgacaaagacgctcatcagcatttgcatagtaggtcaaccgtgaaggtgaaataataagtcggcgaaaacataatcatccattagcaacagcggagatgtcaggggcgatgaagcaaaggtgctggtgatgatgtcagtgacaataatccatcaaattaatgttatagctgttgtagatgcttcacttggaggagagttgatgttgttgtccaactcgttcaaaccgaaatatttgaagtagaatgtctgttccgaagcaaagatgaagataatgactcctggagttgactcattggctgatgaattgatttcttcagcttgacataaaatttgtcaaattttgagccttatatttgtgtagcccccgactctttggttagttgggaaacaactgaacatagagtcgagaattatagcttcttgtcgtcgagtagtcattgcttgattgaagatataagtagaaatcctgaatattggagagcctcttgttgtagtaaaataacatggcatcgcatgccgagatgtcgaggctcacaaagacgtcgtggttggtgaagtagtaaaacttgcgaagtagcagcaatagagtttgccagtgccgaagataataaagatgaagttgctccaccatgatgacaaagttgcatcgccgtgatgaagtgaacacgagtcggcggcaacagaagcaaactggtagcgaagacgcgcagttgtgaagataaaagcactagtcggcggcggcataaccagtcggcaacggaagacgatgatgtccatcagtagtggtaactgtataaaccagacgtagaggtgagagcactagtcagcagcagacgagacgaccggcggtgaagaagataaggccaatcaacactggcagaatcatgcagccatggaagtgaagaaaccagtcggcagccatggcaaacgtaggcagcttgtgttgaagatactgatgcctattagtagtgacagcgatgtagccagccgtgaagaaggtagcatcagttggcgttataacaggccagccgtgcaggcggtgacaccagtcagctgcggatgcggcggccggtcggtgaagacgtagacgcccaacaacggcagcataataagtctgccgtgcaggcggaagcaccaatcggtagcggcgaaggcaagccggtcggtgaagacgcgccccagccgtgcaggcggaaacaccagtcggcggcggcgaaggcgagccggtcggtgaagacgtaggcgcccaacagcggcggcataataggccagctgtgcaggcggaagcaccaatcggcagcggcgaaggcaagccggtcggtgaagacgtagacgcccaacaacggcggcataaaggccagccgtgcaggcgaggacaccagtcggcggcggcaaaggcgagccggtcggtgaagacgtaggcgcccaacagcggcggcataataggccagccgtgcaggcgtggacaccagtcggcggcgacgaaggcgagccggtcggtgaagacgtaggcgcccaacagcggcggcataataggccagccgtgcaggcgtggacaccagtcggcggcgaagtaggcgagccggtcggtgaagacgtaggcgcccaacaacggcggcataataggccagccgtgcaggcgaggacaccagtcggcggcggcaaaggcgagccggtcggtgaagacgtaggcgcccaacagcggcggcataataggccaaccgtgcaggcgagaacaccagtcggcggcggacgaggcggccggtggtgatgttctgactgatccattcctagagcgtaagagataagcttaaagccatgaatcccttttatgcatatctggatctggatcctgcagaacaaacatataggatgagtagtatctgatataaatataatactcgagaaaaaatcaagtattttaaaatatttataaatatgtatttctcctcttgtcaattttgatttccccgagcagatgactcattacgtttaaacgctctgcccaactagtcatagccaccaagcactgggagtcggcctaagcacttcccaaacatgcatatgagtgacatgagttcttcattaatggaacaaagtttcacggatcggagtttactactcgggtacttttgcaattattaagagcagaaaataaatttatctcatctctatgcttttgatttattccgaataatacttagcaccttgcgttactcggtccatccaacgagcccccgggtgctaggaatcggcccaaaggcaaccatccattggcaaaccaaacggaaagcataggaagatagaactccataactcgataggtacttttgtactcagattatgtcgcaagcaatcaagatgaatattataaaaaatatgatataacatctgtagcccccgactcactactcaatggaagaccaattggtgtagtgaggcagaggaaaaggaaaaatatcatataaagaataaaataaatgacgacttagctttgtaatattccccttggtgatggcagaagtagccaatgtgggaacgaagcagtccatcaatggtgacaaaaacaccagtcggcgccagtggaaccaagccagtggtgtagatgatgaagcccattaacagcggcgaagtccgtcaaccgtataggcaaaaacaccagtcggcagcggcgaaggccagccggtcggcgaagacgtggacgcccaacaacggcggcatgataggccagccgtgcaggcgaggacaccagtcggcggcgacgaaggcaagccggcggtgaagtcgtagacgcccaacagcggcggcataataggccagccgtgtaggcggaggcaccactcggcggcgacggaggcaggccggcggtgaagtcgtagacgcccaacagcggcggcataataggccagccgtgtaggcggaaacaccagtcgacggcagcgaaggtgagccaacggtgaggatgtagacgcccaacagcggcggcataataggccagccgtgtaggcggaggcaccactcggcggcgacggaggcaggccggcggtgaagtcgtagacacccaacagcggcggcataataggccagccgtgtaggcggaggcaccactcggcggcgacggaggcgggccggcggtgaagtcatagacgcccaacagcggcggcataataggccagccgtgtaggcggaggcaccactcggcggcgacggaggcaggccggcggtgaagtcgtagacgcccaacagcggcggcataataggccagccgtgtaggcggaaacaccagtcggcggcgacggaggcaggccggcggtgaagtcgtagacgcccaacagcggcggcataataggccagccgtgtaggcggaaacaccagtcgacggcagcgaaggtgagccaacggtgaggatgacgatgcccatcaacggtggtgtgaccaaccgaccgtataggcggggacaccagtcggcggcgacggaggcaggccggcggtgtagatgacgatgcccatcaacggtggtgtgaccaaccgaccgtataggcggggacaccagtcggcggcgacggaggcaggccggcggtgtagatgacgatgcccatcaacggtggtgtgaccaaccgaccgtataggcgaggacaccagtcggcggcgacggaggcaggccggcggtgtagatgacgatgcccatcaacggtggtgtgaccaaccgaccgtataggcgaggacaccagtcggcggcgacggaggcaggccggtggtgaagtcgtagacgcccaacggcggcggcataataggccagccgtgcaggcggaaacaccagtcggcggcggcgaaggccagccggtcggtgaagacatggacgcccatgaacggtggtgtgaccgaccaaccgtataggcgatgacaccggtcggcggcgacggaagcaggccggcggtgaagtcgttgttgctatcagcaatggcggtggcgaggacaagccggcggagtggactcgcggccgatcgaccggaaagctgagacgcctcgagtccatgaccagcatcaatcgcctcaatagtgccgcgtagttatatgcgaacaacaacaaaaaatagcaagaaattaatctgagattaaaaatcaatatgataaataatgataaaaatcagattgagtttccccctgactgatttggatcaagtcagagaagaggagcttgaagaagtggtcgacggaaaggaagtgaaaactcccaaagcgaaagcgaagtcggcgactcatgaaattgattccatcgcgcttgttgataggaaactcgacgcaacccctacctggcgcgccaactgtcgaaacatgaattcggcaataataaaacggggtagcgcacgagacctaaaagtggatggatgtggagacaaaggatttagacaggttcaggccctctcgatgagaggtaataccctactcctgtttggggatttgaatccgccgggtgtagtatagatctgacgatcaggttgtctcatgccccctagagggcctcctgcccaccttatatagggtggggggcaggattacaagatagaaaccttaaccaacacggtatcggcttcctaaatctactttacaatattatcaaatcaggactttaggccgctccataatataaaaggaaacgtaatacccaagtcatgatctgttacatattccatacatatatgttatcccctattactagtcggataaccatgccgtgtgggtatggggtacccataatctccacaatgctattatcacctctactcaacggcggtgctacctctgctactgccaagaagcccttaattaacgttgctgcgaaaacccatgattctaaaaattgtagggtcaacactgtagcgagctgctaagcctacgatgaagcaagtatatgcatggcatgtgcttttgttcagtggacactgatgatcgacctgcgttttgttgagatctggatatactgcaggaatggaatattttgtggaagcatccgtggatctatctgcgctgctggatcgtcagatcagaatttggcgaaatgtgtatttgcaaaaacattcccgaaaccactaatccaatgatgtatgtaacatactgatgaatatatatgtgtccagtcgagactatgcagctcggcaaaagacaccatttgtcagccttggagcacattaattggacggttcgacggttcgaaagggcgcgacacatgcagaaagccctactgatcagtaacagtatggatcattcatccgtggatcaagatctaggaacaatggaacatgcacatcgaaaatgaatgattgaatgattctctgatcacggagaaaacagagaaaaagaaaaatagttggcttataaactaaatttgcaagagagtaggaaaaacagttaactgaagaagtagcatttttctctccttaattgagaaacacgcaggggtcttccggctagcttaattaataagatggtgggctagctagcctggtttcgaagcctcatccattttatttatttgatattacatccttctctaatattcgtgtttttcccccttaattggactggctttctcgatgtaacaaggattagctatttgtcaatcacctgcctagctgtatatataggagacgacccaacacacactgatcgccttgctctgcccaactttggcgatggatgatgcatcgcaaagtatgcaaagaagtataaagtctattttgactaatttttagggtggtgatatcttagctaatataatttagcaagataatttagccgatacagcataaaccctaaaacgaatctcagctgatacaaaagtaaattaagatgctaaactagattaactaagatatatgataaatatgtatgcaagtataccaacca

SEQ ID NO: 8191 - DNA, 12430 bp, Oryza sativa
aaacgctctgctgcttgcctgcttctgttgcgcaacagcagttgttgaccagccgccgacgccgacgccgacgaggtcgcgcaggcgccagcgccgcgatgatgaggacgacgactccgccagcggaggcactcttgggaacctgtcgtggatgggcgagccatgggaggaagatggcgccaggggcaatttcgccatttcaaaaaatttctcaccgcttttgacccataaattataaaatattgtctccggtgtcctatagctaattacacaatttttgtagtgtccatcagccgtgtcacgtttttacggtgtctctcagccaattacacattttttgagtgtcctgtagcaatttttttttttgcggggaatcctgtagcaaattttgccttcaaattaatctagttttgtactgacgtgggaaattgtgtctatattctgatagaactcggtaagagtcaggttgtgacttgatgagaccatatcttggttccccttaaaccctggatcggcttgttcttttttgtcctgaatcgaatagtttcttgctacggtttctgtcataaatttaccaatatgagcaaaccatgtagcgctctcaactatggttgcctcaaaatggatcctgtatgcatatcactacttgccagtaggtttgattttagtgcataggtgtgtatggtagtaacagattaatgtggtagttcaacttcttccctgctattgctagattgatgggctacttttttgttgccattcctgactgctcaatgtggttcagttttggactggatctacgtagagggaattctctcctatcttttcatatattacattgtttcataagagtcctataatttcatatcaagattttcccatacctgtacacgtgctagtgcttttatctggactcgccttttcctcctgagcatggattctaggaaattgtatgttactttgcttctgtaaccatgcttgcttattttaccaaattacattttagtttattgcttaaggttgtcatgattgataaggtcgattttggaaactaaaatacttggaagtacttttctgagtaggacgataaatatactaagtagattctgcttaccttcttctgccatttcagggtcccttgtagagcaggcacatgcacaacgcccattcaagttacatcttcgcagttggtctcaaatgagatattcccaccatctgttgtgaaagcccttctcttccctggggctatagcaagcaaccttactaagagcatgacatttcctaggtggaatgacctgtttgatatttacaatttgacagaagccaagaccgcttcagcagtaattgatctccagcgtctagaggtactctttttttttttttaataactggccaactttcttaagcagataattgtgacaattgttacactttactctctttctcacttctcaaccagattcttgctggaagctacttctgtgctgctggagcacttgttggtgtcataaaccctgggaggatgaccttgtttggtacccttttggttatctggggtctagtgaaagaagcgctctttgggaaaccggtgaacagtgatccaacacaatcagttcatgtttatccgaccattttaattgcactgatttgtgcattcttgtcaataacttacaatgtaaagaagacagtaagaaatagtcagtctgtttcaatcactaagcctctgcaaagttctgccaagtcgaaactgaagtagacacttcattgtctatttgccccttcatccttgtagttcatttccacaaatttattgttgaagactggcccaaaggataacactactgtggttcttgtgtaccactttgaatactgtaaccttcagttttcacctttgtatcaaagacttatatctataacttttattgcaagcatattcactttaatttccctcgtatttatttatgtatatgctgtttacactgttaagactactggcatcatgtcacccttcctcttgaaggatgatattttatctttttgtaaattccatctattacttgctataacctatagctctgaagttctcagatacatgggaagttttcccacagtataacttgttcaatattcattttctttgtcagtacaatcttgctttaatcctctgataaatcaagaatttatgattaccattttagtttaactatttaagtttcccagtaactttgttttcacctatattctcacactggcccaatggacgatgtgtccttctattttattctgcatttggaattctacacaagaagtactttctgaactgttagctgatgaatcgaacaaaatggagttgaagaggacaggacacatgtatctgtcagaatttgctctatcatgaagtgatacatcattagcggcagtactgctgtcctagcatttgtatacttgtattgtgtaaagaagggcaagaatcaaggctgcatgtgcaagtggctcgtctcctatctcttgctctctgttgatgtctggttgatgatgagatcagaggaaaggagacaggctgagccccacccaaaccccatgtgagcattgtccttttaacctgtctgtatttttgtacactctgctgcttgcccttctggtgaaaccagacctgaactcttttatctacccgactgcagcctgaagctgattaacaagtctgaagaagcaaacaatgccacggagctactggatttgtcatgtagaaggggctgaagagataagctgattcggtcgaaatgttaggtggtttctcaagtcagctatcatagtcttctagaatgctcttcttgtcagatttctctcttggcaagagataaaaacaggcataggctcctcttcaataattgagatcccttctctctatgttacttcctcctgctgtcataatgattgctatggttagcctgtcaaggttatacatgagcctatttggttcttgtttttactagtataagtggttgcttaagatctaaaactatccttccacctagactacattagcctctgctagcctaatttgtcaagaagccctgcttttgcagttcacattcttcccaagccttcctacagactgctgttcagacttcagttccatggttcagatgtctatacagaggtcagttgttcttctgttacttcttgaaattaattttagcatttactggtgtttagtgtattcagacttcgagagctatggcaaaatgactcaaaaatgtttgcagggctgcaaccatttcacctccttgttccttatccttgccatttgattgtgtgagtggtacaagtagaagatttgcctcatgtagatcccagtattcatgctttgcctatagtgaaagactatctccaaatgttttgaagaccaacagtgtcgtcgatccctctgaaccgaagattttggatgcgagttcttctgcttcaagaactggacaatatagtgcaactactcatctatcaggtacaattggagtaatgggaatatctgcctcttcctctctcagattcttacagaagcttgtgcattggagtactcgtgatggagaagaggcacctccctttctcgtgtgtaatgatccacttcttaagaaggagctcatgtcatctcaaaattcacagcgcccttccgactgtaacactgctcttgggaagttaaggctgaggaggctcctcttggagaaatctggagtatgctgcattgccatgccatgtaataccttacatgcctaccatgatgaaatttcacaaggatgctctgtaccttccctccatattggtgattgtgttgtaaaggaactcaaatcggcaaacttaaaacctgttgaatatggaagtaatgtttgtgtcggaattctatgtacagacaatacattgaatgcaaagtgttatctaaataagctggagagccaggtaagacatcttttatttggtcatcaatcatcgtttttgcaacaacatatttatttctttttcttaaacaaactactatatatttaatttaaatttaatgtttacaaataagtagctttattgcaaatgaaatagtaagatgtagacaaaatgcttgtttcctaccttgctcagtttgcaaaattttagcaatcaatatttcaggccttcatttggaaacatctatatgacaaccaaagcacttcatatatgttccacctgttaggcaactcatgtcctatatcagtaacgaatgatcagattttcttttcccagtttgctttgcactggtatactttcttttacatgacaggccagtttacaaaaagattgacaaccacagatcttatgccgattgtagtctgcccattcccgatttgccaatcccatgataacttgtccatttccaatttgtcatattattgatatccctttagacattctagttgacattttccttcaatactgtacacccatcccatccaattggcagcatatggttatgttgttttgttcttaaattccattttcacagggttttgaggtgctgcttccagataaagcttcattggagcacacggtattaccagccatcggcgcttttaggagaggggacatggaaggtgcaagaaatctgttgcgaatatcactacaggttatgttcgtgagggctgtcaatacaataatccttgcatctgatgactttgttggtatattacctgatgatgacccactgctcaagaaatgcatagacccaatggatgctttggttagagagaccatcatgtgtgcaagaacagatagcctgagaccatgatatccttcaaagtgatgctggttccttgtacagtttgcaagtagtagatgttttcattttttatctccagcgagcacacatgtaaattttaggatcagagaagaattcactattcatcacaagtcaatatcattaatagtacagtgtattatgcagtgtgatctgggtatgcattatgccttgctgctaagtcaagaaagatgccgagtccatctgcgagttcagattttgtcagatgtgtttgtggcctggccacaccagggaaaacttcaaacaagaatctagaaatcaaatagatgatgtggatgtttctgtggatcagcctgtagatagaacaaatgaagacatcgtcgaatcttaactgcgcagaaggagcacctttctttttcagataagtagcaactgccttgacatctgagatcacagttattcagtaacatctccctcttgtcaaaaatatatccccatcagaaagaatgcagcctcatgctcttccaaacacttctacaaggcgtgttcagacttcagagcctgtatggtaacacagttatcagaaagttatcagtgtgttttttttttcagaagttgtaacagagatgatgcttccattttgacttgggaaagccaatctgagtgggcctgttcactggtattccaagagaatctggtgattggtgtggaggaggagggggaggggcttgaatgttctgtgcacaggtgggattgcaaaaggtgtgcacaatgagtgagcaatgattcaggctgtctgcaggggccttcaccaaacaagtggctaccctttctcccatgcaggaaccagggacaaaaagaaaggaagcacaggggacaatgcaacaccaattgggccttcctctctctgttcttcagggtaagcaaaggcaccaatgcttaacccaagattgatcatatcagaccctgtgctggagaaataaacaactccagcatcatgctattgtgctgtgatatatttgtatacatattcagatatggctttgttttttaagttcttcggtcgtcgcggtcgggatatttattccattatcataagaaataataacaatactacatacatattcagatgttctgatgcttcatgaccgatcacacacttttcttttctcctcttcacaaaaggggaagaggagatcaggagaaagaatagtgctatcttccattcagtctgaaatgatttgaggaagcatctgaagatagtgtaatgctagagctacagaaagcctttgcaatgtgtttgtgtgtgtgtgtggaatgtggattgcctgtgtgcggctgctctgctgccattttgagtgttgaggttttgttgcttgatgaattgatgatgatgatgatgatgcccaaagtggtaataatgctctgcatctcgatcaccttgcttttacaagtaaagcagcgccatgattgttccctggaatcttatccaactatacctccacacacacacaattcttcttgttcatctctccctctatagatttgtgaattccaattgaaagcaaagctatgcttctagtatcaatcagttgagagagagagagagagagagagagagagagagatgaacaagaggtggtcacatcgatcgagcagcaatctgattgagaaaacattcgcttgtggctgcgataattcgctgtcgcctctttgttccctgtacatgataaatataataaatatataataatggcgaagcactaattcggctttgcatatgcgatgaacaattagcaggaaagggagaaggcatctgtttatggatagatttctgccaaatttgtacgccaccgggattgcagttacagtcaaacgattaggaataatccatgtcatgctccatccacatactacatttgttcatcaagcattctaattcttctttctcgcaaagtagacttagagttaagtgtaactaagagagtgaaagacggggcaaatcacaggccaactcgcatttttgctttcttaattatctgccttttattgggaaaaaaaagaggaagactgatcagtcatcagccacaattttgtgccgtttttgtgtttttttagtaccgttaccgctcttacaaatgaaaaaaaaccctcaggttatcgagggttattctaaaaaaaaatagaaaaaagaaaaccctgaagggcatgaccggtggccgatcaatcttgtccgtcgatcttcgatctcgtaaattttatttccctttcatttcttctcagtgcaaggcatatatcatatatgtcagatcaatcaactgaaaagagtagagaaagaagagaagagaaaactgaatcagatgagatcatatatttagcagcagtttgtcactgtcaaattgcaaatgtgccatcatgtgggtagcttaccgtagtatctggggaaattgcaccggaagcactcggttctgttagcgtagttctgcacgttgcattccattctgcaaaatcaccaaaacatgtaaatatgcatcagcactaacattccatatatatatatatatatatacttcttcagaacagatgataacattcacattcagaactattatcaatgctggtcgatcagttttttttaaacaaagcttgaggtgtcgtaattaaacatcttgatcagcagtggtagtaactaaaacaaggaatgcagaactgacacgtcaagaggtaatattccagttggcatgcagctccggattctgttgggcatagaatctttggactagacacatgcatgctttagtttagcgtttcctttttaaacacatataactaatactattaatgttcaaaaaaacaactaatactattttcacagagacatgctcgatcgtggcaaaagaacaatttgcacacttatgcatgcatctccgtgcaatctaattaaattaatcagctaatgtgattagccagaggcagagcatgctgcattcccaagcagccacctccgcctcttaaaataaaaaagaaatataagacgtattttgtttcgttaggacaagacttagacttgaacgagctaggaacaactaatgaagtatgaaattacctggggcagatccagtcgccgttcttccagccggcctgggaggcgacggagaagccccagccctgggcgacggcggcggcggagtcgttcttggcggcgccgcacttgaagcagctgccgcggctggcgtagttgttgacggcgcagcagcggcagcaccagtcgccgggcttcacctcccacccgccgcccatggcggcgtagtccgtccgctccaccccgagcttcgcctccccgcaccgctggcacgcctccctcttgcagaagttcacgtactggcacgacctgcagctccagtcccccggcttcctcatcgccatcgccgccgccttcgtctccatctctatctacctatctatctatctatctatctatcgagcaaatagaatgtacaagaagaagaagaagaagaagaagaagaagaagaagaagatgatggtcgttatcgagcaaagagcagagcagagagagctgagctagctggagcagactggaatgctgctcagcagctagctagcaagcttgcttgcttgagcttgagctctgatgaatggatggatggatggaggcttgggtttggaaggggaggtggcgcgggcttttatatagggtttggtgatgcactggagcttaggtgatgagctaggccagttgagttggggcccaagtaaagccgcgcaccgggggaagaagcatccattcgtccatctctgctagctgcatgttatgttgttgttggtagtaatattgtgcgtgcatgcatgcatgtcttgtctagctgcctgctggctataggctacatatgctcccttttgggctgagctagctagctctcccataactggggaatctccaggattgatgggacttgtgaattctctgccaattaacaagtgtgaataaatgaattattgaaaatgaataggagcctacaaggtcaggcctttgcctttccagctttgattatctttggttatgtgcatgcatgcatggctgtgtttatatattcatgtgagggatagaatttgtggttgttgacatggagtaaatttagtaaaacggcgcaaactttcacaaaactataaataaattaatcaagttatacttcctctgtttcaaaatgtaagatgcggttgttttggagtcaaacttaaaaaaactgacttacagcaaaaactaaaacatcttaaattttagaaaaggggatagcaatgttgaaaactatatatttagccataaatttagcaaaactcttgagatccatggaaataatggtggataaaatctctaattaagaccttagtatttgatcataaatgttcgctttaggtatatagtttggagtacacatttcactttgaactaaaaatatattgacaaatgttacacacaactaatggatcgatcaagtcgtgcccatgtttttacttaacaccaggttttctactttattgattggaccagagttcatgaataaaccccaccacgatggcttcagcgcaagtacgggcaaggtgtaggtgacttgtagcattgctccacccctgctaggtcatgagatcaatcaatcaatgttctaacctattccatcctctcttttgctctagctaccaccatgaaaaaaacgagtaggaattatgcgccattaatgatggctagagcaggaagttgggatgggggaggggttgggaaaaatagacatgcatggacacatgaatgaatagtctaggcatcttgcccatcagctatggtgatggtgctttgtctgaatttaggaactgaataatggttccaattcctttcaaaagtggagggttgcttgatcaaatactatctaagtacttcctccgcgtcctaaaatatagctacttgtagtgtttaaattttattttaaaatacagctacttctagagtaagaagagatatttgtagtgatgaaatgtcaaaaatacccttcttcttcaccataccgaccaatcaggacaattaatgaaggaaaatttagtctttttacctctttttttagttatctctatgaaaaactctagaaagtaaggtagatagtatgagatgattcttctaagctatatgtttaatgttatgatttatttatagaataaactaaattaatatgtgcttatatatccaacagtaataaatatttgtattggccaatactcatcccattcaaatcaacattgagatttaacttgcctttccacatctattatattggcgagtgatgcacaccatatataaaagaagtcacctcagcaatacgtgtcctatttttccttggtacattcaattttcctgacaacagtcctttaactctcgtaaccggggacatttgaccatgaaaagcggaaacgctgaattgcaaggtaaaaaagtacatgaaaaaaattttttttgcgagaaaaaagaaaaaaatgttttatggttatccgacacaggaaattacaagtctctaaaacctaagcagtgaattaactttcttgcgggcgattgtcaggaaatctggtaggaatcacagtacacttcgttgttggttaacagttgacaaagtaaaattcccccttgcaattgcagattatcctaatgattcatgcatgaggatttaccatatatatctagcaaaatgtttcatgatagagtgaactatatattaccatattttgcttcctcggtagatagaattgagagaagactctctgctacctcagtttttctatcttatggaaataaacttactatggttaattcagttttctattcctaccaacctactatatgtgtactttgaagttgcctaaaacaataattgacaatattgatcgaggaaggagacaccgtctttagagaggttatgatgtcaattccaataagaagtcattggctgtttgggacaaggtttgcaaacctaagacaaagggggttcttggggttatcaatcttacaatccagaacctccttctaaagtatctagacaagttctatgatagcaagaatttgccccgggtcaatcttatttgatcctcttattatagaaacggagtgcctcacttatccaccctcaaggggtcttttcggtggaaggatgtttgcaatttgatagatttcattggaggcattgccagatgtttaataggagatggagtttcatgctctttttggaatgatggacctcctctttctatccatatgccaagactgtcttcttttgttttgaatgcaaagatcccagtcacaattttctttcaatttagttggaagataattttcacttgcccctatctcaagaagcttatcttaacttgtagtctttgaaagttttgcttaaagaggtaagcttgtcacaggaaaatgatacatgggcatatatttggggtaatttgaagtacaggtcacagaagttttacattcttaattttagagttttgcaaccacctcagcatttcctttggttacggaagagtaagacaggtcaaagtgtttggttggttactactcatggaaagattaaatataaagtatatgctggatcataaacattgtgctcctccaaactgtgacctccaatgcgtgttttgttcaactcaatctttggaaatcttaatcatcttttttttttccaatgccctttctcagtgagattttggaatatcttagatattgtttgggacacctctttgacactagatagcatggtggtggaagccagagatagataccatggccattactttatggaaaaattcttatttgagacatgaaatatttggaagcaaaggaatgggtttatttttgaaaatactcatccttgtttgtcttcttggagataactccctaaggctgatctcctccttttgttgtttaggttgaatgagagagataagaatgtagttttgagttgaattagattgttgtaatttttttcttttttcctgtacttgttttctttctttaataaaaatctatttaacaacggggcctcctatgctgtaatttctttaaaaaaaactatatattgccatgaaggtctcactactagaaaaatcatttttcccaacgtgggagtcttattttcgcaggcagacatgacccttagagccaaatgaccgcctacaaaaatataaatcgagatgaaatttgatgtccgcctgcgaaaatattttcacaggcggaccacttaagcggcgcctgcgaatgattttcgcaggcgccgcatcattttcgtaggcgccacttaagtggtccgcctacgaaaaaaaacttgaatataaatagactcggcataggaggagattttttctaagtctccacacctcaccactcacggccggcaagcttatccattcaacccctcagtccctcagctctctcatcccctccccctcacctctcctcttctccccacctcaacggccggcctctcccctcccctgacctttccttctctcccggcggcggcggcgggcggtggcggcggagggcagtggcggcgcgcttccggccccttccttccagatctggcccgaaggggg

SEQ ID NO: 8192 - DNA, 7486 bp, Oryza sativa
cgggctccggcggccagctcggcggcgcaccgctgtacgcggtgggggacgaggtcgaggtgcgcatggacgaccccggcttccacggcgccttctacgaggccaccgtctccgcgcgcctcccgtgctccggccgctacgaggtcatgtactccacgctcgtcgaggggggaggaggccgcggccgccgcggcggtggcccgctccgggagacagtcgccgcgtgcgacgtgcggccgaggccgccgccgccgccgccgccgccgctggcggaggacggggcggcgccgggcgcgcgagctcaacgtgttcgacatggtggaggcgtaccacagggaagggtggtggccgggcgtggtgtccgcggcatggccggctcgcgggcggaaggcggcggcggcgatgtacaccgtgtcgttcccgtcgtgccgggaagaggcgaagctcccggcctcgctcgtccggcggcggcgggcgttcgtgcgcgggcgctggatggacgcgcgcgacgtggtgagtcaattctgctgaacggattgttgtactccgtattttcccccttttgtgctggtggtggacaggagaaaccctcttcggtgcgttattcgtggctggattattgaggcgtaaacctgacatttgacatgggatttaatgctcaattggacaagatggaatgttcataattttaatcggtggtgatgtcgcatgtacatgttagaggaactttaggtagtgtttggtaatttgttatttctaacaaaaaaaccactgaagatatagaagaacttcgttttttttttttacctgtaggtgagtggtgacttgaactgatgacctcaacgacaacaatcaatgaattcatgtgctgttctaacactaggcgagactaggtgctttgtattgtagatatgagtgtcccctctagtttgctactagttcagaatctgagatatcaagataagaccaagtgatgacaaatgccatacttgtttgacctaattatcgtgtgctgagtttctatttacatgtgggggattttattgaattcaacaaagcagtaagtcattcttcgtccactggttagtatatgtatgctaagctattggttgcatccttgactacacattatgatggattggagaatgcaaattagtgttaatgagttccagtgagaaggcaaatacaaaagaattgtgcttccaaaacagtagcagttgaaaaattggttgtacaaacaaaaagaattgccatctagaatttaaaacaatgtcaaacaagcaagaactcctgctaaattttatgctaactgaatgaattttatcgtattctgaattgtcaaaagaataaaatggaagactaaatgtgtactccctccggttccatattaattgacgttttagacaaggttgatgtcaaacttttataactttgaccatcaataactttaaaaatatttagtttaaaggaactagaataacatatatagatttgtctttcaaagcactataataaaagtaaacatgcatttatttattatatatattataatagaaaaataaggtcaaaaatatattttgtagaccgtgtcgttgtccaaaacgtcaattaaaatgaaactggagggagtaggcaaaaggaactccgttttttcctgcatgaacacgaggcaaaacaaactccatgaaacctgatatccttggtgtaagcttcactgagagagaatgagacacggcaacacaatatttactttgtataactaatgtttgtgcttttgttattttgagtgcaggttccaagggtgccgcagtatgacgaagggagcaatgtggaagtcatgttggatacaggaaagcaccgtgcagcctgggtaactgctactgtcattaagatggttagcagtaaaaactatgttgttaggcttaaaaataaggaaggctcagttaacatcgtagattactgctatattcgaccacaacctacctttgacagaaagaagtttgagtatgaactggagccctctgcagaggttgaagtgaatctgggtggtgcctggtcgctaggcgtcatctcagatgttggaagctgtggatatggggtaaggctaaaaggacatgatagctcagaggaagaggactacatgcttgtgttgcgtgctttactcagaccctactgcaaacaggatgatcaggaattgatgccttgtacagcaaaggtatttctccaactagtcatgttgttacttgtgatttgggtattttctcctcttctttcttggtactaccagtctactgcagtgttcatttttctgctgtgaataaaagtttacaatgttttcttgccgtgcttgtatgccttcttggaatatgtggtgtttgtcattttaatgtcagtatgccagcttagttgtccctgtgctctggacaagcaggtaacaaagttgaacaagctagagaacaagaacataaaagggaaggcgcgcatgctagtttcaaggaaactgcctaacctaggctgcacacggagtggtggtaaacaaagacacagcatgaaaaaggttgtcctgactccgttcttcttaaattgcaaacttaaattgtgtcttaaattgcaaatttccgcgcattcatacagaaaagcccgcttggcgctttcacaggtcatagtgcttttatcaatatatattttgaccatcaaatattgtgcttcagcatcttatgctaatgacatcatgtttttggtatacgctttcttcctccaagcaatgacattatcttatgctaatgacatcatcttatgctaatgatttagttctctcctaaactgtgttgtcatttggataattgttgttcaggaatttgcttgtacaagtttggatcttccatgtatctctgcacctaaagatgctgttgaaatcaagggcaaatctagttatgtcgatgtagtcgaaatcagtgacaactctggctatgatgttattcatatcagcgatgattcgagctgtaaccctagaagaaagagaaggcgacagaatctcctagaggaataactccattcccggcatacttcctatccgattcaagaatcacaatccaggctgaatatgtcaccagcacgaagtcctttgaactgtgacccgttgctagatgtaatgaggcatcctaaagtagagtcgtgcaaccatgtgttatcacaatcttgtcgccattggaaacaccacaggctcatttcaacaacaatgctgggcagctaattcctctgccaagttatccggtattagagaagttgccagttaaagtgcttcctgaaatgaatgaaatgaaagaaacaaatcatgctcatttacaagctgagttcttggcacctgatgattgtacagccggagaccaaaactatgctctgcctataaaagttgaggtacatacgtctgttatctttatttgagatgaaaattaatcccttcttgattgtctatctgttgctaactcacctcaacttaggtggagagctgggtcgctgatatccgcaagaaagaagcaggtaccggtctgactacctcaaacaactgtgagtacttgttataacgactttgtgttacattcaattgtaaaacctgtcttaactagaacgaaaatatcaccagcaatgcagacaattactgatagtggtgaagacaattcaagaaggccacgatcaggagattctgagataccaaattccagtaaattagaaccatattcatctgagcaacaaaggtttgaggccgatctgccatgcatgccagtgcctaacaatgttactattaatactcttcctcttgttaccagacatacgtttcaatttgtttctcggaacaaactggaagtgccagtgagacataagaaggcccctgatgctgtaagaccatctacgttttcccccctgttttatcttctgtttaaatgtatgtgtatttcccatccatgcttgatcatcttgatgctatttgtacagctggagatgaataccaattcggttgtcttctctcccaaggagcaaacacactgtaatttggagatctttagtccaaactgtaagtcttgccacaactttaagatagtaatttttgatgcattgatacttaatactggtctggctgatctgaatattatttttctgcagccaagaagatcattgatgcgtcacactatgaaagttatgcgtcattacagcagcatcctttgggccaatgtcaagttccaaattattggagtgctgcagggcaatcttcatttgtgcatccgagcataacaatgaacctattcacaatattgccagcacctaacagtcatccaactacttttgcctcaagcttgttgatggggccttgtgagaaaatagaggtttttgagaatctgccacaattaccacatttcggaaagttgattggttgccctcctgagctccgcgaaggaaaggctctggggctaatggcatccttcgcaaatatagcagagagcatacaaaacatgtgaattcaggacgaagaaaacgtctttgaggagaaactgaggtgcctctcggaattggaagaggacggatttgatgttagggccctgaaggagcggcttgaaaacctcgtgagcataaagaatcaccagacagaactcaagaagaaaagagcaagattggatcagttcatgcttgagagagaggtggacaatgcctctgtagagcaaagccagaagctgctcgacataatgatcaaggagcttgagctgaaacttttagagtaccgagagaagaaggcatcactcgtggagaagaaagcagcgaactgttcggaaattgcaaagctccaaggcgacatggatcaaattgaggagtcattcctttctgccgagtatgatttccacaccaccgctgctgcgccgtggtaaacattgatgacagtaagtactgctttcttgcttgctcatttgtgcactgcaaccaagtccatttggatggtgttaactgatgtgaaacaatgcaggcagagagctctgttcacagttcacctagacatatcacatacgcatatggttcactgatgtgatgtgatccaatgcattaggggaatgaggcagctagttctcttttgcctagacttgaaatgctgaacttaattaagtttgtatgtataatggttgtcacttgaatttggtagatcatctcattcaatcaggcttgcccccctgacattgatatgcgctgtttggcctttaaccccccccttagtgttggccaatcaagcagctgtaattttctttgtattctcttggttgtaacccctgtactccgttttttttttctactctaatgttaaattctagcagatctcctgccgatgttctccttaaaaaaaaaaaacaggcttgccccatcttcaatgctagctctgttcactgatgtatgtgaaccaatgcattattaggggagtgaggcagctagctctatttgcctagacttgaaatgtcgaacttaattaagtttgtatgtataaatggttgccacttgaatttggtagatcgtttcactcttgccccatcttcaatgtgagcaaggtctccaacgtctagaatcacctgacctggttaatagttttctgctggaaaaatatgatgctcctcacagtcctctggttgttggggaaaagtgaaaacctctttcggggatattcccaatctcaacaatgagaactgaaaagcgatcttattaacttaatctcagacgttcttagtttcagcagtatgataacctggagtgaacactgaactgaccttggttcttacatcagggctgcacgcgcactgaatctagaaaagcctctggagtagtactaattaattaactaacgatatatagccaatgactactggtgcaaaccttatacattataggagtgtgtaattaattaactgtgtgtgtgtgtgatgagttctatagctagcatttctcgtcggcgtcggcgacggcggtgtgctgctgctgctgctcccgcgaggtggcggcggcggtggcggcccacttggcgcagacgaggtaggcggcgaggttgaggacgctgaggacggcgaggagccagtagaagtagtcgaggcggctgcggtcgatggtgtcgccgagccaggtggtggcgcccttgacgagcgacacgagcacgctgctgaagaagaagccgagcgagagcgtcgtcaggaagagccccgtgctcatcgtcttcatccccttgggcgacctcgtgatgaagaagtccagctgccccgtgtagatgaacgcctcgccggcgcccaccagcaggaactgcggcgtcagcaggaacacgctgatcggcgtggagttcccggtggtggcggcgacggcgacggcgaggcgcttcttctcgcagagcgcggcggcggccatgccgaggatggagagggcgaggccgatgccgatcttctccaggttggtgaagccttgcttgccggtgagtacgcggcagagcgggatgaagacgcggtcgtagacggcgagggtgagcatgatggcgccgacgaagaagacggtgagcgaggcggccgggatctcgaagccggcgccgacgcggcggtccatggtggtggcctgctccacggagaaggtgatcatctgcgcgtagatggtccagaagaggatcgtcgtcgcccacaccggcatcagcctcgccaccatcttcacctcctccacgcgcgacaccgagcagagcttccacgggttgggcgccgccggcccgcccggcccggccacctcgttgtcctcttcgccggccaccaccgccgccatgtccaggcacgggaactgcgcggtgtgcgcgatccgggcgtgctcggggcggtcgtcctcgtagagctccgccgcggtgggcgggcgcttgacgaccccgcgcttccgcgccgcggcgacgagcacctggaggatgtggacgatggggctcccggagctccgcttgtagcggtacctcctggtcccggagaggaagacggcgatggcggcgagcatggcggcggagcagatgccgtaggcccagctccggccgacgtggtcctggacgtagacgagcacggtgacggcgagcagcgtgccgaggctgatgaagaagaagaagcggttgaagaagaggcccatggcggcgcgctcccggccgtcgcggtcgtcgaactggtcggtgccgaagccggagacgctggacttgaggccgccggtgccgagggcgatgaggtagaggcaggcgtagagcacggccatctgcaccggcgtcggctgctccccgggcggcgggcggaggtgggtgacgagggtggaggcggcgaggagggcggtgccgatggactggacgagggcgaagacggcgatggtgaggtagcggccgaggaaggagtcggcgaggaagccgccgaggaggcagaggaggaaggaggtgcccatgaagtcggtgacgacgttg

SEQ ID NO: 8193 - DNA, 25522 bp, Oryza sativa
aacagaaagagagaggaaaaaaatccccacctttccatggcctccagctcgaggacgttctcccccccccccgaatgaaccctccgcctccgcgctctccgccgccggcgcatcaggggtcgtaaccggtgccctcctcctcggcggcggcggcgggggaggaggaagcttctcgagcctgcggctcctgagctcgaggtactctcctccttgcctcttctgcagcgcgagggagcgggtgcgggtgcgcaccccgagcggcgcgggggcaacggcggcgagctccatgactgcggcggccaccaccttggcttggcgcatgtacttgcccatggctggccttgcactcatacttgttgacggtcgttatcgatcagtttcaaccgtcaatattactaaaataggagagaactagtgatgcttgcaatgcataagtatgttagaataataatattccactagtattaggtttactaaccttttgcagagaatgatcataaagtagaggagaatcgacatcaactcagacgataaatcaatcggacgaaatcgagaaccagacttgacttgtgtgtgaataggccaagaactcagaattgacacgatgaattgggccaaaattcacaagtctacggaatagagcaatagaggaggccaccagccgaaattgggctggattgggccagccccaggttcggccgaacccaatcctggcgccgttgaatccaggttttggcatggacgtccaggattgcatcccaataatggttggagggcacttcggataattccccttccacaaccatcataactacctctatataaggagctcactctcttcacttcaacacacaccttaagcaatagctctctcatttctctcaagtttagtttagtagtatctagctagtggaatagaattagaataggagtcaggagtccggaagccttcggaagagttcgggtatggctgtagtagcttttctcctcttttgtaagctttgtacttttattagaatactcttctatatacatttatggtattgaaatactttcacctattttacattatgttcatgttatactgaatatacggctagcttatctagcagatgctttggtgcgggtataatgtttgcttatgcaattgctctatgtcgtgacgatgatattagggtagtatctggtagtttagacgtagtgtctagattacgggatatcattatttggggttatatattgcgaatgagaggtgggctgctgatggtgacagctcactacgtgtattcctccgcgcctatatataatcctaagttaatttcctggggaggatattcctccgtatttagccccggttatatggtcatgacgggctgtcgtaaggaactcggcagtcaggggtggcttctcgaagtaccaggagggcatcgaatagagggtattagctagtatatcagttaactagaatgtatatatactatgtatactagaagtatatgaatagatttcctttctcttttctttcgatttagcttagatgatatattatgaggatgagtagttaaatgcttgtgtgtcactctacccttggattatcttaaccactgcttagaatatggttatcacaagtaatatataaattattagttgagttctctatacatgatcttcccacgggataaaataaatacgatatccttggaatactctcgggtgaaatgctacaatggtatatccgtgcgattggggatgaactctgtaaccataatataccagaagtatttctgcgccattgctggaaaatatatttctagtaatgtcgttaagaaataccaacaatactcgacgagacgggagagggtagaggaggggtagtcggagaggaagtcgaggaggcaggggaggtgggggcgagcgcaggtgcaggggaggggtgcgccgaggagcgcgaggatgctggccgcggcggaggccgccaccgcaactcagaggcaagcccagactagtgccacatcgaggacggcgccatccaccgctccgccacgcccgccgcaccggggcactgtgccataaccgcatgcttggcgagcttccaccgacaagtggggcggcgaggacttgtggaagctagagcccgtcgtcgacctcatcaaccgcggcgccatcggcatcatcccaaccgcttcctctcccgctttgccccaccggcctcctcccccaaccgccgcctcatcgcccgtcgccgaccgccggactcccgcctctacctctgcggccaccgccgtggtgcccggccccgcctccgcctgcgtgcccaatgccgcggcgcccacccgcgtagggccgcttcactagcggcggcgacgcagacgccattcgcgtccgagagaagagaagagaagagagaggagtaatggagaggaggggtaagagagatgacgtggcatcctgacatgtggggccacgtgggtctcatgctgattcagccgccacgtagtacaaaaccggtgtcaaaaccaccgaaggacctattgtgaccggatttgattagttaagtgatgccggatatctggttttgtggttggggaatgattttataactcgatgacaagttaagggaccttcggtgtactttttcctaatttgtaagggaagcagaagaggggcaattgtcctcataagcactagagatattgaagaaatgttgaagaaatgatcaaatgatttgaattcaaatattataaaaataatttgagaatgatgatttaccatgtgtatgtttaattttagaatgaaataaattgtagatataattactactccctccatcccaaaatttttgacgccgttgacttttttagacatgttagaccgttcgtcttattcaaaaatttgaagtaattattaattcttttcctatcatttgattcattgttaaatatactttaatgtatacatatagttttacatatttcacaaaagtttttgaataagacgaacagccaaacatgtttaaaaaagtcaacggcgtcaaatatttagggaaggagggagtatatacttgcatgttgtatgttgaactttgtgtgcttaattagttcatgtgacatatttgcatgtaggttttaggagtgctaataaatagttaaatactatgcttgcatgttgagctttagattattagtgggtattagtcttataaaagaagagattagaacgcacgaatgtggtgccgtttcaagtaggtagaaaaacaaaaggactgcctatatacttcctccgtttcacaatgtaagtcattctagcattccccacattcattgtgaaacggagggagtagtattttacataaaaatcaccttacatatcttataaattccagaacattgaatcgctttaggattcaattttttagatattggatcttttattaatctggcctctatattcacatagcatatacacaaccaaaacctacacgagtcctttaactacaaacctcacacagaggaatacacaaacacacacaaaaaaaaaactagaagacttagctttaacctttatcaatgacttactctttccaacgcagcatgagaggagaagatgagaatcgaaactagtccaaactgcctgttatcacaaccaccatcttcgtctctatggaacacaaccaccatcggctgcttgttgttcgtggtcatcacggagctgtccagcatgacatgtacctacctttactgtcatgagcttgccggagatgctccacaatcgtcgatatctatccgcagctagaccttggtgccgacgctcactgggtagctaccacctctagggtactaccatcgaagagtgttcacagtcatcgtccttatctacatcaggcaagctgacaatcatctcaccatcaccgacgaccaccttccctgtcctcacttggccatggtcagaaccgggtgacggagctcgccaagtcatcgctgccctaagacgccgctaccgagagcctccatcgccgttgtcacaaactgtcgtgcacgaaccaagcatccaccactgttgccgtgcacatcaactgacccgctgtcacgagggagggctagccccaaccactgtccgtggccaccaaccctcaccaccggtgaatagaggaagggacaaaggacttatcccataaccactacccaacaccaccgctactcgccgccaccacaaagggaggtggcagtggaggcggttgttgcaggtcggcctagcgctccagttatgtgcaacgaaggtgcgatggcagtgagggcgcacgatgtcagtgttcagaacaccaacgggcaccaccggtgccatcaccactatcgcaccggcaaaccattatcagacgccgctggcaccgcttggccgtccgctactggtcattgtcgccaccaccatcagcatcaccactgccgtgtcactctccagatacaagtgagcctcgctgggcaccaccacacctacatgaacaaacaccatcagatccggagcttcctcaggcagctactagtggatcctgcccttagcggcacgacggccatcaagccgccaagaaccaagccaccaccccaccgcgcgcaagcagggcccgtagttagcgacttgtgtccagcgcgatatataatggtttttatgatattattattatttatttagaactaaagtgtattgaatagaataatttgccttgggactatgtaatcgttgcttgataggaccaaggaagtagctgttgatgcggtcgtgtccggttaaacatggagcgatgcgttggaaatggaccaattggaaacggacgcagcaagtgtcggtccaatgtcacgcacgcggaagagcgtatcgatccaatgtcacacgcgcgggagagcgacctacacaggcccaacacgtgcgaaaccgactaaaatgaggagacgaaccgaaatcggtggaggagcactatgtaacttttagacagaatcagattaagatacggacgccgtaccaaagatccaacgaaacacccagtacatacgtagttacaaaactaaaatatgtagataaaccaacaaataacattattttcatagcagtttctacggaatttattgtttatatatgccagacttttcttcagctaaacagagcagcgacggacacatggccggccacctcactcgctcgccgccgccgccgcctgcagatcggcgtacctcttcttgcccgccgcgatgaggcgttcgagcggcggcatcgccgccttggcctcctccagcgcgcagaaccgctccacccacgccgccagcagcggcgtcctgtccgcgtccacgatcctgaccccggtcgtcggctccgacgccagcatcgccggcacgaacccgccgagcgccacgtcgacgagccccacgcgctcgccgccgaaccaccgcccgcccgcgcgctcccggagcgcgccctccagcgcgtccagcgccgcgcgcgtccgcgccagcgccgccgccctctcctccccggtcttcccgccgtcgtagatccccatccacccgctcagcagctcgccgtcgacgaaggcggcccagaagcgggcgacggcgcgggcgtaggggtcgtcggcggcggggaggatcgtggtggccgcggcggcggaggaggaggaggaagggaaggcctcgtcgaggtactcgacgatgagcatggactcgcagacgggcctcccggcgtggaggaggacggggaccttggcgtggacggggttggcggcgaggaggaggtcgctcttgccggcgaggtccacctccacgtactcgtagctgagccccttgaggttgagcgccaggcgcacccggaccaggaacgggctcccccacgcgccgagcaccgtcagctgctcgccgccgcctcctgctccatctccggcggcagccatcgatcggtgatctcttcacctgcagtccaacgagtacacgtacaccgatcacgcacgttggttttgagttctttgctgctgacctttaccttggtgataaggagaaacgagaatcagtggctgcatatatagtccctctgtatgattttataagttatttgatttttttagtcaaactttttaaagtttaaataagtttataaaaaaatataattataccttcatttcgtattttcattccgtataaaataaacatattatcaaaatatatttaatgttaaatttaacgaaaccaatttgatatcgtacatattgttattcttttttctataaatttaattaaacttaaacttatgatataaaacggatggcgtatttggaagtgatattatgtttagagtctggactctggacggaacggtgtgttgaccggtgatgtgtcatgtctctgcgccatccacggaaacatcaaacattttggtgttgaataatactcgtgtgactcatgttgtgcttccttcaagacgaagcagcagctagatttttacacttgcacggttgtatctagtttgaatactcgcatatgtgattttgtttttttaattactaatttgtttcattttaagttagaataatccattgtgtaattgtgttttcccctagagaatgagagaaatgataagagccactaaaattacattcgagggacaagaaaagtgacatgaaatataaacagagccatatatattttttagttctcttcgattgtttaggcatgcaccattatctaaacagggccatggcaatttgatcgctccaaacgctacatattcttccatgtctgatgcgccattatcaaaagtgatgtactcctgtggtttcataattcgttttggatatcgacacggtttacaaaatagatttttaaccttattttctattataatataaaataaataaaatatatgtttacttttattatcgtacttttaaaaaaacaaatctatatacgttggtctaatttctttaaagtaaatatttttgaagttaaaatagtcgaaattacaaaagtttaacattaatcttgttcaaaacataagaattatgaaccgtatatgtgatagcaatgtcataccacgtaagcagtccaccttccaagttgaccatggttgattcccatgtccctcgtagatgtggtttaatatgtagattgtcctgaacagaatgaacggtggtgatctctatggttgagaatgatccaggccgtctaatgtaaatggatgatttatgatttgtaatatcgctctatatgatctcaattgtccgagtaaaatcaatggttctgacttgttgaaagagcggtagcccctccacgacacaagcttcgaccgttgtggcaatttcccctcacccttgcacccttgatcaagcagtgcatagtgaggagcactccttctggtgcaacacagtggtgaccggtgaagttgttcatacacaggtgttgggtccttatgtcctacctagacttttccgtctatccctagacttttccgtctatctccgatgcaccatcgtcaaaagcaaagtcatgtaatagtaggaataccagatgacgtaagggtctccaatatccaagttgaccatggggtccacggttcaacccatgtccaattgtccaacttgtgagccgtggtttagaagcaattaatgaacatgtatctattatgaatgatcgagtttgttcaatataagttgacactccgcatggctccatgcgatcctaatcgttcgagtaaaatcaacgactctgattagttcgatcattgtgaccatttgtttccactatgttagaagagcattggcccctccgagacacaagctctagctatcgtagcagtttccccctcaccaatcaccattgttggtcgtcagcatagagtaaggagcactacttccagtgcaacaaggcatggccaacgaagttgttcatacaccgatgttgtccttatttcctacctagacctagatgttcccttccctgttgcaccatcatcaaaagcgaagttgtgtaatagtaggaatattggatgatgtaagaggtctccaacatccaagttgactatgggggtacatggttcacccatgtccaagtgtttaacttgtggattgtggtttagaataaatgaacacgtatctattgcaaatgattgggtttgttcaatataaattgattctctattcgctagtacgtctccatgtgatcccaattgttcaagtaaaaccaactactctgattagcttgatcaatatcttgtctatgtcctgaccgtttatttctattgtattagaagaatactagcccctccaagacacaagctccagcttggccaccatcatagaataggaagcactacttctagggtagcatgaacgtggtcaatgaagttgtggatacacaatattaagtccttacgtcatatctagtattgttgttttcgatgtgccattgtcaaaagtgaggctcccaaatagtacgaatgctgggtagagtaagcgattttcaacatccaagtttgatcatgggtccacggttcaccccatatccaactatctattttttaggtcaacgaatatgtatctattgcaaatggttggttttgtttgaaacaaacaggcacaggatgattcatcagtacagtttcatgcaatctaaattgtccatgtacaatgactcctattaggtggaacttgtttatatcgtgattatttgtttttgctttgttggaaaagcattagcccctccgccacacaatctcttgtcgtcgttgcaatttctccccccatcctcgttgtccgttgtccttgagtgaggcgtgctacttccgatacagtatatatatgcccaacgaagttatagatatgccaattctaagtctttacgtcataccaaggcttcgatattgttatctccaatatgtcatcattaaaaatggcgccccataataataggaatgtaggatgatgtggcggtttataacatcaagtgtacttctgccaaattggtctacagtttgtgagttgtggtttaggatcaacaaataatcgggtccgttcagtataaaacgaacgctttatgattcgtgcttacagctccgtgagatcaaaatcaacggctccaattatctccatctctctgtctccgtattgaccgttcttctgccttgtcggaaactgcctccatttcttcactacccctccgcgacacaatctccggctgccgcgctagttgattccccctcgccgtcgccggccacctcgccgccgccgccgccgccgccgccggggaggtccctccccacgccgttctctgcgcccccccagatcgaggccttgctcgatcgaagaccttagccggcgcagccgcggaggtggcgcgcggtgcctgattccccacccaaccaaaccctagagcccaaatccggagggcggggatttgcgccgccgcgggctggtgcgagtctcctccagggcgtggtccccctcatggcgcggcggcgcacgtgcgggtgagctcgggccaccaggccatggacgagctcaacctattgcggcagcaccagcaccagcaccagcaccacctggtggtgcgcggcctcggcgaggagatcgacctcgagatcggcccgggcgacgacccctccttccccggcgcggccctcgtcggcgtcacccccggcgcgcacgaccccgcggacgaccacaagagcctcctcatcccgtgctcgcagcccgtcgccgaggggcagccgcagccgacgccgccgcaggtggaggagcacgacgggctgctacggctgccggggcaaaccaagaagaagaagaaggtggtgaagaaatggagggaggagtgggcggacacctacaagtgggcctacgtcgccgtgcacgacaacaccagcaggatcttctgcaccgtgtgcaaggagtacgggcggaagcaccgccggaatccctacgggaacgaggggagcaggaacatgcagatgagcgcgctggaggagcacaacaacagcttgctgcacaaggaggcgctgcggttgcagacggcgtccaaggagaacgcgcagccccctgagatcgagaggccggtatatgtcaaaggttggtgttgttgcctcaagccctgtgattatgctgcgagttcgcctgtggtcttctataagaataggggatgtgtaccaaatccgtgcttacaattagtactatggtggtgtttagttgtttggcaaaatgtcattttactgattttaacagtgaaaaatgtactgggtgaaatagataacatgacttttgatgcatagtttgggcatatgttgttacatttatctatgactttgatattcgtcacttcatcccatcctgacagttcatggaggtaaagtgtgtctgtgctccgtgcaagaaaaggaatatagtgtaaataataagttgaagcaatttccagttctccactaaactgaagatgcttggcattcccttgcattttaactcctttatcagcgaatgcactccattttctattaatttggaagaagttaaccatatatttataaaagtacttaccttaactttcaaggttatatctgaattgtggcatctacatttttcagctctgtcgaaaactgcagcctctatacttgaatctatcctaaagaaggaccctcatgaagctgagtttatacagtctatccaagaggtggttcattccttggaaccagttttggtgaagaactcccagtaactctccttccctcctcccctccctgagaaacagtttgcctaagactcaagtataacatgatttctgattgtgatgtttcagacatgtccaaattttggagcgtttgttggaacctgagagatgctttatcttcagagtgccatgggttgatgatagaggtgaagcacatgtaaatcgaggcttccgtgtgcagttcagtcaagcgttaggtccatgcagaggtggtcttcgtttccacccttccatgactttgagcgtagcaaaatttctagcttttgagcaggtaatatattacttggttcaaatatattatcatgcaaatagtctgctgctgctacctgtcttttcatcatgtatgtcatttgtgctttttgtatgaaatttcagtttttctgtttccgcattacactccatttgattaaatgaataccatggtggatgccatgcacacaaacacgactcaagaactgagaaatgcaactacctgaacctaagtagatactgtcatattgtaatgtttttttttttactttccatcattccacattggattcctaatccagtggcatgattttactcatgatagccttacattttttttcttttgatacttgggggatctgcactgtttcttttttttgtctgtgaacttctgcccaaaattgtatctttttttttccaatagaacacaatcaaacaaagttatataaaattaggatgcttgctgtgctatatgtttatttaggatttcattattgagcactataattgaaagtagagtgctttaaattgatgtggaaattagaaaccggcatgaagcttttataaagcattataaacttatttcctttgatacagactctaaaaaatgctttgtcacaatataaacttggaggagctgctggagggagtgattttgatcccaagggtaaaagtgaaagtgaggtatttgtgtcacattttgtttcctttggaaaatagtattttactgcacataaatctgaaaatgttctatttcagataatgcgtttttgtcaaagtttcatggatgagctgtatagatatttggggcctgatcaggtattcctatcagatataatatcattttttttagattatgacatttttctatattagaaaaatggaatcaaattgttttgatctaaatcagatgattttgcttaaaatcttactgcaggattttcctgctgaagatgttggtgtgggtccaagagaaatgggttatctttttgggcagtatagacgcctttctggtcattttcaggtataatagttgttctgcaatgatatgttattcgaaatactgtttgtcatcttctgccgttgccttttattttgggtattctgattctgactaattgaaaactaaggaccattaaccaaagggaaattagtgactaaccttccctagttagagagcattataacattatcttaaacttcttttcatgttcatcatgacgtcctactgggtagtgctatattatcatgctgtgcaactgtggaatcaaatattagttccatgatatctgaatgtagtcaagttcagatcatactacagggattgaggaaccaaaaggtggtattgctcaatagtttgttatagcttggttcatctgtcctgtatctggacatttctcttcattcttggtaaaatacaccatttagtagttcgggaagcgtgcgcacagagaacgagagaaatcttctcttgttcaccagctgcagaacgcagccctactttaaggctattggtttgcagtttgctttatatttttttgtcagtcttttctcttattctgtagatttcattgctatgcttgtgcaggggaattttacagggcctaaaatcttctggtctggttctagtttccgaacagaagctactggatacggactggtaaagtggtgccttaacatttcctgtgagcagaaactattgtatatcatgttgcttgctactatcattctttcacaacttaccctttttgctgcatatgtcaactagacaattgttcctgttgaaaagagtaattttataacctgttgcaggtattctttgcacgtgtagtgcttgctgatatgaacaaggaactcaaaggattaaggttttaacatagatctatttagtttatttgtatatagttttgtaaccatttgggacttcctaatgtgcatggcttctgcagatgtgtgataagtggttctggaaagatagcaatgcatgtattggaaaagcttctgtcatgtgaagctattcctgttacagtttcaggtataccatatacagattgaaaccttaacatggattatcttgctaggaaataacataaggtagtatgataggcaggagcatgacctagtttactaccatgatttcaccaattaattttgtacatttatcatgactaaaccttatgggtttgtctgcccccaagatgcaatgattcacatcttattactgctttttacttaacctagctcatgtttgatttcccagaattctaatggccttatttatttaatgacatatataatggtttctgttcttgttcctgtaacattacccttggtttttcccttaccggttgtcacattgtaacccaatcctaaataagaataattcgtctacttgtacaagaataattcgtctacttgtacaagcaattctaatcaacgagagctatcataaattatttttctcttactggctgtcacatcgtaaaccaatcctaataagaataatttggtctacttgtacaatggcaattctaatcaatgaaaactatcataaattattgcagattcgaagggttatttgttagacacggaagggtttgattacatgaaatattcagttctaaggaacatcaaggctcagcaaaggagcctcaagtgggtagatgccttaacttatccttagttcataaaggtttagattttgacatactattccatttaaccaaacagggaatacttgaaatcatatccaaatgccaaatatatagatgatgcaaagccctggagtgagaagtgtgacgttgcattcccttgtgcatcacaaaatgagattgaccaggcggaggctcttgcaataattaactctggctgccgtgttcttatagaatgtacggaattttgaatttgtccttttgatcacttcgttccatatcatctactgatttatttttggtcctactgaaggttcaaatatgccttgcactgctcaagcagttgatatcctacgaacagcaaaagtagttgttgctcccgcaaaggcaactgccgctggtggggtaatgcaaatgttcttatcaatccttctgtggtcaaaactacatgatcctagatgaattgtgttgctcgtttttctgctgttataaattaatttgggcgcactgctttctaagttagattgatgtatattccagctgagcttggtcatggtccctcttttgatcatgcctttgtttctctcgtatgacaggtagcagttggagaactcgaactgaaccctgagttcagtttgatgcagtggtcagtggaggattttgagaacaaaatacaggtataatctgctgctcctgcttgttggcaagctactcgtatttactaactagaagacctgctgaaagtcttctttttaaaaaaataaacaggatgcggtgaaacaaacatatgacagatctatcaaagctgctcaagattatggaatcatgaaagagaacccagagttagttttcttcttgtgctctgaggatgtcttcctttgtttccgcctggtttcaacccagaagctgatcgatctctctatgcaggtcgttggtgcatggtgcaaacatatgtgcgtttcttaatattgcacaagccatgactgatcaaggatgtgtctagtgaggctgctcaataagcagaaatggcgattgttgcagtcctgcaggcatgatctcacgggagcataggtttttgtttatacatgccctcaaatcaatttagtgttgaaagctttcccctggtaggaagcgaagcttgggcccatcgtagaacaatatagaagagccctttgttgttgtatgtagtctcgtagatcaccgatgtattatccattctttcttttttttttctttttgaactatgtattgcccactcttaccaacatcaatgccaatgggaggaggaaatagaagcaattctttttgtatctagatggtgtcatctgaatgaaagtaatttatcaggagttaatcatacacaaacatatctatgccttgaatggatcagcagaactctggttgcttcacgagctataaaccaatcatcctcaagataaaagcaaaccaaacttctacatgcttttgttttgtttgaactcgagcgtcaaatttgcagacttgcttaatgatgcagcattcacagcaagaaggtaaatgtgggttcaaaccgaccaaaaacacaatagattacataacgaagtaaattacgcagccgctgtatgttcatctttaatacactcaaatcagattgatgataacctctcgaaggtattcatcagcaggcaaaccaattcatgggaaaacgcacaaaatggtaggcttcacctataatattatataaccacattgtgcttccctaaaacatttttgctctcttctatggttttgaagccttaagcggccgacttgcctgactgttctgctaagtaatgctcaagcatgtcctcttcgtcatctgtacagattatgaaaccaggttattgtaaggtaagtttcgcttccaaactacacaaattgttgtaggcaagaaagaatatcctcgaagtaagtgaaaatttaccatcgaagtcttcatcaaagtcgatgtcttcctcttcttcctcctcttcgtcagcagtggtacttgctcctttctggaaagaaaatttcaaatatgtgagacttacaatcgtacaaagattcaaagatcataacaaaaataatataaacaaaatatactggtggctatgcatgcccttaactggaaaaggggaaaacatgcaatacatacagtatttaaaaaatctaatatactccctccgttcctaaatataaaggattttggttggatgtgacgtatcttagtactacgaatctagaccatccaaccaaaatcccttatatttagggacagagggagtaggattaagtaccattgtatgccttccactttcaaaatactgtcttcctgagagtttcttttccttcggagctgtaagagctgactctggcataagcctgcacatgaaaaaaaatttgtttatgagaacatgttttggcacttgaaatttcaagatcaaatgctataagaaagcctgccatttgtgaagatgactccatgatgacatcaagggaaagctaaataaagaatcttacttggcacgctgtagcgccaattcagcttcaaaacgatctctccaagccagaaagctctctacagtaacagcttcaccatggggcacaatgacctataaatgttccattataaagtacattgcatgggaaagatacatactgcagaggggcagaataataaatggctaacgatcttagattatataatacagaaaataacagtaaccgtggaatttgatcatgaagtggctcagcagtcagtacgacaagcataactaccgctctgagaaatgcatcctagactagctccagtgtgtgatgaaatatatgtactcttaattggaaaataattaatcatgtgcaaataagtcagtctgaagcttggccaaatattcatttcatcttcttatcacagatggtcacaaaaaagaaaccattaaacttgccaaagggaataagttagctatacctcctcttcttctgcctcattttcttcagattccccatctccagcattctgtccatatttctcacttaaccaatcttgtgccgatgtgacaagagtatagaccatagccatgccgagattttcagttgcctaaaccatggggataataaacagagcatgacaaggcatatcaggtgatttttaatgaatatacctgatagacaagaatagactccgaacatcgtctattcaatttaagcacaatatattcaatatcaacataatatctgaatgaatattcgtgaagccacagtgagcattttacaaatcctatatacaggcatgacagtggcagtagaagcaggtaataaaagtagtttgtagtagtaaatagtaaaaaaaatacaataactgcccaagtttatttgactcattctgaaacttttatcttcagatgaacttagcgcatactccctccgtcccaaaaagagtttaaaagactaccacgtccttcaaaatatgtggagaaaacgagaagggggaaaaaacgaggaggacggagtactattgattcaatggttagaacgagaagaaaaggatgtaatatttaagaggtctaatggaccactctaaaattacactcttttagggataaattcttaagctaaaactacactcttttagggataaattcttaagctaaaactacactcttttagggacagaggaagtaagttgttttgcacacagttgacagttagattgacaacaaacttgagccaagtacttgcatacctcttgctcaagcttttctttcaaggatgcaagatcttctgatttcattcctcgtacactgcatggaagttttgcaattcaactgtaagagttggaaagcatataagcacacatcttgcataaagataccatgaaatttaatggcgctaagcttgcttccaaccaatgctggatcaccaagttaaaaaacagaaccttttgacattcaaaagcggaggctcatccggatatttttcggtgtgtgcaaaaatcagagccagttggactgcaaagcaaggatggatgacacaattacaataataattgaataaatcaagaaatacagaacatctaaatgttccttttctcttattttaatataatattgattatgataaaattattctttacctggcacataagccgactcatcgaaatcatcatcctaaccaagtgaaaaggaaaagatcgttaatttcaccaaactaatcataagacaactgacgaaactgcaacatctcttcaattccaagagttcctattgccaactatactttaggtcataactgaatgaagaatcgaggaagtgatacatatggtaggatccccggcacaaacctgaggggagagcacgatctggaagcagcgagccgtggtgctgagcccgctctcgctggggtcgatctctgcatcatcatcatcatcatcatcatcaaattcccaattcccaggttaaattccgcaagcaacaagctatagagcaagcaaagaactagtattgtgcagggggaagattaaaaaaagaaaaagaaaaagagagagaacccttgatgtcgtccatgaggatggcctgcagggcctccacctccatctcctgctcctgctcgtaatcttctccggcgccaccgccgccgccatacgcaggggcacacagacacacgacgaggtgagcaatcatacaaaaacgaggaaaagcgcgcgcggcggaggaggaggaggaggtcgaggatttggggttcgtaccagccatgatcggtggcttcctggctcagctctcctgctctgctctggaggaggagacgagacgtcagtagggagggcaggcggcggcggcggcggcggcggcgtgcgtcgccggaagacgaggaggaggtagaggggggagttcgatccgatgccgatggattgggccacgtattgggccggaaccccaaataacgcgtgtgtgatgtactgatgtggtcacgaaaaccttttttttttatctcccctgtatatctctatcactactattataaaaattgaatatattttcgttaagattttggtacgttacccgtatttgagttggttttataaagatatagatttatggaataagttatggtatcacgaaacactatttgtatttaactcaaacatatgaagctagctacagggttttttcacgtttgtcacggcaattacagaacaccttgacgaaaaccgagtcagtctcagtatcaatatgcattgcaattacagaacaccttgacgaaaaccgagtcagccttggtgtcaacacatatacatgcatacatacatattgcgagagtaatttttcagttgctgccaaaaagttttctctgtttaactaaaaaaatatttgagcgtgttatttatttcagattgcaattaaaaaaaactccttcgtgctaaaatataacaaacgttgttacaaatatagctaaaaaccagcatgttcactccaaagactaggaattattataccacattaataaaaaagaaaaaatatacaccattagtagtagcactcttcccgattttaatttatctatgtcaaacataaaaattgaagatgtttccgccgatattttggtgcgtcatttgtatttgactcggttttcaagttcgtttgcttttagaaatacataaaaagtgatataagaaatcattttaaaaaactcgcatgttaacttaggagaagagttagactcctaattgcttcagaactcttgccaagtcataagaaagcaacacacaagatatgaccatcatcctaataaaagtttcaaactagatatcaatactatcaaaatgtataacgccgttgtctattcccacaatgtttgaccattcgtcttatttaaaaaattaatataaatatgaaaaagtatatgttcagattatattttatttgatgatacaacaattcacaacaaaatttatgatatttatataatttttttaataagataaatggtcaaacgttgtgcgaaaagtcaaaggcgtcataattttgaaatggaggatgtactttttagaaaaaaaattaacaataatatgattaaaatagcattcacccatcgcaacgcacggacatttttctagtaacctatacaataaatcccacttagagcaagtttaatagtatagcccactactagccccaaatcatctataaccaatgtaatagccaattcatacagtagttagttactatactattaatacctggtcccacctgtcatatacatattacgtcttaaagtccgtgctgcagctagctacagatctgtagcccgctgctcttctctctcttcctttacctcttcaaaatatgtttatagccggtttatagcctgctattgcacctgctcttagggtgtgtttggcacccctttttcccaacacatcttcctcgttttccgcgcgcacgcttttcaaactattaaacggtgtatttttttgcaaaaagtttctataaaaaattgcttaaaaatcatattaatccatttttgaaaaaaaagcaaatacttaattaatcatatgctaatgcactgctccgttttccgtggtagggttgggaaccagcgtatgcaaacacacccttagtttagttattaagtatcttctctcatgtggtgctttcacattacgttaattatttacgtccattggatttacacttaatgtctaagatcatcccaaagtcactttattttgtttctctcggatttctcatgttttattcatgtatttacttcttctcatcatgcacaaccatgcaaccttcaattaatcaagcaaacaataggccaccaaatgctatgaatgaacctaaacggtcttctttttaattttgtgaatagcataatgaacatatcacatactatataggatagcctatacatttatagttgtgtctctaaattacattaaagaaaaatgaactatatgacatgttctgttttgatcataaggcagttcaataatcgatcattcacggtatcaacatattatcataatatctttttttcttatatgttaagttttttctaaaaattatcaacctcatcttttcacttataattatacttatcagccaaaatttgagttttcaactttaaatttggagttgattttaggattcatagtttatcttttagcgtttgcttttagctagttaagaacatgtatataaaggttttattcacaaattatttttcatttgcaaatatgccgtttcgctttttcctcttatcagccaaacgatggggttgtataatgttttgtatttgtattttgacttaagttatagctagcatttttatatatacccaatacattctaaatttcttatcatcaaatttgcaaacataagttctatagcaattcacgcagcaacttacggggaatcatctagttaccaagaaaacatgttttgtcaaatacctacaacgccataattactgatcggttacaagcgaataacgataattttttaaacaatttttattaaaatgttaaaaaactttgggataattgcttattttactatgtttcgaaggctaattatcaatcagaccttaattttttctagtttgcttaattgaccctgtttttctgaatcgaacctatcgtttcaccctatttaaactacaccgttagggtttcatttagaaaaaagaaaaaatacatttattattcacgctaaccaaatacccttccttcaatcttatccatctcctacctcctgcccaactcttatctctctctctctctcctctctcggcgtgaacagcggtgtagggaggggcggtggggctggatttagcgcacagaggggggaggggcggtgacgacgcctacgtgctgagggaggaagggccagtggagctatcgacatgcggagagacggggacggcagcactggcaccggcccacggagggaggagggggcggcgcaggcgtgcggagggttggaggcagcgacgatggcgccgacgtgtggagggagggaggtggcggcatggagggattagcaggataagcgtggggagagagacaatggtggtgttgttctcggcttcctcttctgatttgttggttctgctttcttaccaccacaagagcaaaattggtgtaccaaatttgtgtcaaattttgttcattttattttatcaaaattctattaaattgattcaaatttatcaattgaagccaaatctatcaaagttatgtcaaatgtgaaacatatgtcaaatttgttagaaatatgtcaaaagattcgaatatatgcatgttttgatataataggatcaaaacaattggctgtaagtgccaagttttacaattgaaaacttgcccaaaacttgtaaaatgcatataaaatccattttaactccaatctggatgaatcaaatttctgtgaactcacaaacttatgactttaatttagaaacataaaacttggcacttacagtggaagaaatagctctaaaaattcatataataaacaatgaacatagagcaacctccaaattataaaatttatagaaaattcacctgaactctttttgaagtgaattaagttccagaatgttcacaaaatcatactctcatttgtcatgaactaaaacttagcactctctgtaataaatatgtcaccaaatgtttatttaataaaatttactactatagtgcaaactagagactataaaatccataagtaattcattttaactctaaatgggcaaaactaaaattttgttagtttcacagaggtatgcactttcgatctatagactaatctctaggtgaaaccataactaaaacatttctaaaattttaaataactaatatggtctataatgaaacaagcaaactataaaactcataggaaaatcatgctaactttaaaaattgtgaaaccaactttgttgaactcctgagaacatccccttcactgcagcaagtcaacaattcataaatcatggacctaaactgcacctaaggactattagagcttaattaatctagtgctagtattaatctttgaaaattaataactctcaaatgcaaagtgataaaatataaattctttcatctaaattcatcttagaccagtacctaaccacactagtaaactcatgcattcttgagcattttagatttttacatgttttggtatttatcgttactgttatttcttttagacggtgaattcgttatcggtgaggtgattggtcttatagctgatctcaaggaggttttatatcaaccaaggcaagtgttgcccttcctttgaacatattgaatcctatgttttcgggctaaatgttttgattgtaaagttgcacgtgtatttctaagtatcggtactttcaaaactatagattgtagttgtacctttaaaagatgcatgaatccccttttgaaaatcaccccttgctgttttgaaccttagggttacttagagtactttaattgtgctcatatgactatactatgcttttataaagtgcaaatgcttagccttgcttagtgataaataaaacatggttatgagtcacttgatatactatttggaactcctttttaaacattatgttcagaggtgattctccgattatttgtgaaataaaatgtgattttagacttaggcggcaagtgatatgcatatggtagtagttgcataccgatagggggagtgttcacttgagtcgattaaggaccgaacatcatatcacccactatgtttaccatacatccacatgtgtctttatggggggaccttatcctattaagttaagcacttatctaatcttgcattcgggaggccgttgtagtataggtagaggccatgagtgtattgtgggctgcctagaggaactacccatgtgtgtgtgtgatcataggatgataaattccctacatgtgtgatttccgtgaggggacgagtgtactattctgctcatggcatgggtgtctaagtgtgtccaatacaacgatattgtaccacgtggtgggttcccgttgtgtccgccaccacggcgttaagtttaaggcgtgggcccgccacttaacggttctaggtcatataacgtgtatggtttaggatggaggaacacgtatcgtgctcacggtcatgagcgacatgatgatgtgctatgggcataattttgtgatttctaaatgcttttgaaactaaatgttttgagatgatgatgagattggtatatgtgatatgattgccttacttctcgttgtgttttaagggaatgatgtctatctatttatgttgaaatcatgctatgattaatatgctttacatattgctaaaatgttttgcttaaattacgttgtaaatggtttgtgaactaaaattggctttatgctgaaaattgagactacaaatagccttcctttgacatagagctttcatgtatgtaggttttatagtgctcttgccagtacattaatttgattaatgtactgagtcttgccatgttttgtctaatttatgttttacaggaatagacttagtttaatttgagtgatgcgggcttcgactgcttcttctaggatttaaacttaataggtaaacccctagtcggtgtgcttgaggattgggtagtcaagcttccgctgttctctaatatagctatatttggccggtcggcccatgtatctattaagtagttgtaatctaaattttatttgttttagatgtattttgctatgtatatccatgcttaagatgaaagtgtgaatctagtgcacatcctgggaactagattcatatgagtatgagttaagaatatttgagatgttgtagatctgtagccattttttgtcaagtctcctgaatgtgtgacacatctggtcgccgccttcgagtggtttgacgggcacatcccacgctgaagttgactggcaggctaaatgcctagcaatgtctctaatattcttctctcgaggcgtcggatatttcattatgtttgtttgatgacttgaattattcacttcatatctcaaatataataggaggtccgaagagcctctccgacatcatttctctatcaaactactaaaacatcaccaccaaatagttgagcatcctaggcccaaaatctttagtgaccaattggatctttggcaatttgatatagatacaatccctgatctttattgagaacctcataaacaaaatcctagaccacataataaatggacatgatcctctaaatattttagttggaagaaaccttataatttactaaaataagacaagagaaggaggcatgcctaggatagctggtgcttgagccctaggactgcctcaaaattcttgtttacattttgttaaatcaccatgcaaattttatagaaaactgacatttcaatagttgaatcctatcttaaccctatccgatcttactataaagatgatgaccaccaacttctaaagatcaacatgcaagtgtgtcacgtcatcacacactagcaattattatctagagtattttaaatcacatgggcttttcctcctcccgtgactcccgtgccgcttgccttgggcgacacggaggcgactgcctgagtgcgcggggctccccaatcgcgttccgctcttgttgccgccaccagcgaaggcggtgccggtggcgccggcgcctccctccctcttcctctccccttcttcatccctctcttctctccatccctcctttcctccagatctggggcatccagtgtcctgcctcctccccacctggcatcggcggcctcctcgtctcggtccggtggcgagggctgcgcggggacagccggatctggccacataagcccagatccggcgcctctctagcggctcc

SEQ ID NO: 8194 - DNA, 20502 bp, Oryza sativa
gtgtttgcatttgacatgcaaaaaacaactatcttgtctatcgggagtttaggttttcctaaaggtacatctactctgggtttctcttcttatctgtatcaggcaataatagagccgacaaacataatatgaagattgaaattagatagaagtaaggtagattcaatgctttgtggtacctagcactgattaagacgacgaaaggggaacaaagaagatgttgcccctgtcttgtaagtaggaatccgcaaagaagagttgaagatgagggaacaatcagagaaaaaataggtggagatgaaaaatggactgaagaagatgaaagaagagaaggatggtttctcagaaacgaaagagggggagagctagggagagagaacttgctagagaaatggatagtgatagagcaggattagagtatgggggtctggaaagaataggggaatagcttgccatgctgctacctgtgttgtcttttccaagtcttttcgagggcaggtggcagctgagcataattatgtttattgttttcatactgtgtaggttgggtgatgttggttacggtttggagaacgaatcaattttgtttgccatgtgaattgtgtggtttaagatttgggttgttatgtctatctaaaacgctggagctgataagttttttgcacgcttctatgtgagaaatagcacacatgttacgatagtttaatagcagtcaataccagctatgcgaggcaatgctaacatgcgaggagatataatatttgccaccatctgttagcatccaacatcattacgactgatcatgataatctagccatacagagttatgttgccattgcaaaagctacagtttgttaccatctgacagcattcagcattatcacgatgaatcatgataatgtggaatcccagccacatagataatggatgttcacctaaaagtctgtttgcaaaaggagtaagtctagcttaattggtttgacatgcactcatgcaacacggcaacaacgcagtctctagaattatcataataacattagccatagattccttttgatcggtgtgaagaaaagccttttagtaatgctgggcttctcaggatcaaggctaacagagcaaaaaacaatagccattctgcttgatgtatcaggccttgctgatggcactgcaagtatgtaggaaacatcatgttagagatgcagaagatctttcatataccgtcagagacaaccactatcattatacctgccaccagtggcaccatcagtatcatcagcagcatcatctttgaacagtttcttagcagcaccagttccaggagatggcctaggcctgtttttgtgtgtttcggtttccagttagcttggcagaaaggtttgcacccggtactctgatggataaagaaatgaagtgatgtacctttttttgtacgcctttgaggtgctgttcttagttgcaggggcagaagccacttgtgtaaggctgactgcctcatcatcctatttgacagtagatagagttagcaaatatgatatgcaatatatatatgctacaaagtcaggcataaaacaaactgacctcataacaatcttcattatcaccagcatcctgtgcaggactcttggatgcatattcatttcctgtgttcttatccttttctgtattgattggtgggctactcagagtgcgttgagcatcactgaacccagctgatgggctggctgctatgggctggccaatggaagtatcctgagatgcaaccggcgatagagccatgcaaggcatcagagaagatgtctgggatccagatggagattgcaagagagcaagggaatgactctgagcacccttaacaactctgttcacttgaaaagcaacaatgccgctagagaccgtgttctctgtgaaactcacattccacacaaattctttctcaagcagatcagtgatctctctggatatgcagcccttgccagttggattttccagcatcagtgcctcaactgaacgaccaatcagcctctgcgctaaatgcccaaagataataaatgtagtatctcctgtgtcatctcctgctatcacactgagtttgaacctacagaatgtaatgtagcattagctgtaatgtatcggtgtctgtattgcttcaattgctttatcacgactcacctaggtgaagctgagccagttggggggcatgtgctgtttccacacctatatagatttccatatggctttgctgtcttcttgcatatatcgcatgcagtataccaccaagaatactccatgttaagtttctttatcacgacagtcactgagaattcatgtttctattaacatcagacggaaacagttaacacagttcatggcataatgcagattataagttcatgaagtgactatagcaaggtcacaccttgaacttaaaagggtgcgggtctcttatctcagcgattgtcttctgttcacagttgttctgaagaataggtgcagctgggagatcaatccatttgattgcctcgtaattcccttcaacactgcacaaaaagaatcagtttagctcaaaaaatcaggacaaagtaagctaagagaacattgtctgatagcgaagtgtagagaataaacctagcagcgagggtgttgacctctggcacatcaatatttatgtaccatttgcaagcagagttacccgacaacgaaacattccctataacaacagtgtcccacgctatgagaacaacagctgaaaacataggacaaaatgcaagcaaggaagctaattgacttacatccatgtcccctgacaagtgtgccaacaaagataactatctgtggcttctccttgccagcactgagaatttcatctgcaggaaagcttgtagctctttctccccataacacaatatttgttgtctcatttctatgttgtgtatgtttaaaagaaatcaaagaggaattgtggtatggtaagtagttagtctcaaacccaaaacagtggtgtgttggaataaaagcagttgtcagggcaaggcaatatgcccagtatgaaagaaaaatgttatgacagtgattgtctgatgtagatgacagattatttgagaggggttagaaaacatcagaaaatgcattaataatatggagtagtaaataagggatgagtgctaactcagcattgcgcatgtagacattcctttttaaactgtcactgtctctaacacgtgtccgaacagttgtcacagatgatatgtcagtgatcactccaatcacatctgttattttgagagcaagaacaaaacacatgtgtgagcaaaccagaggtagtaatataatagataaccaattatagaaccatatctgcagtacctgtgaaagagtctttcctgtcgacacgagagcggagctcttggtaaggtgtgagagtataagcatagtgaccaaagccagcttgtacgtcaacatattcttctataccagtccatctggtgaaattgatcatcatcttgttgtcaactggcctgtaatgtttggtgcatggcttgacccgatagtaggtaagcaagtagaccttgccttcgctgatcagtggtttgaatttcttgccccatggaggataaatcatagcagcaatggcatatccctaatgaaacaatactgtcagtaaaacaaatgacatattgctcaggttttacagcagataaagttcgcaaagcaatcaccttctcaccaaccaaaacaagaccaatatggcgtaagtcgccttcatcgtcctggtcatgatattcccataaccttgatacacgtaccaatagagttggattcccatcaccgagctcaaggttaggaatctgtacttcacccatatgtaaacatagcaaaaaaaacatttggtttgagagatcagcgcacattgaaattttgaagaagctaagtgtgcaagttaagaggtcattagatgaatatacggaaaaaaattcacatggacaatgaagagcagaaaaacagaggcgcacaacagcatcaaacatgggtagtgcgagtgatagctaggtacaaacatcctgcaattgtaaagatttaatatattagtgcatggtatggcatcctggtaatttagctagggatcatccaggaaaaccagacatcaaagtataccatagatgtgactgcttgcagtacttcttggtaaacaacatttttggttttcgtacaacatgcctcgtcctcatcctctatgagaatcctaagaccttctcttgatgttgatctagaaacagcaacataaagttgcccatgtgtgaacacaggttttttcaagtacacgctgactcgtgaaagggtttgtccttggctcttgttaatcgtcattgcataacaaacacgaacagggaactgtcttctctaaagcgtaaaaggccacttaggacttgtggtggtaagtgcaattcgtggtatgaatgttgtctcgccaatatttgtcccagttaaaattacacactctaacaacctattaccaagagaagtgaccaataaccttgtcccattgcatagacccatagattgatttaggtttcgtagtagcataatcgtcacaccttttttgagcacaagcttgtgcgatgggaagttgttgacattaattgaattcaaaaattcagggggtaaaggatgtcaaagtcaggtaaatgatctcttgattttgaaattgtatcacatattaaatactcctttgcgtcgctgggtatcatgtcaacaatacaatcatttatttcatcaactgttgagttattcgggcaaacaattgcccgacatgcaaggtaagaatgatctgtatagcaatttgcaaagtgtggaaagatctcatctactatagcccttattttgtcaccgcatgtcttgatcaaaaggtcatcagggatatcaatccatgttggctcaaattcgtcaagcttttttgttgcaggcaacctaccgtcaccaagtgctaggacccaatcgccaaagttgctaagatcgacacggttttggtcagtaacgttaccatgaagaagtctcatgtttattgtcagtctaagaagaacaacatgccgccaaagaggagagttcgtgatggatgcatcgactatagaagcacgtgaaccttttcttatgaccggcaatatttgacggaaatcacctccaagaacaacaactttaccaccgaacggaacaatgctgttagaaggcgtgtgctcagaaagcaaatcacgtaacgttcgatctaaggcctcaaagcatcgtctatgagtcatgggagcctcatcccagattataagagacgttttctgaatcaaatctgcaagcatagttcctcttttaatggtgcaaatgttgttttcatctatgtcgatcgggattttaaatctagaatgagcagtgcgccctctaggtaggagtagagaggcaacccctgaggaggcaaccgctagaacaatttttttctcggatcttattttagaaatcagtgtattccacaaaaatgttttgcctgtcccaccatggccatagacaaagaataacccaggcctgttttcgttcacccgttgcatgattgtgttgaaaacatttctttgatcagtatttagcctaggtatattcaaattagcttctgcagttagggccgcaacatcaagagcaagttcttcgtcaaccatcctatttcctgtaatgtcatctgaataaattgccggctgcggtaagtcgtaatcatcaatgctaccaccactgtttgaaaacacaatgtgaagttctttcattaatagagacaggagcctatcaggaggtattacgtacgaaggattcgataaagcagttctgacacgtcgctgaatgtcatcggtaaaatatgtccaatatttttcaaagagcgagcgcacatatccaacagaacaaaacattacaacgggagcaaacaactgtctcaattggcccgaagacgcagatactatagcctcatcaaatagcaagtgccattcgttatcgctttcaagtaggcctcttgcctcgcatgcttgcctaaaggtcggataaacgataccatcataggtcctaacatcagcatagcacgttgcacctttcactatcattaatagcattcgtaggtagtagagctcaccgctaactgggctgacatagtatatcctgcctattttttcacatggtgttctaggacgccaactacgtgagatgctgtcccatgtccactctctcggaaaatcacagtaagtaagcgttcgtgcactgttatgttttctgttagcctcgaaccactcggttagcatcgtttttttggctacagggctggatagcaaggactttaggtcagaaccttttttgtatcggacaaagttcatgtttggaaggtgcacagctaggcgttctacagaaggcactctgtagtgaatgtcaaattcaaatgcatgccaaagggactcacaggtggacagaaatcttgcatcgatatattcttgtatttcatttcgtggagcagtacagttttcagctggtttgttcggtgcatttccagaaatctcaaagaatgcttttgttctatccgcccctttagtgacatatttgaagagatatttaatcatattagatttattgcaccattctacattaatctgagcctggtattttttcagaagttccatgttgtagggaacaacccatctgttgtcaagtttaataccatttttgagaacataccgaccatcattgctacgtttgtaaacagtgaatacaaattcatccatgatggtctcttcttgaaaagatttagggaaatgcttagagcactctcccttcttcatacaggagcatgttttgttcacatcgccacaagggccatggatcataaattcatcaaccaaggcatagcctaaagggtcggttagcacatcaggtatttcagcggaaataaaaccatcgacaataggagcactaaactcaatatttcctgcagcaagccaaaccaggcaatggatatgaggaaggccacgcttttggaactcaactgtatataacactacatatagggatagccaatgttaggacctatacagaacataaaaatggaacttagaaactaggtaaacatcctactagcaaggactggaccaaatgtctttccttctctaatatctgaaatgaattcattcactttcatgttaaacaccctcacaatcatatcggaacgatcgcttggcacctggcctggctcaaacagcaaagcatcatatatttcttgccactttgagttgcatgtaaaggtcacaaaaagatcaggtgaaccaaaaacccgacaaatagccatcgcatcttggtaattttgaaccatgtaacgacgccctccagtaaaactggagggcagcacatatcattggccgacagaatccccggaatcaagaccatgatcaatcgcatcagctattccctggacagattcagaacgcaggtcgggctggttgtcgaaaatgtacttaagcctagattactcaacagttgagtatgagtcaacacataaggaatcgctaagacgaccacagcaagtatatggatttggtttgttcaatcggtaatgtaaacgatagtggtagtactcaagcatggtaacatagcgtctggaggcaccagtgatgctaggaaagtcagtgtactttatacctagatggaatcctcgttcaccataaggaaagagcaaagggtactgaagagccatataggatgggtgcaaagctgagacacgtcgcaatctagcatcgcaagactaaaccatcacatcatacatgtattcgccagctgagtaatctccagctactataccagcaatatcaccactcgttggcaaattgtactggatttcatctcttgaatcacaaccaagcaatctaagtgcaatcttttgatcaccattatcttttagccgatctctagcaaagcggaatgccttaaccaaatcattatgctcatcaagcatagaactaagcccattaacaatgtctgggtctggttcatcagaaggattgtctttttcgtaaatattcattctgtttgcagtttcattttcagtgtcatatatgtaaagttgtgcaaatttaggtcgtgagccttgctgtggcagcaggctgccaataccttggtggacaaccccattaattttgaacacacaaggtgcggtcccattgtttatcgtcttatcaatgttggctcctgaggaagtaaacgcaaaaagagagttatatgatcggatctggcgtaagaatctttttgatcgcacactaccatcaaattttaacagttctgctagcaaagaaggtggttttttcaattcaggcagactaatcttaccacctctacagcataggttgtacagaatcttgcgctgcgagactacagatcctttctttaccctctcctggtaccagaaaacggcaccgcagtgtggacattcatgagatggaccaccatagtaggactgatgagggtacaaagctgcacagcattgatatgagagtacgacagacagtaaagctgaagaaattggtgtagtatgcaacacaacaaacctttcaaggacgcaatatagtcttttggcaaaggcaagatgtcatcagcactgggcgtgggacctatgcgaaccaaaattgtgtgcaaaataagcagtatgcggtgagtcaacccttttttaccccgcagggacacatggaaggcataaccaaggtaagggacaccgaaaaatcgtaccgttaagaataccatcgagagaatggtttgtctgaccaccagatattttcatacgccgcctttccctattaacggcagcagcacttcgtggtatatctagcaatgaacttttccctatgtgttcaaaaatacttagagcactatccgagcctcgcttcgtttgtttggtcaaaatagtttttcggtttattttatcaaaatctggcttacttttggcatttcctaccaaaggctcactgtcaatgggctgttccatggatggtcctgcaccagcactggtaccctgctgcccaacatgtacagattgaaccaggacagaacacatggaatggttgactgactgtgaggagctagaacctacggcagcaaaaatgggagcctgcaagtagcctattggaccaaaccaatatgtttacttacctgtcccagaaaccaaaagcaaacatatatcagaaacgcatggacaacagaccctggcctatggaagcatgccgccttagccggctttcacgtgcgcgctgaacacgcaatgctgcacgacctgacatctgccacaaatcctaaatcacaaaacactgttccctgcaacgtttcttgaaagacaaatgcatcaaacaatccagctcagaacacaatctcaacgcaagcatgtatacacaaaagaatgaatgcacggaacagaaatagctaaattaactgcaaggatcctggcaatacaaaccaactcagcattacaaagtaaacccaaactctgctctaaggttgttgtgtgctatagaagaagtgttcttccctaagaaaactaaaccaaagtgatttgcactggcccagcacaccctcacacggcagatctagcgccccatagcgtgactggagcctagcaagacatgaagccgctgtgagagcagcatccactgcagaggatgcaatctttctataggaaagcagcatgtgaaaattgtagtcatgaacagcgaaccggtactttgcttgcatgaacctaacaacctgctgagcaaccatctcgtgtgaaacaattagcggatctgttgcagcaacccaaaagaacttcctagccagattgttggatgggtgagcctgaccactggcagggtcttcaggcggaaggataagctctacaccagctaacagcgtaccatgcccatcaagctcccaaaggtatgacaccaagggcaaccggcaatgagaagctgcagcattcaacaacgaaacgaacgaaaccccaacaacggccatcccaccaacagcactgcgaattgcagagagagttttcaaacaggagataaaccacccttaaacagtactttaaaggatgaaggtgaggaaggaggcagtgtgcaagaagaaatcgtcaagaagcaacatatagggcaagtatacagggccaagaccaggagacactatatctgtccctttcgtcaagcgtgggaaaaaaagcgctgacgatgcgtcagccccaccaacggttagcgccccccccactccccggcccctctcacccaccaaacatataatgcaatagagcaaggaataaaggtgcgcaaaaaaaaatgcaagcacccaaaaattttaaataacagccagagcaagaaagcaccttcgccgccacgcaccggaactgtcacagcacccgccacaaggaggaagaaaaccagaggaaagaaaggacctcagccggttcggacggaaagaagccctccctgcacagcacacaaacaaaagatgaagcaagcataagatggatcaagaaaaagaagaaacaaaggtgtcgctgacctggccaaaacgcgaaatcacacaagaaggtgtcctcctatcaatcggcagtgaggtcgctgcaagaagcacacacgaagtaagcacaaggaactccgccaccaagcacagtcgatgcgaggatagcacatacctcgccatagccacgaacagcaacagagaggccggagaagaagcggaacaaaagggacagcaagacggaagagcagtacagtcgaagcaaagaggattaggctggagaagaagcggaagaaaagaagaggagaaaaatatggcgcctttcttgcgtgggacgccgtctcgggcagatctgtaccacgttgtctaacaccgattggccaagcagtacatttgtggggcccacccctctgtccacaaccaccctcgccataaaaaatgggacccacacgtctgcccaccaccacacgcgcgatcaaaaaacgcacacctgggcaattttcacagggcaacatctacccaccccaactatagcagcagggccacccaccgtacacagcggcagggccacccatcagcgaccgagctgcccgttcccgtcgaatgcgcgcataaggaagagggaaaaaagggggcgaggagggggcgaacatgggggcagcagaaagagcagcatgcagcaagaatggtgggagcccacaggacagaggcacatagaaaaaacggtgcagccccacaggacagagacacaaaaaatttaccgaacgacgtggatgcaagtgcaaacgaacacgctagtgcaaataccgcgcaaatcgctccgggaggtgcagatcgcccttacctttaattactctgattatttaaaaggaagagaagggatctttacaaaaatgcaaacacccaacaacatgcattgaggtattttatatctcactgacaaatggcccaaactaaaaaccaactgaattttgctttgcacataacagcttgcctcttgtatcactgatgattggtccaacctatggtggaccccttgtacagtctatggagccatgcaacaaccaaagagtttgcatctatggagagggtaaagcgaacggtaaagtaaagcatgtactactactactactaaccatgaacagtgcaacagtagaagtagctacgtggatggctgtggcagctcaggctgtacctctctaggaatatagatataggtagatgagcccctagtaaaataaggcctatttaatttgaaatacgcgtgcaacaaataacacaacattctctaagtcattctttaaaatacacgtcaacaaataacaaaatattcaatttaaaacacatttccaagaaacaacacaactttgttcatgtggaggaggaggtcgatagggtacacacaatacataaattgatgacattgcacaacttcattccacaaacaaacataaccctaatagtagacacatgaatgagagcacacacttgtctaaaagaaaacacgctctaagaagaaacaacatgtgattcttcttctcttccatgtcaggacaggaactgcatgcattggaactaactgaggaatggaagaatgatgatgggaaacatagcgtgacaaacaatatatgagcatacataaacatgctcttacgccaagacatgtggttggacggccggttgttgctgtatcagagagggcaactcaagccaaggtcctccttatcagctgcatattgtcccctgcttgccgcaacgatgccaggtgcacctagctgccatatggcctacatgaccacaaatccaacaatggcgagggcattccttgtagttatgcatcccttacagaaagagcacttctcccagcttgcgcttgatgacattgttttgtattgttcgagtttcttctttgactgtatgattatgagtttggcaatagactttgtgattatggatttgagactttatatacgagccacaccagatcaccacgggcatatttagtatatgacaagcgggggccttggccccttgtcaaatttaactttatattgtatcccacatgtgtctgttatatgggccccaaatcacatgaggtatattcaatttaaaatacatgtgcaccaaacaagccattgatattcaatttaaaacacatgtccaacaaataacacaatatttattcatcgaggagtaggtcaatagggtatacacattacagaaattggtgacacgacacaacttttttgcataaacaaacataacccaaaaaatacacacttgaagcatagcatagcacaaacttaattaaaatgaaacacactctaaaaagaaactaacacatgatcttgtccttctcacatgtcagggtcgacatctcgcttgtgcatgagaattaattgaggaatgaaagaatgatgatgagaaacattatacatgcatacacaaacaggctcttaccaccaagacatgttatagagagggaacctcaggcctcgtcccctacttgccacaacgagaaaaatgtcaagtgcacctagctgccttgtggcctacatggctgcaaatccaacaatgacaggggcactccttgtagctatgcatcccgcacaaaaggagcacttctctctcttgcgcttcatgaaatttttgtgttttttgtcacgtcctgataaattcatcccgaattaaaaatcattcgctaaaaggaataatagaattaattaaaattcgaaaagaaattggcaaacactaaaatacgtacaagaaaaattcaaatgcggcccggagaatttttgttaaattctccttggtctaaaaggagccctcaaattttacttgaattttcagagcacaaataataattattaagaaataaacaaagttaaaaaggttttataaaaagaaaagctctaaaaagtcttttttcccccccccccttccccctcttgggccggctcggcccatctccctccctctctctcctcctccccgcggcccactcggcctctccccgcgcgcgcgccgctgacgggcgggcccgcccgccaccctcgctgacgggtggggcccacctgtcatccctatcctcccgccgctcccgccgcctcgcccgtgccctagcgccgccgccgccgcgaatcccgccgcctcccgccgtccccgcgcgcaataaagagggggaaatcactccccgtgattccctctctctttccccccatttttctctccctctctccctcggattcggttggaaaccgctcccgcaaacctcgctggcgccattgatggagcccgagatcgccgcgccggttttcttcccctccggccgttctctccccctcccaacactatataaacgctccccgtgcctcttccgtccggttccgcctctcgccacccttcctcttcgccggatttgagctcgcgacgtcgctctctctctccgccgtcgccgccgagctccggtccaccgccgtcgtcgccccggacctcctcccgtttcggcgtcgccttcttcgggttcgccgcaacctcgccgacctcgtccacccctccgtttcgcccgccgaccgccggaacgccgccgtcctcgtcgacccgagccgcgccgccgccttcctccgctccggtcgtcgttcccgtcgccaccgtcgacccggggtgagccgtggaccgccgtttcgcttcccccttccctcccctctctcgggcgccgctccgccgcgccggtggtcaccggcggcgaccatcggggcgcgggtgcgccgcctcccgtcggctatgccggcgtggccgccttcgggtgcgccccgcggctgccatgtggggcccggccgtcagccgcccgcgccctcgggtgcggctgacgcgtgggacccacggcgccggccggtgtgagccgggtgcacccggtccaccgtggaccgagaggctgccgcgtgggccccactcccgtggacccggtccgcgcgctcctctctcccggctgacgcaataaatctattttaaattaaattttaaatgaagaaattcgcaaatatccatttaaagagcatataaacttcaaatggccataacttggccatttgaactcggaattggaccgttcaagtctctaatttttccttaagaagtcaagaacccatttttgtgctttgtttctgcttgttatatggagtttagtagagtaaaagccgtttcttttccgttggtcgtgtagacgctgcagcttcggaagatccgctcttcgtggaagttgaagctgacgtttgggaaagcgagcaaggcaagtcacatcatccttgagcatattgaatcccagtttataaaattattttgatttaaattaatgcattatcgctttatttaaattcccgcgttatcactgttttatttagccttgcctatttacctttgttatggccttattattattgctattgttattattaccttgttcactctagaataaacaaaaccccaactagtgggtactctattcatggttccactagtataaatttaggtagatgcttcgctgattaattaggcaacattaggtgattttataactttagactttgggaattctcatatcatttggacactatggaatggttggcttatggtggaattggacatacccctctcttcctctttcaaagcccctaaaacctgtttttcggtggggtttgggtgcatgccagttgtgggaagtagcaccccggccactataaggattaagctcgggcctctgttgcaaagcactaccgtacttccacatgtctagtgggtaaggcttagtttgtggctcagtctggttataaacaaaagtacacggattggagatggatgaagtcgggggtcgatggacattctccagggcaaataaaggctacacgagctgcggcccggtagtcgagatgtcatggcacagggctggtgtcctgctgctagggggctcaatcctgcctgcctgtcccgggggttccggccgtaggtggggttgggtcggtactcttatttatggctaggatgggttgggaactatgtcacgtcttccgtccgtataccgtggtggtatgtggcacgtggttacacgtgaggaagatgtgtcttgtgggtaaagatgtacacctctgatcagagtataatctattcgaatagccgcgccctcggttatgggcaagccgagcaatgtacccaagtcagtgttttaattcttaaaatttgcttaacaactaaaatgtggaatggttggcctgggttggcttgggacgagctgggacccagggtcgggttgccagttcggtctgaatcatcgtaggccttgggttaaggcaggttcgtgagggttcacggccttgattaataatattgtatagctctaggatcgtgtttacaaaatagctttgggcaactaagtgacttttaaatgctgtttactgcaaaacttaacccctattattatccccttctacccccttacattaattatgcatctccggtgtggcttgctgagtactgtggttgtactcattcttgctctatctttctccccccttcagtaagagaacctttggagaagaagtcttaggtggagtcttggcttataccccagttgagcgcctgtgaagatggagccgtaggcccgctagtccgctgctatttatttttgattgccaggcctgaagtgcctttgtaataatgtaaatattatcgatataataaagatgtgtcttttatatcatgtttgtgtggtgtaccccggcttttcctgggacggggattaatacactagcgttcgggaaaaggcaattttctcggtcgcgacaagctggtatcagagccatctcgactgtaggataagccaagtggataaaacctaaggacatattttataaataaaactatttgcgaaagttcctctttttcttcttcccctaatgctatttgcaaaaggtttacccttttcttccttcttcaaatttcaactagtactagatggtcaggtcagtgaagaagaagacatcgtcagttgttcgccgaagctccggaagactgcaggatccgctagcgaagtggaggaagcagtgaagccagctgtgaaggagtgaagatcttggagaacccgtcgcagaacctaagccaccctatagggtagtgttgttagtcgtgtgttccttgcttgtgtgtgtagcgcgtgctttgcatcggtgggtggtgatgtaaccatgctaggttgtttgcttaatcaacttgcagaataagtgaaacaaacaacacatcaacaagaagagttagttcctttaaggtcttatctctagttctggtctattctttcctagcttgtttcctctctcacctcaatccctgtaacagatgtttaacagagaaaaaggaaagaatgtcagcgggtatgcctcaagtaactcaagttttcaactcaatccaccactggcctcaagagagttaaccagggcacacccttggtccattccgagcatgctgcttggttcacagctaccattggttggaagtcaagaccaaaatcagtatgtgtttgatcgagcatttgccacccaggtcgatgagcttccaatgccagaagaggatgtccccttttgtcacgattgtagagagcaaggacactatgccctgaattgtccatgggtatatgccaaagaagctccttcctttggtttagcagggcaggcatcgctaaaccagcctcctcgcaccaagtcaagcttgcagcctagtgtgccaagtagagagcccaatggagagaatccattgaatcccgagaattgctttcctcctagcctttcgtaccacgtggggtcacgtactaagcaagccaaaggcaagaagagtaagaatcagaagagaaaagcaccgatgcgaactgaagaagaagtacgtaagatgactattaccagcaccgaatggcctccagcagggataactattcctagacatcaaagaggaaataccttccgaggtgcacgacagttgacccagcacctcctaagccatggtggcagagtatctgatagtgaagggtcagatcaagtctcctcggatgatgaagatgagtctccccgacatctcggcgaggaagaaatggaatcaaaggcatgcacccgttgtggagaaattggacacgttgctagcatgtgtcttacactctgccctcattgtgaggaagaccatccaccaggtgaatgtcccacccgcaaggtgacatgttttctgtgcgaaggtacaaaccatgtgcccaaggattgccaactcagtgtgttgttgaccaagaccgcagaaatccaacgaacaaccctacggttgtctcatcagctagtcagctccaatagcaacatcgacaatatcatccacaacaccaatgctcctcctgctccacctgactctgcaataaatcatagcaataataccttcagcaccaaccattctctgcaccgacagcctcagcaaagaattgttgtcgatggaagaagttgtgtctctccccgacctactccaggccgagcaaagggcaatcaatctcaggagggcgataccaagcagaagaccgttctctgcttcaaatagcaatcagaaggaagcttctcctgtgaatgatagcaatatgcagtcctaacacatcatcacagaaccaatcaaggatgcagtcactagaacaatgccagctatatctctccagaatcaaaatgagcagccacgtttgtggttttcagttcgctacttatcattgtgtaatcgggagtttgcagcaatcatgtaataaataaatacattcatgattataaacaatgagtttgttatgtttatggatgattcatgttgaggatacaatgtaccgatgataagcaccttccctttttgtttaaggcagtgccttgtattcgtgtaataagggagaaatgtgtaatacagacaagttttaagaggattctattggaagatgcggatatgtgatcatgtgtataattgtttactgataaaggagacctagggtctcatttcagaggaatcatattctaacctcgagttaataaccaacctgttgatggaaaagaaaaccaattaaactgtgttgggttaaaaagccaatgagacagtagttggggataggagtttggatacgccttttacagatcaagataaggattgttggatgaaacccataagggtacccgccatgcctctacattgataagttcgggtatacctacaaacagttaagaagatccaggggacatcaatatttgagaacatagtagtcgatggttggtaattagtctatcaggtatcagaaaagggtcaaaggtgatatggcagaagaacaatttggatgctccccatctcgaggaagcactaaagaggatcatcggcaattaaaccctagtggcatagatacagatagcaagcaatgtatttccctgaaggtagtcagtgcagctttttgacgaaccacatcaaggtttcactgaaaggcagcaagccaaaggacttcatcgtcaccagaagcgtccgcaatccacattaaagagtaccacctgttagagataagccgaaagaagattgataaaagagattggcaaagatgttctctagcaggaaagaagtaggccgaaaggtgattgataaaggataaacagaaacatgctctgcatcgctcaaggaagacccctgatagtaattgccccgcaacagtcacctggtcattgaggcatcatgaagtaagcaagacgacctaggtaaaagtatttctttgaaggcaaggaatgaaatctttaactcggtatcagatgctacacggagtgaaaagtgcaagcaccggttaccaggcaatgccatgtcttgggagatgatccaatgggaaagagcacatcaaggttaaaggtgtaaaggaatacgttgaatgctaactaaggacaacctgaagataatagtgggaaataaactgaatgtaaagaaagtgaatccgagttgtctgttcatgggaactattcccagttatgaaccaagtgatatgttcgaagatagtctacagaggtcagacaacgaagcttcagatttggcaggataacgatcaaacaataagaaatccagcaataaagccatttgggaagacgtcaaagtatgtcaagtgggataagttggttctcttgggaagcataattcaaaggcaacgttatcgacccttgcatcaaatagcagaagtagctattacccggagaccgggaaagctaatatgaggcagctggtggcaagttagaagtgaatgacaagcatgatattcttatgatgacaaacatggtatcctagtaatgacaagctagtgttgacgcatgacatgaagtggtaacttccatgaggttgacgccaaaaatatggactatgcgaagttctggaactgaagcaccatcttcaagtgccgcaacccagtcgaagtcagctaaaggttcaaccagggacaagtcgggtgaagagaagattccatctgcaacaggagatcgagccaagcagtccagagtggagaagttttgttaggcaagtttgttatagaagacggagcggaagaagtcagacaagaagagaagaccgcccaacctatcttcttgctagcctcctcgaatctcggggacgagattcttgtaaggggggtggatttgtcacgtcctgataaattcatcccgaattaaaaatcattcgctaaaaggaataatagaattaattaaaattcgaaaagaaattggcaaacactaaaatacgtacaagaaaaattcaaatgcggcccggagaatttttgttaaattctccttggtctaaaaggagccctcaaattttacttgaattttcagagcacaaataataattattaagaaataaacaaagttaaaaaggttttataaaaagaaaagctctaaaaagtctttttcc

SEQ ID NO: 8195 - DNA, 16836 bp, Oryza sativa
ggcaaacgaagcttccgggaagcttcccgccgcacgcagcagccaccagccaagccaaggccggcaacgctgcttgctgtttgcggccttccgtttcggccttgctccgtccactccacctgcgccgcacgaatgtcgtttggtgagatttggtgtttttttgcccgctttgcgtttggctgtttttttttatgtgatccgtcggatccttttcagagattggtacggtaaattggtttagagtaaatctggaccgttcattgttaataattccatggtcgacaactcgagatcggccaagattttcctagtggtaatattgacacaataaaaacttttagggctcctttgaatcgtaggaagaaaaaaacgaaggaatagaaaaaacataggattctgacaggaatgcaagtataaaacagaggattacaaaacacaggaatgatcgtttgattggaccacatgaaaaacacaggaatcggatgagagagatagactcaaaggatttttaccaagagattagacctcttgctaaatttcctccaaaatctatatgcaacaagccattccataggaattttgttggatttagaaaactttaatcctttgaatcaaagagctacgtaggaaaatttcctataggatttcaatcctatgaaattcctccataattcctttgattcaaaggggccagttagatagagttgaagtgtgtgccataggaatcggatgagagagatgcgcggtaagaaacggcgtcgaggcatgtggtactgtcgaatatctggccaattattggaagaaggtgagaattttgttttggatacacaagatgggtccgacgacgaccagattgagttcatccctgattctgatgatgaaggcatcgagtactgcttctccttagatcaggagtttgtgcccgaaactgagttctaggattgtagggaagttgaggagaagggtggtgggattcaggattgtggggaggtgaacgagaagggtggtgggattcaagattgtggggaagcgaaggagaatggtggtgagattcaggattgcggggaagtggagaagggtggtgggatttgtggcggcagcaacatagtgcactcaaatgatgaatgcaaacagcctgcccagatgtggtgcgggcagcgggttcgaggcaagtggtttcatcgtgaatctggccgatgtttagaagaaggcaagaacgtgatctttgatacccaggatgggcccgatatggatgagtatgagttctggcctgatttggatgatgaaggaggcgacttcgtatttgaagattggttcattgacgttgtgcccaagaaaaagattcacgatggtgttgaaatggagaagaagcgaggcggtaaaattggcaagctgatgagctccaatgtgacttatggcatgggacgacccagttctaccattaccaaggcctccttttcgtcgaatgcttcttatccgcagggaggtgacctgtggcaggggacaatggccaaccacagtgctgaaccgagcaagcacttcgtggtggagtcctccaatatcagcgagcagagcaaggtgtgtgctattaatttatttgagtcaactttgcataaaaaattgaagatatattatttaataactatggaaacttacagataaactcccgaggagcctgctatgtataatatatccatatacttctagctagtaacaattaggtaaccatagatatttaatcactctaactttaatgcattatgtaatgtgcaaccaaagccacaagttagtaagcagtatagtgccatatagctggaagacttgatctgttcaatggagagtcatgcaccatctaatgttctagccgttaccacacaggatctttattgcattccatttaatattgttttgccatgataagagtcctgcaacgcataacatctgttcgtaaggtagcattgatttgttgtcatgctaattcagttatgtatttaattctatctttagctctatttaagttctagtgctgtacaagtaatttttttcaggtacttaatacagttcttgcttattttcagtagcaggtcaacaggaatattgtgtctgggactgggatctggagttaaggatgcttcacaattcaaatttcacaagtatgtgaccatctaagcatgattcaatatttcgcatcataaacacgtgatttgttgatgaatattaaatactaaaatttggcaagacgtgtgggttcttggcaataaattggttctttgtactagcaattaacaaaatcagttagtaaatattgacatcgttctgctcaccaataggttgtgcctgttaattcttccaacatgctgtggccatgaccaaagttacttcctccctaattcgatgttaggtaacaatgtgctatttacagttcatttgttttctctatcttctgtaaagtccagatgctctaggattctgaaaagaaatggttaaatgtgaactaaaatttcatactaggctctgaaatctaatctatttgtttgccaatgctttaatctatttgaaaccatagtgacatgtcttgagttttactctctatgattactacacctgttgtctagtttctaaagtgtcttctgatacatgataatggaactagaagaactaaactctgcaaaactgtcacagtagcaaccttttgttcttttcagatcgtgtgtgtgtgtgtgtgtgagagagagagagagagatagagcatgtgtgctgatgagggggtataatctgctgttgcatgtcatacaacaccataggtttttagagctagatttactaatgcaatcaacatgtactgagaaagaacccattttatgcattgagaaagattagatgaagtaaaaaacctggatgcagttgttcttgttcttctgttgcttccaagttgagatcaaaagctcccaagttgagatcaaaagaatgtacaacttgatcatttccatggcaagcaactcgagcaatgtcatctacctagataacatgccttccaggaacttcttcttctagattggcttgtgcttcattgaggtcaggtaaagcccctccatcttcctcttcttctgctaatatgtttagatctatagccattgtgatgggtaggtgtggagttggtttgtaggatgatggatgaagtgataaaaggcttgtagctgcctcgctgcttgaggattatggagggtacccttgggcggcaaagcaccatccatggagtttttgaatttgattagaccagttggattattttaagcccttatgttttggcgccatatcactcgaattaggtgtataacaccaatctgtagtgttgatactagtagtagcacccaacattaattggatgcttcaaatattccttttgtacagatgtggcagtgtacttgtcgtactcctactaagcattcaaatgattagccccaatcctataaattgagggcaaaatggtcattttcacacaacactattttttcctaactaacctagaacgtcctcctttctgggacggagggagtaatttgctacaaaacacactaagactattaaattattatttccattaggatcggagagagaatttaactaaaatgactttggtgccccggatttcttccaaccatccattcctctcacgcgtagtaaggctgtgttcgctccagcgtgttcccaaccggaacagtgcgtacggaaaacggaacggtctattagcgcatgattaattaattattagctttttttaaaaaaaaatggatcaatgtgattttttaagcaacttttgtgtagaaactttttgtaaaaaatacactgtttagcagtttgaaaagcgtcacgcgaaaaacgagagagatgttttaggaaacctgggggtaagaacacagcctgagggtgtacggtgcgaggaccggcgatgcgactgtatggtgtggcggtagcgactttgtagcgggtggctagcggtgtagcggtgaggactacatagtaggccaacacgatggcagcggccttgagggagagggtcacatgagtggactgtgacatggagcacagcagggagtgagcacgtgaggagcagcatcacgactaggtggtgcggcgggggtagcgcgctgcgtgaggagaggcggcagtgacctcacggtgggggtggctgcaacagtgatgatagcgtgactgcagcgaccttgctatgagacatgggtgcacagcgcttgtgctcacacgaacgtgagtagtggttgcatgactgcacgggcggcagcggcaaataactcggtgccggagaaaaactgaaagaagggagaagaagataagggcaaaattcatattttatgtggtttctctcgtattaattggatggataatatattttaatgcgtccgatgttttgtgacaaattaacatattatcaaacagattcacattcttgtggtgtctattagcaaataccatacttctcgagtgttctgcaataaattttgtcataaattaaccagttgtcgagactcgccttaattatcgaccgaatgccggataaatcctatttttttgtcaaatttcgatttcaataaaatctattgtttgcaatatgatttctcaaaaatcctccgaatttttcaccttttttagaggttcaaaattttcacttggaatccactttcgtctatggcgtcgaaattaaaccttgaaattccatgaatttattttatcagttttcattgaaaatgtgtgcttactaccatcggatgaaatcatgtgacgtttcggatagtgaaaatggcttacacatagtattttagctctcagaagcatcagataaacctaactagagggagtaaagggcttaccttggctccgggctgggctgcagcatcaacaccaacaaagacgccatctgatgctttgtccaaagaggatcgagatgcaaaggtccggttcaagctggcacagatggtggagctggcggcttctactgcttcaaggccgatggctagtcatccccggttgcagttggcggcgaggacgcagctggaaacttcgtcaggttctcgtttttcagttttgtagggtgtttctgaagatgaagatcatttacacttggagccggctacgaagccttggagtggtcctcttcctgcgcctcgtcgatcgccgccaagaacgattggaggtattatcaaagcagcgattcagggtaaagtttttttgtcgtttccttctacaattcagagtaatagatgttctccggtagtctcttccgttccggcgagatctcggtctcctccggcggtgagtccggttcctcgatccgatttggatgcgtttccaaaactttcgggtgattcatctatttcgaattgtgaggttttggatgagtttttgccgcaattgccacataggcccagtattccttttaggcccacacctggtcttgtctctctattcgcaaaaacggggacagtgcgccagaaggttaggtttacggatcgatctgtgccgcctccttcgtacgccgctgtagttcgtcgttcaatggagagaaagaaccagcgtcctgttcatggagggggaggacaaggcagctttgctgctcgtgcaaactttcatccaggtcatggcgagggaggttttcaaggtgctcgaggccggtttggcagaaatcgctttggagctcggaattttggtggaggccggcaggggcaaggtggaagaggttggaacggcaatggtgggcaaccaaatgctggttcccatggcggaggagatggctggtttggacaggaaaaatttagaaataccgaaggtggttttggtctgcaagctaggccaatttttgggcataatcctgggctaaggtttgggcaatctccaacctttagctttggattgcagccggtcccgttgccgtttggtcagtttcctccggtgccggctggtggtggcgacgcatctctattggctgccggcagtggcttggcacaatttggaggagcggctgcacagtttggtggcgggatgattgcgggtggtgttgcgcagggatcgacagcagctcaacatggtgccgggttgacgggcgccggtgcacagactagtagcaactctggaggcaatggttctgtactggctgggattgctccttttggtgataatgtgcatcttcctggcggggtagctggtgatcggcatttgaccgctgtaggagaatctggtgcctcggctggagtggttgcagtatagacgatggttgggacttcacaaccaaccgttacgccatctactcaagagaatgcaggtagaggtttaattatgggggacaagagctctggtaaagcaaaggtggataatcagctgagtgtgcatgtaggtggcaaaggtattaacaagaatccatattgttatagatgctatactaaaggccatacgttgcaggaatgtacatctaaattttactgtgaggtttgtgaaagtgaggaccatataggatccaggtgtcctatttttaggtctaataataaaccctcagctgagttgtgtgggtatgcagtggatggtcttggtttttttcatatccctctttcagctggccagagaataaaacatgattctaaggctgccctagttaaagtaactagaggacaaatgacggtgcagaccgttgtttctgaattggagagattgattcctggaaattggaagtgggtggtggaagataatggagataacacttttcgtactatttttccttctgctgcggaactgaaacgcatggtagaatggggaatagtacatactaaggttagtgatgcagaaatgaagataattgaaaggggagttagtaatgaggtgaaatatgtgttgccaaaggtatgggttcaatgcaaaggcttaccttctgagttaagggagtttttaattatttgggcggttggttcaatgttaggtattacaaaaatggttgatatgaattttactagaagatatgacattgctcgtttacaagttctggttttagatccctctcttatccctgatgtggtggatgtggttattggggataatttgtatgagctgtgttttaaggtggagccagaaaatgggcttgatgtgcctgaacccatggacatggataatagtggtgatagagaagatggtaaaaatatggatgggagtgatgtgcaagataagggtaagggatcagatggaagtaattttaaggatggttccctactgcaaggtggtggccagtttagtggttctgtttcaggaaaaggaacgtcttctgagccatctactcaggttttgtcacctattattaaaggattctcaggttttgtcacctattattaaaggattgacagtatctgatgaggagtttgatgggcttgtggaggaatctgttggggcaggatcagttaagtctcatgaaagtctagctgttaagttagcggcagtacctgacacgattctctcccctactagacaaagcaagagaagagcaagtgatagtgatcaactcactttgcagagggctgaaaagattaaagctgggaggaatttggaggttcagaatgttaaaggtaatttgcattttaatgattccttttttacatttgtcagataaagttatttcgtcctctctttctaaactgggttttatcgatgcaaacaatgatagtaattttgtgaatgctattaaggatataaggagtttggaagaagctaggttaagtgattgtattagtttgaaagacaagcataattctactgtttttcctgaaaatgaattgaccgacgatcagttggaggataattcagttttggaaaaactttgtagtgaaatcatggaggaggtaatggatacgggtggtgattatgattataatttgtatatcacctctgattctatgatatctccttcgataaaaaagagaagtgacaagaaagttaggtgtaagaaataattttacaatagtcttaatgaaaggagtttttttggaacagtgatgggttcaaggacccaaattatttctgatcttacaaaggaacaacaactagatttcattgctttatcggagactgttaagagagattttacatctagtgcccttaaaaatctttgtggcgggaaagattttttgtggcattgtaaacctcccagggggtgttctggtggtatgttattagggattaatttacaaacttttgatattggttcaattgatgagggcgatttttatattaagtttcatctttgtaacaaaattgagaagtttaaatgggctttagtcttggtgtatggacctgcacaaaatgatttaaaggaacattttctttctggattagttcatatgtgtagccatgaaaccttaccaattattgttggtggtgatttcaatattttacgaagcactatggaaaagaataatgacaattttgataatagatggccttttctttttaatgctatcatagacggtcttagcctcaaagaactctcaatgtctggaaagaattatacttgggctaataatctttcagtacctacttatgagaagttagacagagtattaatgtcgacggagtgggaacaaaaattcccactttccacgatatttgctcttaatcgagatatttctgatcatactcctctactcctgaatacaaactcatcttctgtatgtaatagtcaatataactttaaatttgagttaggttggctgttaagggatggttttgttgatatggtaaaggaaatttggttaagtgttgatgaaggaaatacttctctagagaggtggcaagcaaagattcgcagactaagacaatttttaagaggttgggctaaacaaactagtggtacctataaaaaggagaagaaagccctgttagaaaaacttgatttacttgataaaaaagctgaatcaaccttgttaactcaggaagagcttaatgctaaacattatatgaggaataggttagcttgtttgcttagagaagaggaaattaaatggtatcagcgggctaagaccaaagatattttggaaggtgactcaaatactaagtattttcatttggtagcaaatggtaagcataggaaaacaagaatttatcaattacaagatggtgaccacatcataaatggtgatgcaaacttaaaagcacatattaccacatattataaaggtctatttggtccacctgatgagtcttctttaactttggatgaaagtcttataggtgatattccccaggtgtcttctctagaaaataatcgttagttgatgaatttactgagaaagaaattaaagatgcagtttttcagatggaacataataaagctccgggtccggatggatttccggttgagttttaccaagtgttctgggacgtaattaaaacagacctggttgagttatttaaagattttcatagtggaagcttaaatctttactctcttaactttggtactattattttgctgcctaagtgcaaagaggctataaagattcaacaatataggcctatttgtttacttaatgtcagttttaaaatttttactaaagttgctacaaatagaatcactggggtagctcagaaagtaattagtcccacacagacagcttttatacctgggaggaatattatggagggggttgtcattcttcatgaaactattcatgagttgcatcggaaaaaaaatgagtggtgtcatttttaagattgattttgagaaagcttatgataaagttaaatggtcttttgttcaacaatccttgagaatgaagggcttttcccaaaaatggtgtgattggattgcttcttttatctaaggtggtcatgtgggcattaaagtgaatgatcaggtgggatcaaattttcaaacttacaagggtttaaggcaaggggatccattatctccaattctttttaatatagttgttgatatgttaactatattaattaagagagcaaaagatgatggtcagagatctctggcttggtcccacatttagtggacgatggtttatctattttacaatatgctgatgatactattatttttctagagcatgatttagagaaatcaaaaaatatgaagctgttattaactgcgtttgaaaaactttctggccttaagataaattttcataagagtgaattattttgctttggtcaagcaaaggagtgtcatgagcaatattcaaatatttttggatgtaagctaggtgattttactgttagatatctcggcattccaatgcattttagaaatcttagtaataaagattggataacaattgaagaaagaattgaaaaaaaactcagtagttggaagggtaaacatatgtctgttggtgggagattggttttgattaattctgttttgtcaagtctagctatgtttatgatatcgttttttgagattcctaaaggggttcttcaaaaaattgattattatagatcccgtttcttttggcaaggggatgaacataaaaaaaagtatagattgacaagatgggatattatttgtcaaccaaaagatcagggtggacttggagttcacaatttagaaatacaaaaccaatgtcttttaagtaaatggttatttaaattaataaatgagcaaggtgtgtggcaagatttactgaaacaaaaatatcttactggtaaatcaattactcaggttgagaggaaacaaggggattcccatttttggtcaggtctgatgaaggttaagaattcctttttaaatatgggttcctggattattaataatggtgaacaagtaagattctgggaggataagtggctagggaactattctttgaaggaaaagtacccctcgttgttttctatagttagaaggaaaaatgcctcaattgctaatgttatgggttctgttccgcttaatgtttcttttagaagagctttagttggtcagaatctaattagatggcataatttgtgtgcttccattgtgcatattaacttaacatacgaggatgacatttttagatggaattttcatcaaaatggccaattttctgttcgatctatgtacttagctttaattaataatggttacatagaaagaaataaaattatttggaaacttaaaatgcctcttaagattaagatttttatgtggtatctccttaaagggattgttttaactaaagataatttggctagaaggaattggaatggtagtttgagatgttgcttttgtatgaaaaatgaatcaattcaccatctattctttcagtgccatttttctaaatttctttggagagctatacaattctcttttggactttatcctccacatagtatatctcatatgtttgggaattggcttgtgggtgttagtaaaaaaatcaaaaaacttattcttgttggagcttccgctatatgttgggctctttggcttagtagaaatgatatggtttttgataaaacaccatcaaaatcctatttgcaggtgcttttcagggcaacgtattggcttcggggttgggctcagttgcaaaggcatgatgaagatatcaagctaataaatgatgaatgtcgtaaacttgagacgacaattatgcatctatttgccaacttcgggtggaggttctctattagaattcagtagttaggggatctttttcttttgttggtgtctattagtttgcttagctttgtttctgctatcgtgaactttctgtgtgagttccataataattggctgtaactcttagagtaaaggccggaatgttacattccattatctaaaaaaaactagagggagtaactgggaagatcaacagcataccgtacgcttaattactctacacgcatgtaacccagctggtatatagcttttccacatttccagttactcgattggaatgcaatgcttttgagtaaaggccggatattatatttcattatctaaaaaaaatttaattatgtctattcttaagctatgattgagcttgtcttacgggaatattttttcccatgaatagctaaatgattttatgataactatttatgtacgagtacaaataaaataaattaactattataagattttaaaaatagattaaaaaacaatattactaagtcgtatatatttttatgcgaaaatcacatcgtttaattaggagtcggaaaacacatgccatagtttttataattccatcattatatacagagatgcaaaattatatgaatcaaatggtcaatttttcgtctacggctattaaaaacctcgaacgaaagtcaaatcaagaaagaatggggatttatcattggttagaggatggggtgtcgattgaccgtgatggctgtccacaacagattgtcgtatatgtgcatgcttgcatactcgggcgtacggtacgggtaagctaaggctgcgtggaatcacgctgtacacacatacgtagtatagagtaggatttggatggccattttcatgaacaagtagagagatatagatagatgtggcgaccattaattcattccttctgtggctttagcagtgtgcacggatcgcccttataagtgacactactttaaaaaatatatttttcatagcaccactcttttatttttttttcctcaagtttaataaacacacgcttgtaaagataattaagagggattccgatcaccaactgccagtgaaaattagttttcgttggttgtcgcttaagatatctgcttgcaaaaatagaggtatttttacaaacggttcctttaagcgacaaatttcgctagtagcggctaaggagtaccaactgaaaaaaaaagcaaaaaaaaaataagttctctatattaaaatttccactgatcttatatccccttctctcactcagactctccctcctagctcttccccccacctctccctctccctcccccacccctggctctcctcctctcggcaaccacggcaggctagcaacggctgacgcggagcacctgatgcagacttggcacctgacgtggggctgcattggctttcgatctccggcgaaggggtaagtcctacgttcggccggccctaccaattgtatcgactacattggtattgttcaaagctacatcgcttcgacctcttggatcgctctggtttggttggtatacttgcatacatatttatcatatatcttagtaatctagttagcatcttaatttacttttgtatcagctgagattcgttttagggtttatgctgtatcggctaaattatcttgctaaattatattagctaagatatcaccaccctaaaaattagtcaaaatagactttatacttctttgcatactttgcgatgcatcatccatcgccaaagttgggcagagcaaggcgatcagtgtgtgttgggtcgtctcctatatatacagctaggcaggtgattgacaaatagctaatccttgttacatcgagaaagccagtccaattaagggggaaaaacacgaatattagagaaggatgtaatatcaaataaataaaatggatgaggcttcgaaaccaggctagctagcccaccatcttattaattaagctagccggaagacccctgcgtgtttctcaattaaggagagaaaaatgctacttcttcagttaactgtttttcctactctcttgcaaatttagtttataagccaactatttttctttttctctgttttctccgtgatcagagaatcattcaatcattcattttcgatgtgcatgttccattgttcctagatcttgatccacggatgaatgatccatactgttactgatcagtagggctttctgcatgtgtcgcgccctttcgaaccgtcgaaccgtccaattaatgtgctccaaggctgacaaatggtgtcttttgccgagctgcatagtctcgactggacacatatatattcatcagtatgttacatacatcattggattagtggtttcgggaatgtttttgcaaatacacatttcgccaaattctgatctgacgatccagcagcgcagatagatccacggatgcttccacaaaatattccattcctgcagtatatccagatctcaacaaaacgcaggtcgatcatcagtgtccactgaacaaaagcacatgccatgcatatacttgcttcatcgtaggcttagcagctcgctacagtgttgaccctacaatttttagaatcatgggttttcgcagcaacgttaattaagggcttcttggcagtagcagaggtagcaccgccgttgagtagaggtgataatagcattgtggagattatgggtaccccatacccacacggcatggttatccgactagtaataggggataacatatatgtatggaatatgtaacagatcatgacttgggtattacgtttccttttatattatggagcggcctaaagtcctgatttgataatattgtaaagtagatttaggaagccgataccgtgttggttaaggtttctatcttgtaatcctgccccccaccctatataaggtgggcaggaggccctctagggggcatgagacaacctgatcgtcagatctatactacacccggcggattcaaatccccaaacaggagtagggtattacctctcatcgagagggcctgaacctgtctaaatcctttgtctccacatccatccacttttaggtctcgtgcgctaccccgttttattattgccgaattcatgtttcgacagttggcgcgccaggtaggggttgcgtcgagtttcctatcaacaagcgcgatggaatcaatttcatgagtcgccgacttcgctttcgctttgggagttttcacttcctttccgtcgaccacttcttcaagctcctcttctctgacttgatccaaatcagtcagggggaaactcaatctgatttttatcattatttatcatattgatttttaatctcagattaatttcttgctattttttgttgttgttcgcatataactacgcggcactattgaggcgattgatgctggtcatggactcgaggcgtctcagctttccggtcgatcgcccgcgagtccactccgccggcttgtcctcgccaccgccattgctgatagcaacaacgacttcaccgccggcttgcttccgtcgccgccgaccggtgtcatcgcctatacggttggtcggtcacaccaccgttcatgggcgtccatgtcttcaccgaccggctggccttcgccgccgccgactggtgtttccgcctgcacggctggcctattatgccgccgccgttgggcgtctacgacttcaccaccggcctgcctccgtcgccgccgactggtgtcctcgcctatacggtcggttggtcacaccaccgttgatgggcatcgtcatctacaccgccggcctgcctccgtcgccgccgactggtgtcctcgcctatacggtcggttggtcacaccaccgttgatgggcatcgtcatctacaccgccggcctgcctccgtcgccgccgactggtgtccccgcctatacggtcggttggtcacaccaccgttgatgggcatcgtcatctacaccgccggcctgcctccgtcgccgccgactggtgtccccgcctatacggtcggttggtcacaccaccgttgatgggcatcgtcatcctcaccgttggctcaccttcgctgccgtcgactggtgtttccgcctacacggctggcctattatgccgccgctgttgggcgtctacgtcctcaccgttggctcaccttcgctgccgtcgactggtgtttccgcctacacggctggcctattatgccgccgctgttgggcgtctacgacttcaccgccggcctgcctccgtcgccgccgagtggtgcctccgcctacacggctggcctattatgccgccgctgttgggcgtctacgacttcaccgccggcttgccttcgtcgccgccgactggtgtcctcgcctgcacggctggcctatcatgccgccgttgttgggcgtccacgtcttcgccgaccggctggccttcgccgctgccgactggtgtttttgcctatacggttgacggacttcgccgctgttaatgggcttcatcatctacaccactggcttggttccactggcgccgactggtgtttttgtcaccattgatggactgcttcgttcccacattggctacttctgccatcaccaaggggaatattacaaagctaagtcgtcatttattttattctttatatgatatttttccttttcctctgcctcactacaccaattggtcttccattgagtagtgagtcgggggctacagatgttatatcatattttttataatattcatcttgattgcttgcgacataatctgagtacaaaagtacctatcgagttatggagttctatcttcctatgctttccgtttggtttgccaatggatggttgcctttgggccgattcctagcacccgggggctcgttggatggaccgagtaacgcaaggtgctaagtattattcggaataaatcaaaagcatagagatgagataaatttattttctgctcttaataattgcaaaagtacccgagtagtaaactccgatccgtgaaactttgttccattaatgaagaactcatgtcactcatatgcatgtttgggaagtgcttaggccgactcccagtgcttggtggctatgactagttgggcagagcgtttaaacgtaatgagtcatctgctccgggaaatcaaaattgacaagaggagaaatacatatttataaatattttaaaatacttgattttttctcgagtattatatttatat

SEQ ID NO: 8196 - DNA, 15573 bp, Oryza sativa
tgattatttggatgattcacatgtataatgtcaattctatgcaaataaaaggaaataatatatcaatgttgggttctttaaaactcctgaaaatatagagaaaggaatatttagtgccaaaaagattggtgtcagttattaaaaaagatcatataaagagaaaaatcattttatcaattactttaaaagccctcaaatggtcatttagattgaacatatttttttcctacaaaaatcatgtagacatgaaataaatatatacatatcccattgctttagtgtcctcgctaatctcatgcgatatggagtaaaatttgactgggtcgaggctcggacttgtcatacactgaatccgctcctgaaataggccccaaagcaactgtaatgtctacctaggagaaagaggaatcgcaatcttgaaagcataaaagaaatgaagcactaattgttggaacatccattagaatagaacaagccagttttgactatataaataagtaaaggataattgagggagtacgacacaaattactcatcaagttgttgagttattactataaatttaaatttaagataggaaaggaaaatagaactgctaatgctttatccatagtccaatccttggatcactttatggaagttctaatagtgattcccagatagccacctaggttgtagagagtaagggcctgtttggcacagctccagctgtggagctagagctcagctaaacagtttcagctccacctaaaatgggagctgagctgagcggagttctctcacaaaatgaaccaaagatgtggagctgggtttaggcagctccacaacttcactccggacccaactcctggagctaaatttaggagttagagctctaccaaataggtcctaaacgaagatgaaaaatgcagagaaattgaaactaatataaacttaggcttgatccaaatgcacaactcaagaaattatgcagagagtacaaagacatgatatattgtgggaacatgaaatcctttgagaaaacaaactcaagaagtcctttcatgatttggccttagggggacattctggagaaagagcaacatatcatattaaattggatcaagcttgtgctgtgtgcaagaggactaaaactggacacaccttgattcctgggttccttcagcctctacccatttttgaaacggcttggaacccatatcattaagggatttcatagaagtctttcagagcaaattcaagatcagtttcaaaaaaaaaaaaacttctataagctttatggggtgtcctttgtgactgagtgcagtgatagggatataatttctgaatactgagaatcaaatgcactggtggtggttggaccagatctggttgtgtcgcacctacggcgattctgcaacgaattattggttaatcatggatgtctcctttgctgctttgcaagagatttttcatgcaaaagatacagtggaactatcaggacaacaccactgctgtttctttctcacaaccttctaccattggaaaaaccgcagtgcgctccttttgccttgtcatcgtagaataaaacacccatatatacatcatatgatcatataataaccttgggcaaacaaaacacagtgcattcaattcagtttagttgcttgttctgctgcgtatgcaatgtctagaatagaatctcctttcctaccttccacgagcacttagtgatatctgatcacttccatgcttgcaaagttgcaattgcatagcagcagcagaagaagaaagaaaggtatcaagataactgaacattttgggagatcaattgcgtgggatgacaacttctgaaagcttcttggcatgagggcagctcatcatgggacaggatcaaagatgcttttggcatctctgcactttttgtatatgtcctttcaggatcgccacaaaatatcctcttttgttatcttgttctcttaggttaaaagaacggtggagagaagacactctgaattgatagattggtattggtcattacaagaagcctgcgttttttgcacacgccctctcattctcatttgaagaatctgagactcagagagtgcaacctctcactgcttgcgtgcctaactcttgaggtatattcagtatctgtttcttcaggaatgtgagttagtgggagatacagacagctacaaaattttcagaccaaaaaaaaaatctccttttctgaacttgtgataggttcagaggaaacaccacgtagctatagctgaccatttttgtatgaaactttagctatagctgacctgactattcaactagctactcctttatctgtcactatcattacagactacatccttcgtcaaaaaaaaaacttttaatcagtttttttaggacgaagagagtatgaattacataacatttcagggatgtcttgtcgactaagcctaataattgagcaactatgtatgcaaagcgtgagtgagtgatccggacacgcgtgttgaccacgtagctggaggatatgttttgatcagcgagatatttggaggatgtagcgatcgagatgggcttaatctctctaaagcacaaaaaggaagaagagaagtaaagaaaagaagaaaaaaaaagcaaacgagacagggcataatgggtggtgaaatgcacggcgttgagattgattaaagctaaaatctaatcagcgagacggatcgatctgcagccagtgataatcgccggcagcaggccaggtggtccggtgccaggatgggactcgactacgcaactaaccaaaagattaaaagcgatttagagcaatctgatcttctcctgtgtgtgtcgggttacttgacctgccactgatgacggccaagtggatgatcaattgttgggctaaatcgagctgcagctaacactacgctgacaattgtcaattgggatgaactggtcatggaaggagatgtgtgtgcgtgtgttcgatcatggagaaattttgggtcgatgccagtagcgattttgatggtggtgctgggtcagctcaattattgcattgtgctgatgggtatatttgtaacgttgacatgccacggttattcgattaacatggccccagtgttgtttgtccagggtatcttctcccccattctcttccgatttcactatccgcgcttggttggctaccacactttgccatgtttatttcaccacacgaggagcgtgtgtttgcctttctcctagcgtttttagcttttttttctcttaatatatattaaccaaacggtgggaggacttatgatcggtcaacttccctcgtatatatgcgatctatctgcttatcaaaaatggaattaacttttcaatcatctaaaattgtacattgttaagcctagaattgtgccatatgatgtgcgattttatcattgtatataattttattttatttatctaagtttgaatacttttacatgtaattttgtaatcttttataaactacttcctccgttccacaatataagactttctagcattactcacattcatttagatgtatatgtttagattcattaacatctatgtatatgtgggcaatgctagaaaatcttacattgtgaaacggagggagtataaatttatgttcaggttagaataattttatctaagaaagaaagttcgtaaatagtctttcccaccctaaaagctagtcaataaggtaagagactcccccacttatatattaggtccattgaccttacacaaccaatgtgggactattcaatagaaatagcgtcacttaaaaaagtaataagaaaattgatgaaaaccattggattgtcattcaagaaatgagaaaagtgatagaaacttttgaaatcttctcaaccatttgaaatatagacactccctaagaaaattattgtcttttttactggttatcataacttctttgtgatccagtttgttcacccaattgattccgaaatccccccctcaacacaacaacaaacacaaacaggcaaggggaatattttgtatggtccatggaagcatggacacctacatcgatcatttggcagcctcaggtacatccaatgaaactcatgatctctctcccttgagcctcaactttctcacatggtatgcatctgagaagaaaacattttcagctgaaaaaagctgctgggaggagcaccatgcttcattagttatcccctttttcttctctctagctaccaacatatataatgctcagctgggtcacacacataacataattattaagtttagtgtctgaagataactgataacccttgccccactaactggtcggcacacacataccagatgatgctaaggataggagaatttaagctagaggaggagttagctgggccctgtggaataatcagaagagtcaaacatatgtcaactacactacacacaccaaatgtcaaatacaaacagcatacatgtatatacacatggacatgtgtctttcagaagtcacccttttttttttgttctgatccaagcccctgtaccaccacttggtgatttgctcttacactgatcatgacagggtggtgccatctatccacatgcacctttttattcccactccagctattgtgattagtctcccataacaagttaacaagctcatgaagcaactagccatgagcctatatgactactccttatggctggcaaattagatgtgtgttagtccatcaaatgtagctgaaaagttgctgtcaaagagaatataccattgttaatttggagggtgaaacaactttttgacaatatagccaggttattgatctcccaattattggcatcaaaagtcactagtgctggggagtgaaattctagtagtgtggtcacaagttaaccaaggtaggttggtacttgggagggcaagcatggggatgcacataacgaaatgttgtgattttttttcatgaagaaagcaaagggattgcctaatatattgatataggaaaggtaaaaatgatgtgtatgcattataaataattggcatttccaaactcatcaatctgtctaggttttacagagccatcaaggttacaaacctacggtgaaacctgtccacgcaggttaaagttctagacttagtacgggtgttcgtatttatggctatttatttattttagtcgtagatgatgtatccattgacagcaagccatcgattataacttcatcagtctcaagatatgtcagctcaatttttcagatgttctcattataattggatgtgcgtatgtgtattcataaggatgagtatgcacacgtgtatgtgagtgtctttgtgcgtgcgtgttaatagaggtgagtgtgcatacgtgtatgtgaacatttacgtttgtcttgtgtttctcaaaagaaaggtttataaaacctacagtatttatttggtaatctcagtgcatgatttgtatttatatatatgttggatttgtcttataattttatgtatctgccacccaaaataagtgtcattactgaggttttcaggaatttaaagatcaaattgtcttattagcttactagttgaaaaggggaacatgttttcgcacaagttgaaggtgaatgtgtggcgagttgtcatggtcatggtgcagtttgtcagtcatatgtccggccacttgtccatgcctccatggttcaaagaccctagccaacacttgagattttggagatgctacaaggaaaggagttgttaattttctctttttggaaaatataggaagaagtcgatgcaaaagaatggaaaattcaacaacatgaaagctgcactagccggttggttcctagctagcaatttacaagttcccttttagcttagaaaatactgtgaggtagtgtttcaattataatttatcatacttcctcaagttgcataattctcgttgttttggataaggttgtgatcaaactatcagaactttcgctatcagaaactttaggatatttaggctgtgtttagatccaggggtgtaaagttttggcgtgtcacatcggaatacaagttttggcgtgttacatcggagtacggacacacatttgaagtattaaacgtaaactaataacaaaacaaattacagaatccacgtgtaaactgcgagacaaatttattaagcctaattaatccgtcattagcaaatgtttattgtagcaccacattgtcagatcatggagcaattaggcttaaaagattcgtctcgcaatttacatgcaatatgtgtaattagttattttttcgtttatatttaatactccatgcatgtgcctaaacattcgatgtgacagggtgaaaaattttgctaagggaactaaacattcgaaagcaataaatatttatttaggttgtgttctttagtgtgagttcctaactccactttcctcgttttccgtgcacgcttttcctaaactgctaaacgttgcattttttaaaaaaaagttttataggaaagttactttaaaaaatcatattaattcattttttaaatagctaatactcaattaatcatacgttaatccgatgcttcattattcgtacagaaggtaggagttcccaactactacaaaagaactcacccttagtactttaacaaagctaaatatttatttattatatatattaaaagaaaaattatagtcaaagatatgttttagatgtttccttatccaaagtggtaggaattatcaaatgggagggagtacctgtaagaactttaaatatagctcaacttcattacacacagtggtggtcctacaagttaacattgctagcatatttttttttcatattaattaatttatatcaactagagcacacacatattattccaaaaaaaagacgtttaaacttgagcttgatcatagaatgcaaacacattattatatgtcacattagaaggtaaacgtttgtatgccttacaaggtttgtaactttcacaaacaatcagtgtattatatttggtcaattaatttttggtaggatgtgtttgtatgtctgtatggcttgctatatggtgacataatttttcattccgtgtggtttagctaaatcgcgtgtccttcacgaggaaatgcagatgagttccgagtgcttgttggatgttggagctttttagcttttcaagaggcttattgctgttggtgcatgaggactcaacatgtggcaaggctagtgtggtcacacgtgttatgcctccggagaggtcagagaaccaatagatgaaaagaaatcaagataatatttattaggagaaaatttgacatacaccactcttataagaggtaaggccggtttacctaccactcaaaaatataatgctttaatgtcattcagaagacatgcaaatctaccatttcgctttaaactcttttttttttatttctagcatggtccaacacatatcttggagtggcatctagagtgaaatgtcagattatctcatatactagtaatatgtttgtgctttataacaggtcaaacccatatgattttgtgattggtttgatgagtggattgaggataaaacacgttctaggcctatataattcaggatgggttggatgcgtggattgaattgaaaatgctattatggctatgcacacataaaaaagcacgcaatgagaaagggacggaagtgttaacaaccaaatttggtaatatcggcattgggaaagaagattagattgaagcgaagtcggaggtggagatcgagttctgaaacagagcagggatcggctggagtccagatcggctacgataagatcggctgagtctgagtcggattaggtaagccgatgtagccgatcctagcaatacaacttgatatgtgatgttgggttggattgaggtgcttcaaggtgattgccgcaaatggatagagtcctgaggaggcaattgtatctattaattaggatgttttatgtaatttccttagagatatgattgggcaaaagtctgccgcaaagacttatagtatcttagagtttgttagagatagtagtcgtgtccgttatagacatatcttgtaattctcgggtataaatagacccgagccctatgtaacttttaacacacgttcaatacaatgcgcatcgtcacctttttgctttagttttatttcgacgagttcttgctttcgggttgagctgcatcggtttcgatcttcaacaagaggtaaaacttgttatgacggcttgcattctcaggattagtgcttccatctttatgacactctaatcttgtttatgtaattcgtcgggttatcatatattttatataatctctggcaataccgctatctaatctacaatcggctaacatctgtcgaagagggcagccgattaggttagattttgacgttgactcagattatataagatatctaccactctatgaaacttccagcggcttgattgtctagatattgttcttcttttcatacttaatgttgtatcagttgagtttgatctattaagtcgtgcttagaatatcaatctctagcctgctttctggttgccgattagggtagcatcggagtttcagccgatcttatctgatttaactatatttgctctatatgctttattgacatgttaaatttgccctttatgccaagatattgctatatttgaatatattaggcttttgcttgatattctatacctgttttaatatcctgatataaagtagtatcggagtattagccgattcatgctagatctatctgatcggttatgctataaacatatatagtcctgttattaatatatatttcggtctaagtggtttatactgtctcggcatggcgaccgatctatcccaatcacttgatttaagtatatatcgatataaggagtatatatcgttaacatctacagccgatcaagtagatttagttctttcttacttattcaagattgccgatcgatacacatattacatcggctcagagataaatgatatgtcatcggcacttagccgatcggctatcatttatagatttaaccgcgatttctttgcttctacttcttgttggttacatgatcaaatcaactggcacgctagcacacccgtaggcgagctttggacctgcactggagttaagcagatctcccaggcctcgtgttttctgtcaacaggaaggaagacgactacattttttaaatagtagagataaaaatggtactgctaattaaaaaaaaatagacatacgtccccaagtcattttagattggattcatgataattaatcacatgtacagctttataacaaaagtatatttgtattattatgatttttatttactcataaatattgtactttggatattctcaatggccataacatgttcttagagataataattaaattgcaatccagtgcttcagttcattagtagtatcttttgcatatatataaatattaaataaatattgaaatcatgcttgggatttaaaactgaaggatcaaaatggggtgcatggatatagataatatcttaccatgcatacacaccctatattatatttatcaatttggctatggccccaattaattttgaacaaaggtgaccggatgtatatctcatatctatcgtttagatcccttctccaaaataatacgtaaatactttgcattctttacccttgcctttccttccactcccctcctctagtcgccgcctcttactcaacagacatccaccccttttataaagccacttcaattagcacatctcaccctctcgaggaaaataaagcatataatagtgatacccggatacagattctctgcagtactgcatgtacagtcgtagtaaactttactgatatgtgttctacagtgagctgcatataggatctcgacgcagtgataccctatagtcaatccgcccaaccatagtgcatttctgttaagcctgaacactatgcaatgtatgcatgataagttcaatattgtgcaaacaatatatcaacattacattattcctctcaagtcttccattctccaagcttctacatgtattttcattcttgagctcctttataagttaggtccaagtccaataacctatcataacccccttttattttggcaattggaaggtaagcaaatacaggtaagtgcaactgtatgttattcttgggtcccgaaatgaaatagggctagctaccgacaatttcatcacggccaccaagttgcgccagcttccactctatatgcatgactgcatgctttgctccagttagctacgtactagcacaaccattccattttgaatatctattatatactaactaaaagtccattgaattctctataaaagctctcaagctgtcacatggcgttctacaaattaacgctcctaagacgtcatacagtgcttaataaacgagaagaaaatttctaaaatttatggtaaagaaaacctaacgattgatattcctttaaataggtagagccaataattttcacccttaaatctccaaaaaaatcaggtatccccccccactctcctcccctattttctagctaacacataatatataaaaagataatagttagatagcaaaatgatcgtgattctcaagttacacatacttttcttaatttatttgatttgttgtgttatttataattaaatactccctccatccaaaagtctaagacccattctattatttggttttctctaaaaatctagtcctatttgtagtcactatgtgctaaattaaattattaatcggaaccaataagtcattttagtatttattggttgtatgtttattggttttgtcacatgatgaatgagttagttgctccttggtcttggacttttggatgaagggagtacataattcaagatccatatttctcatatttactatataaaaattagataatgcagccgttctaattacaaatatttgaacaaaatttgcactttgaaaacgatgaaagaattcaaatatgtgagtctaaagttcaggttcaatcaccaccaaggagcttagaaccatgatgcatattctaggcctgaacccgacggaggcggaactgcaagacattattggtgaggtggacaccgacggcagtagcggcagcttcgacttccacgagttcctgcgcctaatagtgcgctagatgattagatgaaggacaaggattgagaagaggggcggagagagacgttccacgtcttcgacaaggactagaaaacggctccagctctaccgccgagccacgccatatcatgtccaatgcatcaggagaggctcattgatgaggagatccacgaaataatccgtgaggccgatggtgataggcaaatcaactacaaggagtttataactaaattcagaattaaaaataaaacaagcaatttgattaaatacacattcaaaaagtaaaaaaaatattaaaactataaaaaaaataagaagatttcatgtagaatataaaatatcaagagttcatataaaagtatgagttataaatatattaaatttgaaataataaaataactattaaaaagatgagtccaaatactaaacgatacaatattaagtataatttaaatcactaaaatgacaatttagaataaaacaatagtttgatttgaatacagatttgaaattagaataactcgatcactaaatttaaaatataataaatatttttaaaagaacttttccatctttattgattcacatgcataacgaattgcatgtatatgaatttttaaagagagggcttgcagggtggtaaaaaaatacatttattaccaataaaagtttatcgagatttcttcagaaaaaaagatacgatgaacactcaattaaaaatagaaatcaccttactttaatttcaacttattttgttagaactattttcaaacaaactaataagcatgcctacgtgaatgcgtgggttatcttcctagttaagtttaaaatatatatggagttaacatgcatatatatgtccgatggattaactaattcaacatttttttgtactatctagctagatctagctagcttaatactagaattacaagcatatatatatgttctgctagtattagcaaagaaacaattgtcgttaattggtcatacaaaatattccatacttaaattatcaacacctggtggcttctgggaatttggggtgatagagaaagaaatatatagagtgcatactatgaaaatgtgtggtttttggctactgtgatatgtacatgcatggctaggatttaggattcagattggaaggcttccatttgacaacttgtcaccatcgttttgatcgatcatcagggtagataccctagccagctacaatattactgaattttgacaaaaaaatatatacttgtcgatctttttcgcgcgatacgtatataaaggttggaacagagacccatatatatataatttcatcgagatgtgtacataaaaaatcaacaaaatggaggacctggtgtaagaaggggaaaagaagaggcccctgtgcaaaaggtgtgggaggtcatggaattagaggaggagattcaaagggaggctgccttttttctccatgcttatggtgtgggatctctctctctctctctctccaaaagatggagggatggcagccagaggaggaagacgatatgatccatcatgcatctatctaggatctcaacattagctgattgatcagatcgatccaactaactgaaatatatggacacaatatatgcttccatgtgcagtagtgtataggtactgttcatggtgtgcatgaagataccaattaatggttctctttgcaaagcaaggtcgttttcctagatgtggccattggctaagaaggtgcttatcttgatcatatgcaccatgctacctagcaaaggcttatcactgtttttgttggggcaaaattaaagagatcttttaaaccgcatcaaggaaaaaaaagttgagctgtagatcgagtgcgtaatgggacagaaagggatgtattccctcaaatgttcttctaaatattcgagagatgtatgtactactacctcagctccattcttctttacttgttattcccgacattagaatggacatctcaaacactttagaattatgataacttggtatgccttttttttcacaaaatctatatgcatatatttttttagataatggaatataatatcccggtatatgcatatatatcatctattccatgtacatatgaatatatactttgtttaccaatatgtggccaaattaagttgtttaattttccatgcacgctctatacagtgtgtaaatcgtttccattatctaaaaaatgcattatacagtgacttatgttaccatttagttaatagaggtgtttacaaatgattagggcgtgcgaatggacataaataacagaattcttacaagaaacatgttgaatttctaaagaataatgatcaaacaacacaaatgataaaactagaataactaaataataaaatatagttaatgagataatggtatgaaaaaaaatgataacaggaagaatcaccttagaagttagaaccctgccaccttctcgaagggcaattgtgcaaaacgagtttggtaggaagaagggtgtcaaatgtagataaccagaacatctaataaaacaaaaaactcaaaagttcaaaaaactttaaaatatgtatatcatggtgaaactctcatatctaggaagtgggaggacactacctagctagtccttattcaaaattcagttagcgatgtgaatttaacagaaaaaaaaataatttactccccctaactatttcattttatcacttaaccccctaaactatttttaagcttattttagctcttgaaatgttaaaaatagttcaattgactggttaattacatttatcttctttatttctctttatacaagtcatattttaagcttaaattttgtaaagtcatatatgacaccattatcgaagttccaaaatagtttaaaaatttttcatgactttttgcttgaaatttaaaacctctgttcttaaattagtctcagtgcttctaacctatataagcagcgatttaaaaactcaaaaaatattgagaggtaagttataatgcatatatcaatcctatcaaatttcattgcaaaatatgacctatatagagagagaaacgaaaaagacaaatattgttagagagtaaggtgtgaaccatttttaatagtgtgggggtgtcaaaattaaatgagtcgagaaattgtctaaggggttaagtgctccaagggaaaaagttagaaagagcaaaatggacttttttttcttattaagttataatagccttcttctgatttctctctttttagagccacaactgatcgacagcattgctcaataatacaacaaacgtatactaattgtatctgctaatgatctgcacctagcaagtgcatgtgaaaaattggaaaagttggacagaacaacaagatcaaccagtgatcccctgcctctgtctatcagtatttatatatctagttttgcattattgtgagatcactagtgggcatgagatgagagggcccatgcatatgtacacaaacagaatgcagctgccgtagtagctgaagctcctggaacattccccactagagaggggaaaccccaacttcaattcctcaccaatctcatctcatctcatactagtactacactttatctcccccagttgatgctgctcacttttcttagtttccacgtcgcagtttctcttctctcctctgacccctttgtgaccgtccaacgacaacgcatggaggccgggttagcttagcttaattaagtgctcctacctgctgatctgatctgatcactttcttgtgtgtgcccttatgactgacagatcgatcatatagtctgaatatatataattaggattgttatatgcataggtttgcattattgtacccatttcctgcccccaccaccatttgcatgtgtgcagcagaaacatcctgcataaacagggattagaacgtagtgcaagtccctttcgacgctaattaatgatgagtggttaagttaatttgatggtgtttgtgcatgcccccgtcttggcgcctataaaagggtgagatcgcaagtccacgaggtcgtcgagcaaccaaggctttcactcgaccgacctcccagcttacaggagaccaggagtggacagaaatatatcgtagaattaatggttcgtgtgagatacaaatattaatttcttgttcaatcatttcatatatatatacatgtaggttatacaaattagtttcctagttaattaatttcattagcaactgcgtactctgtcatgttgtcgcatgcaatatgttatgcatggttagtaaaagacatggatatttgtgtgcatgcgtgcaggaggtggagaagaagacgtcggcgtggagcggcggcggcggcggcggggggaacatggtgcgggacgcggtggactaccggggatgcccggcggacaggtcggcgacgggggggtgggtg

SEQ ID NO: 8197 - DNA, 30783 bp, Oryza sativa
  unsure (1)..(30783): unsure at all n locations
tgtggtacgcctcccccatgtcgaacacgttgagctcgcgcccaggcgccgccccgtcctccgccagcggcggcggcggcggcggcggcggcctcggccgcacgtcgcacgcggcgactgtctcccggagcgggccacctccgcggcggccgcggcctcctcccccctcgacgagcgtggagtacatgacctcgtagcggccggagcacgggaggcgcgcggagacggtggcctcgtagaaggcgccgtggaagccggggtcgtccatgcgcacctcgacctcgtcccccaccccgtacagcggtgcgccgccgagctggccgccggagcccgccgcctcctccccatcatcctcccactccatgatcgatcgatggctgagacgctgggtggagatgatcgagggttttggaaatttcgaaagtcggaactcggaagagaggagagcaaccgttggaagaagaaaggacacaaacttggaaaaaaattctgtgcagaccggctgcaaaccccgcaccgtgcacacccgattcagattggcgacgcgtggacgagcgagtgatccgacagcgtgcccacacggctccatctgcaccaggagaaggcccagctcggcttgctcgcgtcgactcccacaaccagaactagaagcgcatggactggctccgcggctcactcgcgtcattttctttctgctgcggcgatccccacttccctttccaccgccgccgcgatctccttccccatcttgcctccatctgtcgggattgcctttccttggcgccatcggcttagcccacaatcccctccgttcaacaactgatgcggccacttctctcgcctgctaccgccgtcacggcctcccacctgggccctggccacgagcgccatcggtgacggcggcggcgatggctgggttggctaaggcgagcacgagccgtgttcccctcctcgtccctcctgaccacgggcatcggacgcctttggtggaggccgcagcggctgggttggcgagggcgagcaaaagccaaaaggcagtggaagaaccaggatctgcaacgcgccgccgaaagtcaatgcaagtggagcaccattcaagcaatgaagaaaaatcctggaagtgacatgtattttgtaattttgtagttgctacgtctgatcatttgcccgtgtctttctgtctttcgtcaaaatgctagctagggtgctggttggtttttctatagtttaaccagattagttcattagcctttgctaaaagtgatgcgatttatctctcacactgagtaggctgttggtgagaatatcacaaactgagtcacaggcttccatagcagcagtgctaaattagggatattcagatggtttactgcattctgacaaaaattattatgcaaagcatctgctgctcatttagctggnnnnnnnnnnnnnnnnnnnncaaaggcttacgactgggtattccaaaatctagaatgtgatggatcaatgtgtaaacaagattgtggtttgtctgtctggttcctttaaaaatgaaaaccggaaaattgtgtaatctgaaatcttgaatgtcaaatctgaaatatgatgtccagagaccagtcgttctcaaacaacatatagctgatcataagtgtaacacactgcaaatggaagtaaaacatagtactgtaacatagtaaaatagtatagttaagtaacatagtaaatggaataaaatcgaaatccattccaacttgaggaacgtgttaaactttgcactaggatcacctaggttagatctagtcgggtggttctatttgggtttgatgaacgacattgtagatgaaagggagagggtttagataccgaccggttgaggagatcgtggaggaagaggcgccggacatcgtcgttgtcgtcgcggcttgacgtggatgcggcggtggcgtttcccgtcactggctgcgccccctctcgatcggattagggttttgtggggtggagttggcggcggcggtgaatctcgtaccatgtgccgtgccggcctccaccccccttttatatggcgcagtgtgacgggggcccaccagccattgggctgggcgcccccgatcagggcgcggtcaaggcccccttgagccgttgggctcaaggggagagagatctatctaacattctcccccttgatctcactttttcttttagctttttctattccatcacagatttgtaaatagagcatgtttcatcgtcacggtcaatcgccgatggattcgacagccactatacacatctctattcagaaacagatactttacttttgggccctgtagtccaggattcataaggcttcccttaaacccatgccggctacatgttccttgaacacgttgggtggtaggcctttcgtgagcggatccgcgagcatcctttctgttttaatgtgctcgagactgattgtttgatcccggactttgtccttcacaacatagtactttatgtcaatgtgtttggcagcaccacttgactgattgttgtgagtgtacattactgcgggttcgttgtcgcagtataactttagtggtttctcaatactgtcaaccacctttaaaccgggtatgaacttctttagccagttcacctgccccgttgcctcatagcatgctataaactcggcatacatagtagaccctgcagtgatagtctgttttgagcttttccatgaaatagctcctcctgccagggtaaacacgtatcccgatgttgactttgtattatcttttgcaaagtcagaatctgagtaccccactatctggagtgattctgatcttctgtaagacagcatgaggccttttgttccttgcaaataacgcaacactttctttaccaatttccagtgctctaggcctggattactctgaaatctgccaagtaacccggtaacaaatgccaagtcaggtcgtgtgcacacttgcgcgtactgtaggcttcctacagctgacgcatatggctttgttttcattttattgagctcatactgatttctgggacattgcgatgccccatacttttcgcctttcattataggagcaggtgtagcactgcatctgtacatgttgaatttcttcaacaccttttctatatatgtcttttgagaaagtcccaatgcatactttgttctatctcggtgaatctctatgcccaaaacatatgaagcctcaccgaggtctttcatgtcaaagtttgaggacaagaatttctttgtttcctgcagtagactgacatcactactagccagtagaatgtcatccacatacagaattaggaaaataaatctcccattcttaaactttgaataaatacagttgtcctcgacattctcttgaaacccaaatttctttattgtcccatcaaacttcaagtaccactgtctcgaagcttgctttaatccataaatggatctctttagacgacatcccatattttcgtttcctttcatgacaaaacctttcggttgcgccatgtatactttttcctccaaatctccatttagaaatgccgtttttacatccatctgatgtaattccaaatcataatgtgctactagtgccattataatcctgaaggaatctttacaagagactggagaaaatgtctcattgtaatcaatcccttctcgttgcgtgaagccttttgccacaagtcgcgctttaaacttttctatattccctctggagtcatatttggttttgtagacccatttacagcctactgttttggctcctttaggaatttcttctaaatcccaaacatcgtttagtttcattgatttcatttcatctttcatggcttccaaccattcagatgagcgagcgcttctcatggcctcttcatatgaggtgggatcatcctccatatgcgactcttctatattataaactttatagtcatcacggatagccgatcttctgactctttcagaccttctaggggcctgcacatttggcacatcctgtacctgaggctcttgatgagtctcctgtactggcacattatctatttgaggctgttgtagctcctcctctggcgtggcaaccatttctgttgaatcctgtataacaggttcctcactctcattcattgttgccacaggaggggtaacaacaggtgctggtacctcaatgacaggcattgcaggcacaacatcagcaggtagagagaagaaaggttcctgagtcgacggagcgggtacagacacccgcctctcctcaagatcaatttctcgaactaccgagctccccctaatcatttcgtcttccaagaagacggcgtgtctcgtttctacaaactttgtataactgtttggacagtagaaacgatagccttttgatctttcaggatagccaataaaatggcaactgactgttttggggtccaacttcccaatatttgggttaaatactttggcctctgcaggactcccccacacacggaggtgagttagcgagggtactctccctgtccatagctcatacggtgttttgggcaccgatttgcttggaactctgttgagaatatgaatggcggtttttaacgcctccatccataaaccgagtggtagtgtggagtagctcatcatgctgcgcaccatatccataagggtacggttgcgcctttcagctaccccattctgttgaggttcgcccggtgttgaatactgggctactattccattctctagcaagaaccttgcaaaaggtccagggacttgcccataaggcgtatgtcgaccatagtactcccccccacggtcagatcttactactttaatctttatatcatgctgattttcaacttcagctttgaatatcttaaatttatccaatgcttctgatcgctctttaattggataaatataaccatagcgggagtaatcatctgtgaatgttatgaacgagtcatagccatccacacttttcacaggaaatggaccacaaatatctgtatgaatgatctctaaaattcctgcgcttcgttttgcaccctttttgatgctctttacaaattttcctttaatgcattctatgcattgttctaagtctgagaactccaatggaggaagaatttcattcttaactagtctctcaattctccccctcgaaatatggcccaaacgacagtgccataatttcgatgagacatcgggagttcgctttcttttcttgttttcttttgtcaacgaggacacaacattcacattctcagaaagagataacaaataaagctcgtctcgcaacacagcaagaccaatacatgcattattatgccatagttcacatttgccatttccaaagcggcaatcatatccatcaaaatccaactttgatacacttattaagttcctttgcaaagaaggaacataaaagacatctcgaagtaaaagtatgaagccattcgagagctctagaggaagatctccaacagcttcaactttttcttcaactccattggcaactctaatggtgctttctcttctttgcgtagtcctcgtcgaacggaatgcctttaaacaattacaagcatgaatagttgctccagaatcaatccaccatgtggatctagagtaaccaacataatgagattcatttacaaatgtaataatgttctcacctttctttgccatgatcattttcaaaaaatcaggacaatctttcttgtagtgtcctgtcttcttgcagtggagacattgatctttctcaacagcgaactgttgttgctgaggcagatgctgagactgtttaccttttgaggtgggagacttgtggttctttttcttatctttaacatagtttattgaaccaccatttgattctttgattctctcctcctcttgcacacaattagcaatgagcttctcaaagttccatttctctggacttatgttgtagttgacaataaaattgtcaaactgctttggcaatgaggccataaccagatggaccagaaagtcatctgttatgcccaaatccattggcttcaacttggaagccatgttgctcattctaagtatgtggtctctaacaccacctccattgtacctttctgtcacaagctgcttgatcagctgtgtagcataagtctttgaagagccagtaaactgactctttattctttcaaggtactctgagacagcgtcacactctgggatcgagcccaatatggtaggctcaatcgtattctttaccacagccaaacatttcttgttggctaaggaccatttcttttgttcaatgtcatacgacatgacgagaggagcattgtccctctgtctcttttgccagtcagcatctgactcattttcacctctgacaaggtcagcaggttctataggacatggggtagtcaatacccagtccacctctcccaagataaaagcaaggtcgagttttcttttccattctgcgtagttatctccttttagggtcggaatatctttaatgcaacccatcaaggagtagccacctgaaataatcatgtgcggtgagaacaaaattaacattaaaatattatgcattaagcctacatcaccgttgggcagaattagacataacacatataaccataactataatattgcaattaacaacgttggtcagaaaattacaacatcatagcacataattaatgttcctaaaattaaattctcccgttggttcgaaatttaattttagaaacactaattttcatcaatttcatctatttgcagcggaagactatataaaatcatatgaacagtagcaaaatctctgtaattctctctctgtgaaaattctcccgttggttcaaatttaaacagaggtaaaacatgcaaaaatctattcaaaattctattgaaatttgcatgaaaaatcgacaaaataaaatggaaaaattgctactgttctcttttattcattttcggccccgagggacctaaattgaacttttccggcctttgccggtcggcctatggccactttgcgcgcgggcgagcgccccctcccctcccccaggccgcaacctgggcctgggccgggaaagccgccgccgcgcgctccccacttgggccgatttcggtccggccgccgccggccgtccgatcagctagggtttcgatcggacggccgggcgccgagatcggaggatcaaaaacccccctctcccggccggccgccgaaaaccctagcttctcttctcttctctctctcacgcgaccgcgtggacggcgtcgccatcgccggcgaccttcgcgccgccgcgccatggccggcgctcctttcttttctcttctccgctccccccaccgtctctaacccccaccgtgtgagagagagatggcgacgacggagatggcggcgccgccgcgggccccctcgccggcacgcgcgtgcaggtgcgcgcgcggccgtcgagtggctcctaggcggcgcctctttgcccctccccccctccgttgccggcgtcaacgacggccggcgacgaggtaagaattagggttagggtttttggttcttttgatccgtgcggatcttgtgcttttctttctttggatttctttccccgaaacgatctaaacactagggttgctctgataccattgttaaactttgcactaggatcacctaggttagatctagtcgggtggttctatttgggtttgatgaacgacattgtagatgaaagggagagggtttagataccgaccggttgaggagatcgtggaggaagaggcgccggacatcgtcgttgtcgtcgcggcttgacgtggatgcggcggtggcgtttcccgtcactggctgcgccccctctcgatcggattagggttttgtggggtggagttggcggcggcggtgaatctcgtaccatgtgccgtgccggcctccaccccccttttatatggcgcagtgtgacgggggcccaccagccattgggctgggcgcccccgatcagggcgcggtcaaggcccccttgagccgttgggctcaaggggagagagatctatctaacagaacgatcaaagcttgttcagctttatcattgacctgttgtgcaacttcatcatgcatgatcatggtcatcccctcgaagttctgtgtaatctataacatatatatggtcacagatcaaccagtatgaagaaatatgactatcaaataacaaggcgagcatacatatgttttctgcttctcatcggctctacaatccccggcgactacgtcgtccgcatgcacaggtgagacaaacggctgtctggccatgtgtcgttcactaaggcgggtgaagaaagtaccggaatcctggcggctgcggtgcgcatggcggcgatccaatctggcgaaggaagacgacgaagccggaaaaagatttcgcttttgctagagccgagtccgcgtacggcatccctgccgcggtgccgcctcgaagcgaagccggctgatcgcttgagcgggagccgacgcgagcgagccaagctgggccttctcctggtgcggatggagccatgcagacacgccgttggatcagtctctcgtccacgcgtcaccaatctggatcgggtatgcacggtgcggggtttgcagccggtctgcacagaatttttttcccacaaacttgggagccttccaggagaaggatcgaataaatactgtgtttttattttttttctttctcctctttggcacagtagctgtagaggacccgtttggtctggggagtttggctgtgcacgcttttcaaacggctaaacggtgttttttttataaaaaagttttcattcaaaaatttgcttgaaaaaaataatctatttttttttaaaaaaaaataactattacttaattcatcacgcaaaagttttcattcgaaaatttgcttgaaaaaaattaatccattttttttaaaaaattaactattacttaattcatcacgcactaatggaccgctctgttttccgtgcgaacggttccggatagaaaccaggaacagggctgtgttcaatgctcctagttcccaacccatattcgttttccgcgtgcacgctttttaaactgttaaatggtgtgtttttttgcaaaaagtttatatacgaaagttgctttaaaaaatcatgttgatccatttttgaaaaagaatattagcaaatacttaattaatcacacgctaatggactgctctgttttccatgagcactgtgcaggctaggaacgtaggctaacgaacgcagccttagaagggattggaagtgtaaagggatgagattgttagctgctttgtttggtttgtagacatgggaattttggtggattggagggggaattaagagcatcaccaacatcttacttattttattccttatcatcaaatttaggaattttttgtcaaaaatcgtctccaagagaatccctatcctatctttcaatagattaggttcccaaatatagatatatcgtacctcacttctggggagtgaatttctatttccaatcgcgatcaactcactctcgctcactcacagcaaaaatgtttgcgcgctcctcctcctcgtcatgacatcattcctccgcaacagcgccatcttcagcgacgagctcttccttggcagaagttacggcggcctcttcctcggcagcagcggcagctgcggcggcctcttcatcagcaacggcgccggcgacatcttccttcacagcgacgctggcgacatcttcctcggcggcgcccttttcttcgcagcaaggttggtctcagtcgttgcttccgcttagttcctcagcaatggattggtaccacgacgcagtcttggtgcttggtattgaaaaggagagaataacttaagaaaaatatcttttttcttttcttaccaccgattctacgtgaaaaatgggttaatccaaaatgctcaattattttatatatattgtagaggtaacctcacctaactatatgagaaggtaaccacacttacatccatgcaaccaaccaaacaaaatctcttctcaattgtatctatcgtataggtaaccaaacaaaacctcatgctagcgtggctagaccaatgcaacaaccaatagctgtatatgtatcttcctagccaggtcaaacttaacctagatgagagagatgagctaggctaggggaatacgggcaaccaactagaactgttgtgagagcgtgaagtctactcttcccgatttgggctgtgtttagattcaacttttttcttcaaacatccaaaaattccgtcacatcaattatttggacacatgcatggagcattaaatgtggacggaaaaaacaattgcacagtttgcatgtaaattgtgagacgaatcttttgagcctaattacgctatgatttgacaatatggtgatacagtaaatatttgctaatgatggattaattaggcttaataaattcgtctcacagttgatagacggaatttataatttgttttgttattagtctatgtttaatacttaaaatgtgtgtccgtatacgtcaaaaaaaaattgggtatctaactaaacacggccttggtatgttatgctggcgacgtgttgtcagctagtacaatcaaaatcaagtgtaggtgttggcgacgtcggcgaggtgcccggcgagctccaccggcgcggagaacatggccatgtggtcggcgccggcgatctccctcacctcctctacggggcagccggcgatcatccgccgctggtaggcctccacgatggcctggtccttcccgcagaccacgtacaccttgcgcaccgcgccgtaccggtcctcgccgaacggcggctggcggcgcatgtcgtccacgtagtaggagctcacccgcaccaggctccgcgacagcgtgatgtcctcctccgggctcagctggtacagcttccgccgcatgaactccggcccgaacagcaccgacggcggtgcgtgctcctcgtccgtcgcgcagtccacccagtccgtcaatggaagcttccccggagaagaagaagaagaagaagaagaagaagaagaagaagaagaagaagaagaagaagattgcgtcagcttgatcgagtgagaacagaggaggagtgttcttggatgtgtgttttaccttctcgatgacgtcggggcgcgggctggcgcagtctggcatgagcgcggcgacgaacacggcggcggcgaccttgtccgggagcgtgtccgcggcgagcgcgacgctcatgccgccgaagctgtggcccacgagcacggcgcgctcgccgtccgggagcgcgcggacggcgtcgagcagcgggcgcgagtagtcgtcgaacgtgggcgcgtcgtcgtcgcgcagccggcgcgcgtcggcgcccgacgcggcgaggtcgggcgcgtggacgcggtggcccgcggcgcgcagcagcgtggcgaccctgtaccagcaccacccgccgtggcccgtgccgtgcaccaggatgatgcggctgctcgcctccgccgctgccgggacgacggccgtcgacgagggcatgatggcgccggctatagctagctaactgttgctcgtgcgaatctagtaattcagcgcaccgtggcaaactggcaattaatgtggcattgatataggctcatcatgcgggtatgagttccacgggagtcgggtagtgcgtcacggctgatgcaacgggaggggaggctgggaggtgcgccgggccgccactggcactgcctgctgttgcgagtctgtgacaaggataagtttctttttctttgttactaacatgtgagctagggatcattagacccacgtgacagtgacaaagttacatgactttaactgtagaggatcctgtccctatgatgagcgtgactcattttccaagattcgacaaaaaaaatatataaaaatttatagtccagtcaaataatgtggctattggtaggggacgtttacttatagttataaaatatttatctatttctagcagctatcatatcttaaaatggagctattttttcatatatatcctttaattttttcaattagtcacgactattatccatttaattttctcatatactttctcttctcgataaatcgcaatatttcttcaatcatttccatcaaccttcttaaaacccatgctcatcttaaaaatatctgataaaactagcaggatagtatttggctgcgccggttggtggcttaaaaaaaagaacaaatctatctatctattatatactaaaaatttattaaattgtttacaaacactcctgaaacgacacgtgtcttactataaacgctcctaaaccaccacgtggcgttttaataaatcctaaaattctgataaaaaagaaaaatatctaactgttgatttacattagatctaatttttttaaaaaaaaggactccaatttttaacccaatcaagaactgcatgatcgagagataattcaagactgcacttgatccacaaattaatgcaccaaaacaatcaaggactgcatgctcgagagattattcctccctccgtttcatatttcatagtgtacgaccctttgattttgtttcgttacctaaaaagtttaaccaaatttataaaaaaaatatagcaacatctacaacattaaattagtctgattatacgagatggggggagtagattattaaaccaacaaaattaaaattaaagattgtgcatgatccacataatactacatggataaattaatgtcagaatcaaaacaggaaacttaaaaattgaaacaccacatcagatttatttaattcactcttctcctctcccatttaattcgctattctattttctaactaacaacttaatataaaaaatcttagaaatcatgagaaaaaaaacacctaacgtttattcctaaaatggtgggcatgttattttaaccattaggatctgtttggcatagctctatatctttgatccattgtagatttgaaatttacatgttaaattatagttgtttaaaaaatttaagtttcatctaaaataggaacaaaatgatttattcgaatgctatcaatgtaatcgcggatataaataaatggatttgtgaaactagaaatacacggttttaataaatcttgtatccgaacctatggcaaaaacaaccaagatctatttttaaaaatagacaactcaaatggatgaccaattggatctatgtaaagaaaacaaactatcctcccctccccctgctgctttacatttatatgtttctccttccgcaccactctcccctcctctcctcctcccatttaattcacccctcctaattttgaactaatgacataataataaaataatctaatagttacatagctaaattatagttatatttgctttttaatttgtttgaactgttttacaaatggatagctaaataactcgagatttatattactcatataaaaaaaatcaaataagtcgtttcaacatatacccctattcttttgcatggaaaccaaataacattctaattttaatttttatatagttatataaattattgaaaatcttgaacatagcccctatcttttgcacctcaaccaaataacaataaagcattgaaaataatgatgataagttttatgtcatcttaaattattctacgtaataaagaaccattaaacatcctctataatgctcttaagtctccatgtgtcattgttttaaaactagaaaaaaaacttagaaattcaaattaaaaaagtaaaacatttgatcattggtttgtgcaggcaattagagattagtaatttgagagaccaattgctcagcatgtgtggaaggactttcaactccaagtatggatcagtcttccaattctaaccatataagtgatgctaaagaccatatatataagtcttgcaattttattattcccaaccactaaatctaccttttggaaaaccataagcacccacattgccccttcttaaaagttaggaaacatattagaaatccgaggagaaaaaaaatatgatcatcggtttcacttaaattatttagaaaaaattctagggtctttctacaaatttatggaatgcaacataattatcgcaactggattggcattgtaggcttcacataaagattatataatataaatgtacttaattcatgccaagtgtaggctggattaaaaagaaatacatagttacatgatttctagcattaaaatataaattttatagaaaaatattaaaattatggaagcaatcataatacatcacattgcaaaaatagtgatgtttgtgcagctatatttattcgtctgatcatgttaatactagctaggatgcattgagcctcgcacactccacattaaacatttccaatagatcgtctcccacacttccccaatcgcattggactctacaaatgcatacatttagtgtagcctcatatcccacacaatccatctgttaattaacaataggaacctatatcagtcttaacttggtgattatttttcaaagttgacttaaaataagattagtataaaataaacaaaaaatagaaaaaaaaatgtcaatagggactaaattgaaccaattggagaaaattttatagttttttggctcttaattctcatctacattgaaacacccatttgccataaccattgcattatttttaagtagttatatattaatggccttctctgtatcatatgccatgcatcatgaattttttcacatattattgcatatataagccacactaaggtagtagtacataattgatttaaaaattatatttaagttgactaggtatttttttttatatttaagttttaaaactaatgttgactaggttttttttaaaaaagaaacaccataggtcaccaatatcatagggaagtgagttctatgatatatattttttccctgtctttattgttcatatctaagtatttaacaaatcacatcaatgtgaaccaaataaaaggagggctagcctgatggtaaaaatagaatgcatttgagaggccgtaaacactaaagtaaaaaaagaaaaaaaatcttacttttaagtgttaaatttgtttcctaaaaaactaagtctacctttctttttctttttagatgataagaatattatagaaaattatttatagggatgtattaaatattgcatagtataaaagttaacaaaattacctaggcaattctgacaaagaaaatttacggagaaatcacactttgcagatgcaacctatgacacattgcagatgcaacctatgacacatgcaatgcgcgggctacttttttagttattaattaaagtgtaaattttatattgaaccgtctctttttatcatgttgtaatttggactaggattaacttacccttttcactctgaatcagatttttgctaaacgtttcaccttatacccgttcttgtcatctctgtactcctttcctttaggcatgcaaatctgagcttgtagttgccgccatgaacagggccaaacaagctcaagctggctcctcgccgatagcaaaaaatgagaaagaggtgaagaggtcaccatgctctgcttgcttgcttgctgccgggtaagaacaagaggacatcctgccctgagctcgagctccagcactttccacgtctaaagatcgagctccaattcatctgcgaactcaaccactgtgctgcacaggctcatccaccttcaccacttcatcccaaatccagcgcgctcaacctcatcatcgtttggtggagtggggaagaagaggatggatctttcttcggcatggtgagaagaggggactgccgtggggattaacaaggctggtgagtgacatgcaccacacgggctcagggaataccgaggaggaggaagaaaatcttgctcacttacatgtgagtcaccagtccaatatgcaagtttgggtaatactaaaacatagtgtaaatgaaaagaaatgatattacctagtgcaatatgtaacttagttaataaaaaggggtccaaagtacagtttactctcaattaaatattagctattgtaaatattgaaaatggatttattttttttaaaaaaactattgtacatattaaaaatattgtaaatatttacaatatgtgtttgtaatgtcatattttcaaatagacaaatttataatggctggatccaattaaccctacttagtactaatcctatacccaaatcaagtttcaccataatgtcatccaaaagaaaacaaattaactaattctccatcaatcgcattaattttagatgtatgtgttggcgacgtcggcgaggtgcccagccagctcctccggcgcggagagcatggccatgtggtcgccggcgtccatcaccctcacctccgccacctcggcgttggcgaccatccaccgctggtgctcctggacgatggccatgtcattctcgaccaccacatacacctttctcacggcgccgtacctgtcctccctgaacgccgcccgccgccgcagctcatccacgtacaaggagctcgctcgaaccaagctcttcgcaagcgtgtaatcctgtgctgattaggttatgaactgattagatcatggttaatttaatcaggagttgtgcgattagtgattaattaacagtttagcagacgcacttccggtgagcttagctggtagagcttcttcttcaggaactccggcccgaacaggatggaaggtgggacgtggcttggatcgatcacggtgtccatccaatctgattcttgatactggcagtggcagaaattcatggcgaaaataagaggaaaagaaagcgtaattttgtcatcatggtatgagtttattaccgtgtcgatggggtgggagggtgggttggcgcagtccggcaggaaggcggcgacgaacacggcggcggcgaccttgtccgggaacgtctccgcggcgagcgcgacgctcatgccgccgaagctgtggcccaccagcacggcgcgctcgccgtcggggagcgcgcggacggcgtcgagcagcgggcgcgcgtggtccgcgaacgacgacgccggcgcgccgcccacgcccaggcctcgctgaccggccgcgccgaggtccggcgcgtccacgcggtgccccgcggcgcggagcagcgcggcgaccttgtaccagcaccacccgccgtggcacgcgccgtgcgccaggatgatgcgccccgccgcgccggcggccggaagaggagccattgctttcaagaggaacagacaattacgagcagaggtcactaactcactatagtgaatcgattgaatgattgagcctagtgcatcatgaatagcggaagcagccagtgttgacaattatttgccttttgaggaaagatggctttgagcttagggtttagggagagcaggagtaacatggcaataccaccgaggtcctcgcgttggcgattgccggaggggatcaccattcaccaaccggtgtcccatggggtttacccatgcggatatcctcacggaagtggcacgcggcccaaaagcaaaggctcgtggcgcgaagctgcagcccgtgaaggaagtttcgacagaggaatggcccgagatcggcatcaatggcgacacaagaccactagctacagtgcccacccacagtgagatcgaagccccaagcggagcaaccgagggaaagtcatgacaaaactaaggtgaggattggattggaggatattttccccaatatctctcccattgtttcgcaagagtagatctaggtaaggcgaggtgagacccaaccacacctagggttcctggcgagaggtgatgagatatggcgatttggtgacacagcgcgccggatttggaaggtcctggagaggaagtgcgaccaccgttttcgtttgcccaagtggtgatggagcgccaactggcaaatcggtcggattggcaagtcaacaaacattgtacggtggagcacggtggaggttgggagggggggacaggatgcaagggaagaggaggagctccggcggcaactgcttgcccaaaaccccagggcaaaccaaggcgccatctaggggtggaggcagagcgaggggcgggagctcctaagatcaaattcttcaagtgtaccgcgaaggtcacaaccaggcaacttgtctaaatctctttctctgttattcacgtcgcaacactagcacatctctatacactgcccaatgaatttgatgaaaagaggtatcaaactatgtggatttggaatcctagggcaaggtttctatagcctgcaagttgatatgttagaaacagagttagctagggctctagtaagaggaattttgacagtaatccatggggagacagttgtgggaaggtggttattgaattgaaacacctgtttgtggggtagaattgggagtggaaagtgaaacaacttaatgagaaagaatttctcattaatttttcttctgataaggtgagagtaagatctcaacatgtaaaagctttgactttgagacatctatgatcaaggcaattgtggttgagacaaggataacataagaggcagaagatgaaccggtagttttatgggtgaaaatttatggtgtacccaaactagccagaatagaagattcagttaaagcaattataaaattggttggggaatttgaggctattgagggagctagcttgaggaaagataagcctgtgtgagactgagagttgtatgtaaggaccctagagaattacacttctccatacacatctacatcaacaaggtgggctacatgatcatatgataaccagatggctatccaccatatgaaaataggcaaaatccccttgatgatggagattgtaaggatgacaaggacaatgagggtcaggaagaagatatgaacatggatgatgagttcaaaaccaaaaatagtccaagagggagacaaactcagaggtgaagggagccaacaagggagcagatttggaacatattatgcacctcctacttacatagggaaaacacagatgactcatagtgggaaaaccctgaagaaattggcatcaaagaaagattcattgctgaagaaagtagaaaagacagaatgttgtactactatggtgctctgggggaagaaggaggaaaatctagtcatagaacaagagtctcaggagatggtgacaccggtcgagatgcaatctcaagatgagggaggtgaaatgacaaatgagaagctattaatgcatgaatgttccccaactgatgatgattttgagagatgtcagattcccactgattctgacattgaaagacttagagaggaagaagataatgaagaggacaatttccaagaggtgtctaacaaaaagaagaacagggctaagaaaacagaacttgcagtgacttcaaggatgaatctaagacaaagggagatggctgctaacccaataaccaaaagaactaagatactcacctagaagaagaacttggagcattaagctacaacaactaattaatccatttgctatatttcagttgttagattcgattgagttgaataatattactattgcctctaacttaaacttaggtagtacctctaaagagagaaaataatatagagactctaaaagcaaggaaattgttcaggctagactaggaaagctaaactggaaaaaagagatttaaaagacaaagacacaagaggaggtggtggagtcagagacagaagggtgagatgataacaagcaagaggaagaaaaagaggagataattatatgagaaatattgtaaaattgcatttttagatcagttatgctgatttaatgtatcacaataggagaaaaacaccttggtaggtctccgctgctgacatggttgttgtcagggttatggataccacataactaatagtagttgactaaatctcagcaggacccaccacataccatgtcctatacggaaacaacctgcggatataggaggagttccagataaggaaagacaaccagagttctatatggaaacgacaaagactactcggattgtatccatattggtttccctaattctacttgaacaaggggacacctatgggtataaatacaaggccccctaggaggagaggggagacgacgatacacacccacaatcaacagacacgggtaacatagacgtcacaaagctgtgagccaatacaagccaacatacgccaagacaagacgccggatatcgacttcagggattggcacggctagtcccctacggtgtctccggatactatcaggagagacgaaagcgctatctctgatctcgccgggcacgaactcgaggaggaagactaccctgttgtcgactacgagtcagatcttcagaccgccatgtcgacaacagttagataggctaccccaaacattgtactggtgtgattatggtgaataagagcaataccggctttggccaacaggatgtagggttattacctggcaattcaggggcccgaacctgtataaaaacccctgtctccgtctcttttacctcagtctcgcgtatatcctagtaccaacgatccccatactatgcaaataccggaatcgcgacatcaaacgtcgatagttgtcaatggtggtaaaaatttaataagtagtcccctctgaaactcatcatggtaacatatttgcatttagctcctctgctgtttatctctaacctaactcctctctactccatttattatcctctttggactcagagaagggaaagtggtagcgacataagagcatctctaacagcctctccattatactttccaagccaaaatttagccattcatgccaaaaaaaaacatgctccaacagcctctccaatccactagccaaatttggcaagccaaaagccactagccaaccatgggcccctcgcacattcctcctcccatctcctctccggctcctctctcgctaacgtcctgccatcaacgacgccacaaaggagagaggcgtcgtcgccagccgcgaccaccaccgtcctccacgaccgccgttgtcccccgcgccgtcggccgccgccatcctccgtgaccgccgctgtcctccgcgccgtccttcgtgaccgtcgccctcctgacgtcgcccaccgtgacctctgccacgaccaccgccgtccgaggtagagggcgtggggaggaggcagcagtacatgaggaagaagagagatgtatgggtggggaaaaatgtggtggaagagaaggaagaaggttagcagagactgacatgggtcccatttgtcatagacttataatggagatggtagatggagaggctgttggagcgagtaactagtttgactagctaaatcagatggagagttggttatatgggtgtttggagagtttgatatggagatgttgttggagatactctaaaagtacggtgagggtaggatgatgtgaagtacagtgagagtaaggtgtgtaggaaaaaaagagaggtgtgggtcatgtggcatcttttcgtcatcatcgccatggcaagtagatcgtcttttttttttttacttaatttcagttatgtttttcctacgtgggtattctctcttatatgttatgcaagtatgtttctatctcgtatcttctcttccaagcatgtatttcctccttcatattataagactttctagcattgcccacattcatatatatatatattaataaatctagatgtatatgtgtgcctagattcattaatatctatataaatgtgggaatgctagaaaatcttataacatgaaaggaaggtagtagtaaattactttcaatcctaattcatttgtacattgtgtgttagaaaaattacaatgcaaatattgttttatagcgtaagttttgaaatttactgtctaactataacactatacaacggcaggtaatttagagtctaaaacaatttgattattcttttagaaaaacatggatctataaatatatttataaaataatcatataataatgtattaggataggaggagaaaatgtactattctgttaagttgattgagaatggtaaattccatttccttctggtgagataatcccaaatttctactctgaaccccaaacgcagaagccggcgaggcggcgagccggagaaggatgaatccgccggagctgatggacgacctcgtcgacgagatcctcctccgcctcccccccgacgagcccgcctgcctcgcccgcgcctccgccgtctgcaagcgctggcgccgcctcctctccgaccgggccttcctcctccgccgccgacgccgcgcgccgcctcccctgctgggtttcctccacaacctcgacaacgccgaccaccccgaccgcttcgtccccaccaccgccctcccgatccccccgccgccacccgagctccactgcgggatggccctcgactgccgccatggctgcgccctcctcgacgcctacccctccaggatcgacctcgtcgtgtggcaccccatgacgggccacctgctgcggcggcttccccgccccgacgtcccgtacctcttgtactacaacgccgcggtgctctgcgccgccgccgccgccggctgcgaccacctcgactgccacgagggccccttccgcgtcgtcgtggtgggcaccgaggaggacaacgaggcgtgggcgaccgtgtactcgtcggagtccgacgagtggagcccaccgacctccgctcgcctcgcccgaggacccgagttctgcgtcgagggcaagcccgccaccctcatcggagattcgctctacttcgccctcgtgtttggtatcggagtcgtcaagttcgacatgaagcgccatcgcctctccctcatcgatccgccggctgagctcgacgatggcttcgtgctcatgccgctggacaacgatggcgtgcttgggctcgcggccgtggaggatcacagcctcctctctgtgtggtcaatggatgtgagcctggatcatggacatggtgtggcaaattgggagaagtgcagggtcattgagctagacagtctgctaccaaatcttgatcactctaccccagtgctaccaattggatttgtggagggtgccaatatcatcttcctgagaacagatgcgggtgtcttcacacttgagctcagatcaatgcgtgtcaccaaggtgtgcaagaatgggttcttctacgctgtcgtgccgtacacgagcttctacattcctggtgtccatctccagcagcagcacagcggacctcagatcagtaatggccgggcatggggatcgcaggctgctaacatgaggcgtggcagcagtgagcagccgagagagcgtgctccactgcatcagcagcgacgggcaggacggccggtgaacagccaacgtcctactggtgatatggtccgttcttcaggccgtgctagcagattggcatctcaagtgcggcctccatggagaccctaatgattcgcaaggtggcaatagctgacaataatgtttaatctatcgtgcaatttacaggtggtatattgctaatcgtcggttttagtcatttgtgcgatcaagaagaatatcttatggttttgaatgcattgtcagtacagaatatctaaacatggaaagagcagattaactgagaggagtgagagctctatctcgtatccgctaactgaatttccagttataacatccaatttgtttatgggctttcccattgtcatactgcaagtctggtgaatgtttatttcaagcattgcacacacttttctttcttgactaaaaatattacattctccttatgaatcgtgctgctcgaaagggctctgaattgatccaaaaaaacgcaggttttttatggatggttgtatggaaccatgcatttaaatatgcagaatatgacaggctgaaactaacttagggaatccagtccatgtagactactgcagccaataacctaataatatttttaatttctttatcatgtatctcttggtgccttttctctcttaagttaggcatgggtgtactcttatgtccttctgtcttctcttttatacattgttatcctttttactttttttttatataaacacaaagtatatgcgcatagttcagttggactggaaaggctaactcaaaatcacttcactatgtttctgatatcaggtccacctcatcagtttacacttgaacaaaatactacttctagttctacgattgaacaaagatttagtttacacttgctgtctcatttcttctttttttctaaaattctggcaggggaattgccttttcaattagatagggataatattgagtaaaatacagttaatcttatgcaggattgttcagtgctcacccatgttttagtcgatcattactcgtaccgggtatataaattaacatatagggagtacaacaaaagtactgctaaggagataaaagattggcataatatgtccaagtatttaggctgaagttccttgtgtttttgttcctaatatgatctgctgcacagttcgtgtttctgctattaggtatcacataggagtcgtgtttccttcttggtttggctaattggcaatgaagttgactcctgaagctgcatttcgtgcaacaatgggtaccattcaggactctgatatcatcattgtggtgtttcacaacatgaagccagaagattgcttgctctctagcatcctctgttttgttcaggcttctcaaggtaaatgaaaactagttctattctgagccttacaaattaggcacatttaactcctaggcaagaacatggacagatgtttgaaaaagaaacattatttaagcattatgtttttaaaagaaaaaacttcttctgttccttacgaactgtacatttatatcaacatggaaggaaatgaacagaatgttttcatcttgataaaaggagatgccagaaaacaaaacaggagttttcagtctcaattcatagaaatggtgggttttcttaggcgtttcttttggttgtcctaatcttcttttttgttacgctgcttgaaacctcggcagttgtcacttcattatcggatcatggtgaaaaacattctagttttaagatgaaatagagaagtagagttgcagacataaacatgatctgctcttacatcatcaccctgttaggacttaggagagcatagatttgtaccgcaaatactatcttattgagagctgcatagatggaacaaatgtgctcatgtacactgggtataggattgggcacaaatatatatggatatccttattgcatccttatcctataaggattagtaacaccttgacatgcattccgtgcaacttccaatgcatcccttcaggaaactctgatgatcatgatgatctgtcttgctggcacatgaagagctaccctcccaagtgacttgacagccaaggtacattgcttgctgtcctccatgttttgttcaggagacatcttgatctgaaatttttcccatgcatcagatgcacattatggagctggaaatcttattactaatagtcttgctcatttgaaggacaaaaacctccatgttctcatatgaagataactgactggacatagttaagaattgtgcagagtacaggtggttagcttaaattaagtactattgcactacagtacagctctgctctccaagagtaaaaacactctgttccaaaaggttagtatatagtttaataccaatgaaagggattggtgtgcatcctgtcaggactacatgctattatttgatgacttgttcagacacatgcgggcatacttaagcattccaagagtccgacaaattagctactctgtcacaccagatgctggaaatcatgacaaatatatggtagtccacatagagagatacggcagtaccagaagctatacatacgtattgattttttttaagtcatcttctatcattttcttcaaaattaaagatcaatgttctatattaaatgatcacatgtctttgtattagctagaacaagattatgctagcttacccatcatgcggcctgaacactcatggaaccggttggtacatccagcaaggctccattgctgtttgcatggcctatcatgcgaaggattattgtgaatacgacttacaatcaagtgcaaaaacatgctatttttttacaaaggcaaacatacctgcaggttgtcttgcaacgaaaaaacatgcgccgatgacaatgtagcacaggaggaggagaatccccttcaggtaatgtgatgttccatcctgtaaatcaagcccattaattagttgacacattgaattgcaacatgtcacttaagatgttatcctgttatctgagtaattttcggtgactaaattccatttccacctgttcaaagtaaaaatgcatgagtcacagtgtacctgcagggtgaaggccgtcaccagcaccgccatgaacagagagccggtctctagcagcttgaagtcaagatccatttggacccccatgatccaggccacgagcacactcagtggcacctgcaaccccatcatgatttggcaatccgttcaaccggatgagagcagaacaactacaggatctgtactgggtaagttaagcagcagcactcaccacgaacatggatatctgggtggccgatcccagagctaccccaagagtgatgtcctgaatcaaacaccagattatgttacattaattagcaagttaaacattgattttgttttcaggagagacgactctgatcgtttgcatgggatgcacattgtttgtttgaattaccagcttgttcttgagcgcgaagatgatggcgccggcgtgctcggcggcgttgccgacgatggggaggaggatgatgctgatgaagctgacggagaggccccatgactgcgaggtgggctcgatggtgccgacgacgtactcggagaggacggagatgacggcggtcatgagggcgagccagaagagcgcgctggcgaacccgagcgccggctcctcgtcgtcgtccccggcgtcgccgccgtccacctcctgcggctcgaacagctggcggtgcgtcttgagctggaagaagaggtaggcgacgtaggacgccagcatgacgaagctgcaggcgcgggagaggtcgagggacgccgcggccgaggtggcggagacggagtgctcgccagcggcgacggcgtagcggaggaggagcggggcggagtggcagaggacggcgaggaagaggagggcggtgctgacgtcggactggttgcggtcgtagggctggcgggcgccgaggttgacgacgccgccgcagaagagggaggtgccgaggacgaggaggaggttggagaggacggagcccagcagggagcacttgaccacctcgatcttccccttgagcagcgcgaacagcgcgatgatcagctccgtcgcgttcccgcacgtcgcgttcagcagcccgcccactgccccccatgcatacaccatcatcaacacaccacaacagcaagttcaattacttcatatacaatgcttaggctgtgtttggtagctcatttttttcttctccgtgctcatttttttcaaactgaaaaaattttgaaaaaaattgatttaagaaatcgtattaatccatcttttaagtttgttttagttaatatttaattaatcaagagctaatagatccatccgttttgcatgtggacaaatgtagcattaattatttttggtttctctagcaaaatatgagacatttttctctgatcttttataattttaaaaaaacatttgctacaacgaatagagaaacaagtgccattttttgatgttaagaaagatgattccatccacgaataatatgaagtcttaaattactttcagtttgggactgatcgttgtgacttaccggtgggaccggtgtagagtgcaatctgcctgcaaaatttcagtagcaaaatgcaaaatttcagcattcgaattataaacagaatttttaaaaactggacataaaaattgcttctgtaacgagtagcttactctgtgaggaagctgactctctcggcgagagggatgaggcccagtaaactaagagcgaacacccacacctgtcaagataaatatttgtttcccaatgtcaacacatattggattaatgtgcaatagtagttaaaagtataagatgaagacatatcgacaaaaaaaaagggaaagtactgtaaggtaacgcattattttattttatcactaatttactagcactggatcagcaaaaatacctgcatcacaattaaataattagatgccacgtggaaggaataaaacatgtctcttccaactaatcaggaataaaacatgtctcttccaactaatcaggaaatgtgacagactgttggcctcaaccactaaaatccaacacttccaacctttactggaagcagcttcactcatcatccatgcatgatgcatgcagcagagtgtgaacttatctccaaaccaaactaaatctgttttcctttcgaaactaaaaatcaagctaaatctattagcacaacacacaatcaaaccccctgattcaccaagctccaaaacacaacggagattgatcactttctggggtagaagtacactcaaccaagaggcaaagaattaaatgggttggattcgtcatcgtcccagccgcttgtaccggcagaatcctgtcgtctactcagcaagcagcaaaacggcatgacgccgctaatttggcggatcaaagaggaatcgagtgcaatttgcaagatgacaaattaagttcagtttttgctgcaaggagacagatgggttttcttcaaagctcagggctccacggcagaatatttgtgtcccgacgaggcaaactaactggcaaagctaataggctccaccagcaagcaatacaaactactccacaaaatatgttttgcgggggaatattctactatcacagaggagggaggaaatcacaagctaacagttcataacagaaaattaaaatactgaataatgaagtgctccacattttaactcctaggcctgtatttcaggttacatctgggccatctggcagacatggatgcttattgcgtcatcaagcctaggaattttgtggaaattgaactgatgtatgagaaatttctgtaatttattgacttctttaaaagaggccataaatgtatgtactaagggtgtgtttagataatgagaaatgtgaggtgggattgagatttggaaatgaacgaagggttaggattaaatgaaagagcgaaaatgaatggttatgatttaaagatgtattctagtgagtgggaaataatttccatgtcctattagcctaacagcgcctaattttcaagtggaatcaggaagtccaccggaacgtccatggccagtttaacactagtactagtggtacaagacaacattttttgtatgtatactttttaacactgttactagtaccactttagacattgatggctaattctactacagttacgaaaattaatcctacaccataaataaaagtgtcaaagagagagagagagagaaaagaaacaggagtgcaaggacacagccctcgtgcagccgtgcagttgcccatgtggccttaccagcaaaaagctacagtactatatctcggtttatactagttaaaaaaaaacttaaaataggcgccgcagcggcctgccacctggtcaccgccgcttgcaaacgccgaactcgaaaaaaaaaagatgaaaaaaaaaaagatgcaacgaacaccaagcagacaagaggatggtcaaagcgaacatggaatggaatggaatggggaattgaattaacctggtcgaagcggaagcactgggcggcgatggcgagcgggacggcggggaagaggacggcgagcttggtggcgaggaagacctcctggaggttggcgagcagcgggcggagcggcgccacggggaccttccgcaccagcgcggcgtccgacttcttccgcagcgacgacgacgacatgttgtgcgccgtcctgctccgcccgtgcgggtgccgcgccgccagcttccgccccgcctccatcgccgccgccgcctccatcaccactagatcaaattcgatccccccctatgcgcgcagcgcgccgccagaattgcgagagatagataggcagatggatggatgtgagaatcgattgatggcgccgtgcgcgcgcgcgacgcgagagtcgagtcgcgagagctcgccgccacgaggaggttctcgtgatggtgtgtagttttgtacaggacgaggagaagcggcagcagtggcgagctcatatatagggaggagccgaggaggagaaacaaaaccacaaatgcaattatgcggtttcgtcgtgagcgaattattggatcatcaatgtaatgcaatccttcgcatcatcaaacaccagcaaattattttttttatataaaaaaaaggaacaaacacgtactaccgatctaccatacatattttacggattcagttcattaattcattcgagggtatatatgtttagtttccgcttaatctcgatatttatcgcatgtataaatgaacaatactactccagcagcagaaagagacaaaagatgagatgggtggatggatatatagagataggcaatgcactggcagagtcgcagagggagggagggagggggaaaatgggaaaacgaaacggaaggctgcagacgcagacgtacggacggggcggggggtgattgatccgtggcggtttgattgcgtggggacggcgacgtgggtggggggggggggggg

SEQ ID NO: 8198 - DNA, 54439 bp, Oryza sativa
atcagagtataatctattcgaatagccgcgccctcggttatgggcaagccgagcaatgtacccaagtcagtgttttaattcttaaaatttgcttaacaactaaaatgtggaatggttggcctgggttggcttgggacgagctgggacccagggtcgggttgccagttcggtctgaatcatcgtaggccttgggttaaggcaggttcgtgagggttcacggccttgattaataatattgtatagctctaggatcgtgtttacaaaatagctttgggcaactaagtgacttttaaatgctgtttactgcaaaacttaacccctattattatccccttgtacccccttgcattaattatgcatctctggtgtggcttgctgagtactgtggttgtactcattcttgctctatctttctccccccttcagtaagagaacctttggagaagaagtcttaggtggagtcttggcttataccccagttgagcgcctgtgaagatggagccgtaggcccgctagtccgctgctgtttatttttgattgccaggcctgaaatgcctttgtaataatgtaaatattatcgatataataaagatgtgtcttttatatcatgtttgtgtggtgtaccccggcttttcctgggacggggattaatacactagcgttcgggaaaaggcaattttcccggtcgcgacatttttgttcgagtttcttctcaaactttgtgattatgggtttgaggctttatatagcagcaatagcatatcgccaaaggtagatttaatgtatgacaagtagggccttggccccagtaaaatcctatcttactataaagttatcccccactaactccttgagcttgacatgcaaagatgccacatcatcatccactaacaagatgccacatcatcatccactaattaacaagatgtcacatcatcatccactaacaatcatcacatttaaacattatgcaaacatgctatatctttagagtttttataatttaagagcttttcaaatacaaacatgttaaattatcatccaacataattcacataatgtttcaatgtacatctttattatgttttatgatatcctatatacttttatagttcatcctcacttagttagtacttaaatgattaatctatggtccaaattatctttctcctttttttcatctaattaattcatatcacatcacctgtttttagcctttagatgattaatctacagtccaaactatctccctacttttcttcttccataaagtcataccagcttactttttatgtttgaatcaccattctacatactatttaaatttaaattatcataaaccacattaatttatttaatctgatgttatctagctatcttacacgttatttttttattattatcatactaaattcccgcagcaatgcgcggggtttcacctagttttactttgtattgtacccccacgtgtgtccatcatatacttactccggtttagctaacacatcacccccactcctcgggtacttttcttttcttcgcgagcttcgtccttcacgtcggtgattcagcactgcgcatccactctaatcttctctccaattgaaatgggaattagttaaccaaattaagagaggtgaaattataccctacctaaatttgaggatctcaattcccaaatcctcatagcaaacaaagtgaaaagtaaaaggatattcatgtcgcctagagatagggtgaatatgcattcctaaaagcactcgcaactgaatatacactcccgtcagagtatctgaccacaaacactagatactccgatcaacatgttctgattgacaaatttggtcaactggatagtctggctaagtaccagatattccgatcccctaacaacacctcctaaggagcttgtgtcgagaacaatctcacacaatgatttgtgaaggttttccctcaacaccacaagggaagaggtaattgagtgtaaactgagctagattgttacatcttggtggttgcttagaggctaaagtttcttgttggtttgctagcttggtgagatctacaatcgaaagagatctggcttggctccttggagtgttctaccacaagcgatgacaaatcagagatttaggaacccaatgagaaacatactaattaatgtcttatgtactgatgtttgtgatgcagaagtattatcgttctaccctcatagatttcttttttgctatataaatatgatcagaaatttgaatgccgatagcatgtatcattatactctttcataccagaagaaaccagatcttctaatttttatgtacttcaatttagaacttgtttggcaagactccaactctagctctacctcttctagaactggagcccaactaaaaaaagagagtggactggactagaatgatctgaaaaagaactagagaggtggagcaaggtctgggacgttccacaactcaactccaaactccgctccaagagttagattgaggagttagagctctcccaaacatgtccttaattggtctatcagatatattcagaattagggaggtatgaaaaaagaggttacgattttgcaacttccatttgaattttttttaaatctttacattctttaatcctttcattttaggtactgttcctgcttgatgggaggatttagattgaaacatgtgtaaactccctctattttcttaatagatggcattgttgactttaacatgatatttgaccatttgtcttattaaaataatatgtctcatttttttcttttataacttgttttctcatttaaaaaaactttaagtatggcttatattttttaaatttataatatgtttttaattaagacgaatggtcaaacattataccgatagtccattgcgtcatctatttaaaacggaggtggtaacatgaaccaacctaccagcccttattatgctatttctagctcttttaacagcatttaggatagctacatgcagttctattcatatgctataagatctatgcaaaaatattttccttccaggtcattcatgttttggctaggtttgggtatccgtgaagcactggttgttttctatttctatgtttgaaagcactatttaacggatctcctaagatttgttttgacaaaaaaaacaacaagagggcaaactttacaagagagattacataatttgaatttacaagaagtttatgctaaagtgtgtgtccatattgccaaatgggtatgtgttccttctttaccatgaacatatgcagggtaaaataattcctgaagttggtcttccataggttccatgaaggatttacatagttaaaatttttattatccatatgttccaagtgacgatgacatgacttcaataaaaagggctttccaaactaatttgctgcaagtacaatcatattaataaagttcatatgcaaagtcacaggtgaaaaaaagatgcatcacatcctccagggcagcactatacattgcataatacacactctggtcctccttggacgttgtattgtcttcttttcaacatatctctagtgtttaatctatccattaaaagaatatagagaaatacctttagattcattgtacattttcttttccatatcaattttatcggcagaggtggttgcaagtgttcataaaaaagattgtaaacttttttggtgctatactgaccagtgaccagtactccatatattgtgttctgagattattgtatcttgaattgtactttccatttattgaagctgttgtaaagactaaactgataaaggaagagtgaaattgtcgtctatgtttgcacttagaaaaaaaatcccttgttgattgatcttcatttctaacaaaaccaaaagatcagggaatttttcttccaacatatgaccattcctgttgtctttctagcaaactattgtatccctattccgaatgttattttcgatatagctctatagagtggcaataatcagaagatgtctttccgccaaaggaacctttttcagagcaagcatgcggaggttgctgagattggtagttttctgtccaaactaacttgacccagcgaagatctcttctattataaagtttatccagttatttcatgagcagcgctatattatggtgttccaaattaatgattcttaacttcccttttgtttaggttttttaccctatcctaagctgccaaagaaccactccctccgtcctaaaaataaaccaatctaagatgtgatatgatattacatagtacaattaatctggacatgctatcctagattcatttatttttgaatggagggaatagacttgagttgcataccattttctcggtaaacaacacctccttgctctgtctttatgttacatgatttttttggaaccttcaatgtacacatgtggtaggttggtaatgatgaaaaaaatagaattaccactgttaactttgaccatgtgataaataaatttctatggaagatagcctcctgtcagttctatctataagtggaccacagtcaacaactctggactttgttgtgcaacccagaattcctgctatatgatttattgaaattaattttaaggcctgttgactggacatgagtatgaagaagggacttaagaagaaaaaaaagcttatttttaatatacttttgttataataatagtatcatctacacattgaataactggaaaataaccatcttctcctaagattgttgtgcaggttcaatggtcaatgtacttctttccgaagcttctattcttttgagcgctaatggtgtagagtaatagcggttgaggtaggggagtttccccgtaggatctgatgtcaaggtctctgcacatcacccgtgagccatctctgtgcttccttgaggttgccactgccacggacgaaggcagaaaaatctcaagcctagggctggtctgattggacttaagtattttcacaaatcgtgtggtattttcacatgatttgcatggaatttcagagctaggtctagggctcaatctttaagcccacccccagaattttaaattaagttgtgtattcaaaataaaaaatgggtcaaaagtatgatatttggcatgtataatattacatagtattgatggtataatacatagcatacgtattatgtgttggatacaacctcttgggttaaatacaacaactcattttttatacgcacgcatcacatattatatatatatatatatatatatattgtaattaaaaatatgggtattcatcctaatacccttgaattgtgttggggcctcccccgagcagcagaggccaaggaggtgagggatgtctgtcgcattatttgtgtttatatgctctcggctcacaatgttctcttacatgggccttatccaatgacatgggcagccttcaactgatctgagttacaccctcacagagaagcactaactgatatttgtgatggcaatgacatccacctccctcaactgcctttcacatcgcaaagatgtcctcacaacacaactttaaagcaaaactggcaacaaagaacaacaatgacccgaattgtttgaatattcttttgcactatatttgaaaaaaattaggtactaaatatatttattgtaatttttgttttcctgttgtaacgcacagacattgtgctagtaataaataattcttggtaaattatatgatatatagatggtacagattgtaatatctttgaatacattcagagatatgccaaattatgtgacgcgtggaatggatggtacagattgtttcgacaagatgtgttttattaatgatttattcaaagatatatgacttgtttattgatttgcctggctagattaagccaaattctgatgatgtttttctgatggcgaactcaaacggcgtgtctgaagtggtcttgagaaatgaaagtgacgttttcctggggcagccgtccacttttaccctttactgtgtgatgctacaatggcagaagcgttggcatgtccttgagctatgcagttagcatctgaattgggtgtttcaaaatcaatccttgagaccaaacagtctggaggttcagaagatggtagctgatgagaaagtcagcagatcaatatatgtagtaataatccaagatttgaagcaacggctaagtttgcttcatgatttcaggatcaaatggatttgtcggtcagccaatatggcgtcccattttttagcaaagaaatagtgtgctacgaatttacttcgacctatttctctgtctcaccagagtgtttaaggtcccagattgttaaaaactgtaatcaaaccggttccgctgaaaggaaaaaaaaaaagaaacctaagctgtgatgatgcatgaacatcacttagagttagatttgaaatctatttgctgtttgattcactaaatctttttaaataaatatcaaaccttaaagagtaacgtaattgatttgatattaattttggcacagattttgtgaattgcggccatgaatttcagacctgaggctaaaatccatcaaatcctccaaaacatcatttcacaatatactgatgcacacatggcacatcaccagtagtttcagtgctactttaattgcaacatgtataggcgtctctatgatgaacaagatataaagttgcagacccatttttttcattgtcaactatgatgtctgttaagtcaggtattctccgaaaacttgagataaaaacgacatagatatgcttcgtatacatacacatgattgcatattgatcaatcccctatggaacttgatgaattacatatccatttaagtagctaccgtttgaggcgcctcaacactatcaggaaagtatcaaggcagagtgtgtagtcatcgaaggcacttattccacaaaatttaccacgagtcaaaactaatttgtcccctccaatttgaagcctatcaaaggagcaagcgttggaaacctttacaccatggccaaagttcttgtgtgcctgccaatgtacaacaagtgtcaaaaggatttaacacaatcaattaatggccaataatgttgcgagattagttaaaaggcacagtagtatatttatatatactgtaccatataataaaactatgcgaaaactataaagtattccccacctccccacttttttccaatctgtaaggatattcaagaaacagaacaaaattagtgatagtttccggatggcttaagtggataacatagtaattagcaattaccattttattcacttcaatttccatttccatttaccaccttattaacaccacgtgcgatgcatgtacatgcttaagactgactagtgagtgtcaactatggtcattgccaccaaattattgggacataacagtaaacaatggttcaaaaagagcatgagctgaagggaagatctaagtcagatggtaacaattgatgagtttagaacagatgaagcatgaggaatcctgctttgtttggcctatttgatgcatatccaactgacaacgggtaaggatcagggtagagcaatgttgagcacttttgttctacatctgtacaaactatgaatgaattcaacatacatcaactgccctcatcactatataccatcaaaatacgagcgcatttctctatgaaaattctgtactacagcttaagttcatgatcaaacatcaaatattcaagcatgaaacaatcaacatccgcataaagaaaagaaaataacaaatagcaataagtatggactaagaaaatggagtacatgggaatcaatgataactaatttcaagctgtaatgttgcaagatgctttcaaactaaattaaacttacaaacgatatgcccactattttagcatcggagttgctcatttgttgtgcaatttgataggcacaagataaactgcctgatagaactcctctgataaccccattctaggtctaggagtgccaaagaaccatatagatcttcatattacatagctaagatcaaccaagtggaaagtgcacaacagtaaacatcatattacgtagttactgacaaccaatgaaccagaacctgtcagcccataccttagaatgtatgaacaatttttcatatttcaaactactgtactctagaatttcattaatctgataggaaatgaagagggtggcattcagtcaagtctcgtgatgttaagtggaaaaaaattgctagatactacagcataccattgtgatttccagcatgactaaccaagaggtcaaaagttcccttgagaaaatacaattccttagttcactaattaaactcgacagagagttaaatgcgggtacaagaagtgaacaagatagaaaacaaccttcctacaaattgagttatttaggttctcttaagacaatggcaccaatagcaaccactggagcaatttttatcaaatatgaaatatctacttgcctaatcatatgacgacaagttaaattacagatgaaatacaaaagacttacttgccaaggctttatcattgccatatttgggttattggtttgaattggtaaggcatcgatacataaactctcagtacgaaattcaggtgagaaggcaagacaagtagacaactcaaactccatatggtaattgtataaaccaagcaaaggatttcaagaaaaaaaacaaaaatgtttgattgatctagccatgaatattacagaagactctggagaacaacggtgtttcttcaaaatcagtaatcaataccagatattatcaatgagactcagcatagaatgccatgaaaacttcatccttgaaaatacaaacaaacaggatgactgttgataaagatgtcggtgtaacagcaaaaaatttcatgatcagatcattagaataaagtaggataactttggttctgtttattctacacaaactggaagctgctaattgtaaaagagttgttattactcattctgcagccaactggtatgtccaacatcattgtgcgtgcttggcaccaaatataattagtgtgtccagcatgcaaatctccccaaaaaggtaaaatagttcttttgccccatagtttagtgtttgctcatttgccagtttccacattcccagtgaatgacaaccagaactagggaccacatgtcatacacacatatggggcaaaagagcaaatgccatcaacttattgtgggacagaagagcaaatctccccttggaaaattggtttaccagccacaacggcaactgatattaagatggtcccagtccagaagggaaaaaaaaaagtcttgcatggtgcaccattcgtcgaaacaatgtttaggtatcaactcaataatctcattgcgtagcataactacaaataatgggatgttttacttctggtgcgccattcatcaaacaatgtttacgcagcataacaaaatagaccaatattctagtggagcgcttagcttgcttgacatacatagctcctaaagcgtaataagagttaaacaaaagtaggatataaaacttaaaagcacggttgcataagaaagtaaagaaactcatgacacagggcaaaaaaggttgcaaatcactaaataaataaataatgcgtgtatattgctacagaaaaactatgtgcacagaaagttgaatcgcacctagctcctctggacatattactgtgctgttgcctcaaatttccggagcatgtcgcagtgcggcgtctcgtaggaaagcccccagtggcgacgctgcacctcaaccctacaattctgtgagagtattgagaagtaatcccgctcaacatgccgttcgagtgttgcacgctcagtgctctggtgtggatactgctcctcaaagttaggcaacttgacatagtatgtgactccacgtgtggtttggaatttgtgctcataagggtaagagcgggacagcgagtagaccggttcagaagatggcaggaagttgagcaacagcagcaatagaacaggcaacagctgaataagcatccggagagtggagccaccggaattttgcgccccatggccatggtgcatgccgccagtcctgaaatgaaacgtcccaaactgcccaaactgtctggtggtggcaggcgccatcccgccaaagaagaagtttctgaatatctcatccggatcaaattcatcctcataaaacccattatacgcacgggcagtggaggcagccctcctgttgtaagtcaccggctcgtccgagccaacaaggtcatagcgcttgcggctctcggcatcgctgaggcactggaaggccttggagacggccttgaacgcatcctcggcaccgggggccttgttcttgtcgggatgcaccttgagggagagcttgcggtaggccttgcgcacgtcctccacagtgcagtccttctcgaggccgaggatctggtagtagtccctggtgtgcttcttgacctggcgcacaacctccagctgctcagacgtgtatgacctctcaccggcgctctcgtcctcctccttcttcttacccttctgcttcctctctctcagaccatcgctcccggttgcttcctccgcggatgctgccgctgctgacgaccgaggtggcggcggcggcggggcctgtggggacgacgacgaggcggaggacgagggcgggtcgtcctggttgaggagaggatcgagcaggtggtcgatggggagggaggggtcgaggcgcttggccttggagaggaacttgacggcgcgggcgctgtcgccggcgtccgccgcggccttcccgatgcggaggcacttgaccgcgtcgtccttgttgccctccatggcgcctccccccgcgcagccgccgcagatctggccgcgcgacggcgagtcaccccctcctcctcctcctccgtgcgatggaccccgatcggatcggctccgcccccaaatccaatctgagaagcgatcgattcgcacaacaaggtggggggaatcagattccgatttccgaacgagccgtggaaatcggccgcatcggatgattgggaggcgcgaccgtgttgggagatgcttacctcgccggagttggagcggagaccggatcggcgtcggcgtcggcggcggcggcgagtcgccgtgggaggggaggaagaagagaggaggggggggagatgtgatgagacggcgacgcgacgaccaccgcgggcggagtcgatatttcccacgactccgtctcgctttgcttcactttcctcaattttctcaggattccttttttttttttttagttttccctctgtttgttcgttctctctgcgagactgcaaatacgcgtgaagaaaagggtgtgggcctgtggtaattgggccaattagaaacctatgtgaggccgtttgtgggtaattagtttaggtttaggaaaccgtaatgatggctccatcgtttgcatatttgcaaacgagtactccaaccatcccaaaaataggtaaacattggtttccgtgtcgatctttgactgtccgtcttatataaaaattttttataattcgtattttcattgttgtgagatgataaaacatgattaatattttatgcgtgacttgtcttttttatttttttttcataatttttttaaataagacggaaggtcaaacgttgggcatggaaaccagggtttctcttttttttgggatggagggagtaataatttgtgaataaaaattttatttgtgtgttcctagcgatcttaaaaaataaagtttaaaaaaaattcaaaatcaactctgaatttaaggttgaaattttaaattttggttgataagtataagtataagagaaaagatgaggcctatagtttcccagttgcttaaaaaaaattctcactcaactcaattggtaaccgtgagaagcacgcggtcacgtaaaaatttttatttccgtcaatagagatatgttatgtgacgatgtatatatgagtacgatgttaatagcctaaaagctcaaagtttagaggagtgacttaaattaaattaaagctaccttgaaataaccatgataccatcgaagattcaaatgggaatattgtgggatactcctattttggtgacaaggatgaagaaaaacaagtggtatcaaaagacactgaaaaacaattggatatatgccaaacgcatgggaaaatgagtgttgaattgtgtcagaattataaatgcgaacacctaaaacttaatctagatcgtaagacaacttatggcctgtttggattggggccaattcttgccctacctatcatttgatagttttgaatagtactagtaatcgtgcacgtgcaatgcacgtctatgttaaaattattggtccaattccactaataagtgaaaaacaatatatttattctaaaccactgatattaacatgaaacttaagtgacaaataatcaaaagccatctgtagtccttttgttatccactgcatttcaaacaaaataaataaaaaatacaaaagcttcacttctcactacatttataacaaagttttacaggtgccatcacaagttaaacttttgcaactaatttggtctaaaataagcaactatagaaccatactctcaccgtaacaatatgcaacctggagattaaaaacaataatccaattaagctaatcaacctgacagactgtcacttctgtcacttctgtccaaggatgaatatctcaatactatacaatcaccactattttttcctttcaaaaaaaaatcacccctattttgcatctgatatacggataagcaaaacattgtggccttgatcggcagcaatggctgctgccgcagctgccctataggtgtaaataccatgtgaaagaagacatgcatagcactcttatgtcacttggccatataaagttttcaactccacaattatatatatacatccctcctgtcctcaacataccagagcacagcagaggtgcatatgaatccatccagattatatatagagaaacaaaccctcttgtaatcaagccgaatttgaagagaaaatgtataacatatgcatacattaattcctttaatatccaaactgaaaattaagaatcaatagtatcagccatggaaaagaactgagttagatcacaaaatcttctgacgaaactaaagatattgaagccaattttctatcaaccactaattgcatgcacaattgagttgtttatatattcatacaacacaaaattgtaaagtgccaacccgaagaagtacatctcgatgtgtcatgcacctatgtttaactgcatgtccatgcatgaaagtcaaggaactccagtagaaagtgatgtttctaccttcacggagtgacagtaacatcaaatgcaaaggttataagtataatacaaaaagaaacactgatctgttcattttgaaagcaacaaactattagcctgaagcacatgtattcacagtaagaaaaaactattgactgagagatcaacttggttcacaggagaaaaaagtatgcttagagctccaactgagacacgaaggagtagctaaaaaaatatgcatcatgagcttaggacttagagcctcctttgcttcttagagcaagtttaatagtatagccaactactagctccaattcatctatagccaatctaatagttcattcatacaatagttacatactacactattaatacctggtcccacctgtcatacacacactgcatcttagagtccgtgctacagctggctataaatctgtagcccgctactcttctctcttctcatttatctacttaaaatatgtttgcagttggcttatagcctgctattgtacctgctcttaggtcctttgcttcttcggttcctcctaactactgaagccaacacatggatgtcacagcattcacattgccatctcccaactcccaagaaacttgcttcattctcatccaccaaggaatcaacctatatgagcataaccttatatgtcacctgaaaagaaaaatgaaacgttcaagtctcaattaatcaagctactactgatcatgggattgcaaccagcgagcatgtatatccatctgaaccatgttgcagtgttttcgttatacatagtgtagctgcagaacacatgcaagaatatgaccccaaggatccataatcatatcttcttggctgttccactgaacaattaatactgaattcattatatgaaaatcctgaaaaaaaaaaggaaaaatgatggttaattggatctcttgagaaaatgacagtataatttatgctcataagaggcaccatctatgaaaaatatataatttagcatagtcgtgacacaacgcaacatgaattctaattgcaccggacctcattcttagtaacatataaattaagcagaaaatcactggacaatgggccataccttatcaccagaagtcatatctcggtaaaacaaatatcattatgttgagacttgagatgatcagcacccaaggaattaacacttatcatttgcacagttgtaaagtaaaacctagaaatgtcttagcaggcattctgatatgggagttgtttagagaaaacatttagagatgtaagttgtcagttgcacaccaatagtgatctgcatctcccatttgtaccattacaccaaaaataacttttagatcacaagcatttgcaattttcccatctataataaatgcacacattcatatggaagcataaaaacatacacaattttaattgccggagtacccaaagtcataagcaagagtaaccgggacaagggaagtagtgttgttgaacctgacagcgccgcaacgggatatatttatttatttgcttgtgatgatgaacacccatcggtgttattattggtggagaaggaggacgatgccccggagctgtcacagcctgattttcgttttaggatttaaaattatttaatcaattattaatagaatttatattaaatgttcattaatttttaagtgaagttaaatgtgggaaataaaattttctaaatataaagcatggctggatttaatttttattaaattctccatgattaattatactatctgaaattttctcggatttttcggagctcaattcctaattttaataatacaaagaatatttcagtaattattcacatattaaattaatcattaaatgagctggtttcaattttgttaaatattttgagtgtccaagtatgttcaagattgttcttggaattatttgagcattggaagtatttttaacaattgaaagatcatttcagtgattaatttaattgggaaaagtaattagaataccgatttttttatttataataactaatccttcacaaattaaataagtagtaattatctgtagggatttaccaaagtagtaaggacgctattgtcatcagcgtccaggtgtggacactgttataatacatgtccagctcgagacgcacttcttaacagcgtccacagtctggtgcaacccaatgtgccttactgccttatcacaccggccgccttatcacaccggccactgtaagcgcttgttgacatctcctgctagcgagccttcgtgttgtcctaagcaacgttagctcgatcactttgttggcgattgagcatgtttaattacttaattatatgctatcactctataatttttgcctttgaagtgcccacgcatgcgttagcttttcctttatctggtccggttgcctctaaaacagatatatagctcgttgttggatcaatcaatttgtagttatatataggtatgtcgattcattttaatatcgctgcatatcgtatcaacatattatggttctagataaattatactcatatatttcaataatccagccaactgtgtcaattacaaatacaggacaaacaatctgggtaggtgttgacgaaaaaatcgaatacaccggcctgggagatctgcttaactccagtgcaggtccaaatcttggtgaaatgcgagcgtgccagtcagtttgatcttgcaactgacaagatatgcaaatagtatatcaaaacagccgatcggctgacaagccgatagagtagttccagccgatagcgataatagccgatgccgataccagccgatagcgatagggtttaagcaatcggctatatgtccaatgtagataataatataaaggcaatcggctgatgatgatgtaataaaataacaatataatccagtataaaccaatcggctagcattgatatgatagaataagcactgatctgaaggttaaagcatacatcggctggaggcccgatgtcatgaaatctacaagattagattaaacagtgaaacctttgttgtcatcggctaaatccaacttatatgtatatgcaatccttatgagccgatgcaacgtccagataactcatcagctgaaaccccgatgaaacccttattggcaatcaagaagcaggctagaaattatggttctaagcacgacttagtagatcaaacttaactgatgcagcactaagtatgaaaagaaatataatatctagacaatcaagccgttgactgagttttcagggtggtagatgtctaagctaatctaatctagcaacgcgatttagccgataccggcagaaaccctaaaatgagaagcagccgatagagctaaattgatatgctaaaactagattaacagagacatatgataaataggtaggcaaatatatcatccaaaccaaagcaatccaagaggtcgaatgtactgatgcagccttgaacgacgccaacgtagacgatacaattgcctggatcggcggaacattggacttatcccttcgccggagatcgaagacgatgcaactccgcatcgggtgccaagttccgccggaacgtaaaaacaaaagtagaagtaaaaagggtggcgatgcgccgaattgtattgatcgtagcgattgatagattacaatgaccccgggtgtacatatttatacccataggttgatacaagtccttgtcggacaagaaagaaactttcctaaagataaaaggaaaagataaagtccttataggacactaaacacactttcctaaagataaaaggaaactaacaaactattcctaattaatagatacaactgccttcttcggactcgatccgtacgtggcaatcatcatgaagcacgtcaactcaatctgacaatgattccaatatcatcttgccggaattggctacatcggcttgccttgtcctattcggtaactgccgatgcacactgtagccgatgcggttccgaagccgattcataccctgtttccgttatcgatttcctcccaaatccgcttcggccttaactccaaatccgatgcatgatttaccaaatttcatcgttaacagtaggtacaatacgttcttgcattaactaggcaaacaaaacgattcaaaccaagtatatatccggacactagataagttcttatacatacgaagaaacgtccacaatctaaaaaagctcacttaaatatataagctagttgcaatgtgcttcttgaaacttttcttagcacttaactacttgtgttgaacttcccgaaaacctaaatcaaacgaaaatgttagtttcaccaagataaaataaggcagctagctgattctcacagagttactgtttgttgagtcactagcttggcctccaccatcttctgtgtgggcactcctatctccatgctctatactgcaaccttttcctgagtatacccaatagtcaaatacttcattgtattgatacttttggataacttgacggaaccatggcaccacaaacaacaatagtaaatctatcaggatgaaacaatcttattgctgaaacaatcaaccgcacaaaaaacctgactagggtccgcatagaggacgtcgctgtcgagcggtcactggtggcggcggcctctagcgcaaggaggtctggacattgttacgaagatgttgacgggatgctggacgtcgttcaatacagcgtccaggtctggacattgttacgaagagcgtccattcctggacgctatagcgtttagcatccatcctacaattaaaatttccctctatcatttactagatatttaattaataggttgttaattattatatataaaaaaatcggaattaaaattcccttttccttttcgggccgaaacaggaaaagttcacatttaatcctccgcccattcttccttctattcggccggccttatcccttcccaaagtctagtttgcatccctccttctatcgggctgtgcaatggaagcccatccaaaagtctgttttgcgtcccctcgctacagtgcatcttcaacctccagccagagccgagctcctgtgcccgtgtcctgttgccgccgcctcctccttccaaatccgacctccccgttgctcctctttccaaattagttgcggaatggaatcctctcaatctcctatacaatttccccacgaaatcctcaaatgtttctatggaaatcctttccaatttcgcggatcaatctttccttttcccggcgaggatcctaaactttcccggagtttctcccgtcgatttgggcccggacccgagctcccgtgcctatataaaggaccctctagtcgtcctccacctatcccctcaagtcccgtcttccaccgtcgctggaaacgctctccccgcgagcaccttctctctccaccgccggccgccgctccagccgcgccgttcgtcgtcgtccatcgtcgccttaggtcgccgctgccaccgttgggttcgcgaggaggagaagaagatcgtcctccacttccccgaagccgaaatccaccggagctccatcgtcgccgtcaacccgaagttcgccgtcgtgttttgatctccaacgaggccctgctgctccttctgtcatcaccaatcttcaccgccacatccattggattcgcagctgcaagcagaagaccgtccaccacctcttctccgccaaagatcgccggaaagtcatcgccaccgtcgatcagtaccccgtcgccactccaacctcgccgccgtcgtcatctgtcgtcgtttgccgtcattcaagtcatcggtgagctcccctcgtcgtgctctttcctccggttcagatcaatttaagtcatccaatcttggtcgactcgatcgagattaatctcagccgtccaaaatcgatataaatctgttcgctcttttcaatgacatattattcctttttaatatatgtcatctatcaaatataatctaatctttttcggaggttgttttaatcttttgtcttaattataaatcatttgtaaatggtttaattaatttggaatagtctttttctttaataggctttaattggaattaattttgtaaattcataattaaatcatatgaaattggaataaggccgttcaagtctcattcatctaaaatcatgatctacatgtttgtttactttatatgttttgtttatttggagtttcttagtctttttctttgttttgcgtgttagcttgtcgtttctgtcgttgcaaaggttcgcgagtgcgccggaagtgttcaagaagattaattgaagaccgttgcaaggcaagtcacacaggtcccaaacacaattcctttgagcatgttgatcctatatttaattctctattaatttcaactatgcatttattttcgaatgtcactggtggtgtgtcacgcccggaaattcactagtaatttccgaacttatttgtgcataaaatcctcgtccagaaatcagccgaggtacacaaactgacaatttaatatacaaatccatcataataataacgttacacttacaaaagaaaagaaaacagcagcggaataacggtctagcgatggcttcagctccactcccacaggcagcttaactggggtataagccaaacatcttctccttctggatcatttttcttcaactgaggttgattgattattgcaagaatgagcatatgacatactcaacaagccacacagcaaatatgcgagtgcacaaggataccaaaggatggcataatataggctcatttgcaaaagcagcatttagcaaaacatttaagagaagtaaaacagtggagtaattaattagaaattttaatcaacactgaacagcacacccatgctgcacaggcccaaccatcctgaacaaccatacccggctgtacagatctaactccaaaccaggagctaaacaaattattaccaggtataacatccataattattgtgagaggtgtgagactaatcacgaaaaacattgctcaacccgcccataaccacgggcacggctattcgaatagttttactctggccagaggtgtaccactgtacccacaagacacagcctcaacatcatgtctaccatgcgtcgcgatactggaaagtacccgaatagaggctgtgacaataccatctgcacaacacaactcaccacagtgcaccattcctggatcataatcacccccttataaaacaaggcatggactccccagcgacccccgtgggcttatctccgccacttctcagtctggtgctccgcaatgaatcatgttatacaaaaggtaaagccgttgcccacgctggcttgtggttggcacggttaatgtttcacaacagtagctcgcgaaccggtccttaattgccatgagcacgactctcaaaaccatgtgctcacaacccaccattatcaagttttagttggcaagtaattaattaaccaatcacgattgaccatcgtgaactatcattaagccatcattaaataatagtgagtcataagttatcccaatagtgtgctaatatttctaatcatgactaagcaatcatatctaatatctagctgaaccaatatataaagctcaactagtcaagttataataacccaaggtatcaaggaataaagtaatcaatgcaaacaggccataacaaaggaatagattcacaccacccagtgacattcgaaaataaatgcacagttgaaataaatagagaatttaaatataggatcaacatgctcaaaggattgtgtttaggatctgtgtgacttgccttgcaataatcggtcttcaattaatcttctgaacactcccgacgcactcacgaaccttcgcaacgacggaaacgacaagctaacacgcaaaacgaagaaaaagactaataaaaaccaaataaacagtatatataaagtaaacaaacatgtagatgtcgattttagatgaatttagcaacttgaaccactcaaaaccgagttacgatgatttagttatgaatttcctaagatttaatctattagaaaaacaggaaaaagaaaaaacgatgatgacgtcatgatgacctcatcaatggccggaccaagatggcgacctcgccggagattggatggtcggctgcgactttggaggacatgtacacgtagaggacgacgagacgaacccaacggtactcaccctcgaaccaaacgacgaacgacgacggccggcgacgaggtctagcggcggcgcggcttcggtcgacggtggcgacggggctgcggtggtcagcggcttcgggggtcaggcggccgggcttctccaccctcccgcgcacctaacggtggtgacgacgaccggtggcgacgacggaggcgacggcgcgacgcggatggagctcggccggcgacgacggcggggtggagcacgtggcggcggcgctacgaggcacgggagatcacgggagagggggcaaacgaaagaggaggactaggggatcctatttaaagccttggattgaagagatcggactcctccagcaagaaatcgatccgggaaatcaaaaactcggttttggagataaactcgaaaacgagttcgattcggataagatactcaaagattagctccgatttttgggggtaaagatataggaggataagaggaatatttcccctcaactaattttagaaaaacacaaggggaaaggtcagatttggaggagaaaaaccgagccaaatcggtctcagttcggctgctagaggtagaagataaacagtgtcgagggaggcaaattagacttttcgtcttgggctggctgaaaacaaagcaaagaaagaaagagaaggggggagctcggctgggccgacttgggttgcacggccgtgcacacaaaagagggagatgggctggaaagggcccaagactaggaagaggattattattacttttccaattaaattaatcaatgaaatgatctttgaattgttaaaaatacttcctatgctcaaataattccaagaaaatcttgaacatacttggacacccaaagtttttaacaatattaaaaccagaccatttaatgattaatttaatatgtgggtaattactgaaatgctctttgtaagattaaaattaggaattgagctccgaaaaatccgagaatattccagagagtataattaaccatggagaatttaataaaaaattaaatccatccatgctttatatttaggaaattttatttcccacatttaacttcacttgtaaattaatgaacatttaatataaattctaataataatttattaaataatttataaatcctgaaacaaaaatcaggatgtgacatggtgtgaacctattcctttgttatggccaatttgcattgattaccctatgtcttgattacctcgggttataatttgactagctggatttatatattggttcagctagatgtattagatattgacggagctcgtggctcctcaccgggagaccgcgcaggcccccctttgccggttcggccgggggcttagggtgagatctcaagctctcgctgtgtgtggaaagatcgcgtgccaggaagaaacacgagacacggacgatgtatacaggttcgggccgctgggaagcgtaataccctactcctgtgttttggtgaatttgtgtgtggaagagctacaaaatgtgggccgacctctcccttgttctaggctctgaatctggaaagaatccccctccctctatgggcaaggtcctccttttatacttcaaggggataccacacgcaccctcctctttccaaactggacttttcttctctttatggacggagattggtatggttgctgtccgaatgacacttcgatgggacagcccacacctacctccactcccggcggagacgggcgcaacgtgggatcgtggctgcccgttgctgacgcgaccagtgtcagactggtcattcttgtccaccatgtgtcagtttaacaagatgcatgtttgcccttcttcgtgtaacaccttgcctgtaatggttaggatgaagcctggtataaatctaaccagggctaacgtgccatctctaagagataacacgctagctccggcttgagacgagttgcctagaggctttcgtcttgacgggatggggcaaggcgtgcgtcagaccgccagtcgccacctaacccttgatctgaccggtctgtgactggtcacagaccggataaaagagcgtgctgtactgcgttacatgcagcgtgacacgcttgaccagactgtaataaatgctgttaggtgagcacagctgtgctcacttatcccatatatgtggcgcagacttctttaaggggtcggggtgcctcggccctcggggccggggcaagcgcaacccgacccccccctcgggggaaatcaggaggagggcggacacctcaccctcgggcccgacgtccccgaaggtgccaggccacgtgggcgattgcgtctgcctcaagcctctggtcatgatactcccggtcccatatcaccgacagtagcccccggcgttatgccagagcaatttcccttcccaagggaagcggtcaggtgtgacgccacccctaaagcctggtgacaggtgggaccggtctccgtagttgggcaaaatacccaacggtctcaatccatgcacattggtattggtaactttggttgtccataatgggcggtctattcaagactgccacaccacttgagcagcgcgcgaatctgggcgagcagattcgtctcgcccggagatacggcaacgccgcttcggtcggcgagcgtaattaacgcgcgcacgatacaatccgtttcgatcgccacaaccgcatatccacttcatgcgccgtaagcgggcgaatgggattagtggaagcgtgggcacgggaaacgagggagcgagatagcgagatatgagggagcgaggtagtgggcgcgagaaacgaggagccaggcccagcgatggcaagggtataaaagcatcgagaaaaggatttgcttccttcctttcgccattgttcctcttgccttcaccgcctgagctctaactctttctctgctacgccctactttcgccacacgcgctcgttctcaatcatctcttcctccaccgccatggcacggggctctgctctgctcgacggcagtgtactaccgccttcccgcatcgtgaacgagaggcacgccggactgccgcgccgcttcatgcctgagtccgccaccggtcgggagatagtgatgctgggcgaggggcgcccggcaccagactacccggggcggtccatcttcttcctccccttcgcaatggctgggctggtcccgccattttctcatttcttcatggatgtcctggagttctacgatctccagatggcgcacctcacccccaatgcggtgatgacattggccatcttcgcgcacctgtgcgagatgttcattggggtgcgcccctctcttcagctgttccggtggttcttcaccgtgcagtcggtgtcaccgccgtcggtggtcggcggctgctacttccagccgcgggggccggtgttgaaccgctacatcccctgcgtcctccgcaagaagtgggacgactggaagagcgactggttctacacccccctcgccaacgaagcgcgcctccgacttccaagccagcccccggcgcaggtctccagctggcgggcgtcggtagatctgggggaggactacgacgccgtcctcgaccgcctggcgggcctgcgatcccaggggctcaccggggccatggtgtacggcgattacctccgccgccggattgcgccgctccaacggcgcgcccggagcgcctgggagtacactgggcctgaagactacatgcggacccaccagggagccagatgggactgggctcccgaggacttcaagatcgtagttcaaagggtgctgaatcttagctccgcggaggcgtctcgcattcctcaggagatcctccccctctgcagcgatcccgaccgcgcctccattctaaccattatgatgggggtcggggcctcagaggagagagcccctaagggccacgacggcgcgggcgagcgccgccggggggaaccatctgccccaggagggggtcgtgcttctgggccccgcgtcgggggctcggggagcagccgccctgccgacgcccaggggaagaggaagctgggaggaacacctcccacatctcctccccgagggggcggggcggcgcgtgccagcagtcggcgcccggaggggggcgcgccgacgtcgcagcccgagggggagcgcaagaagaagcggctccgcaagatgggggagacggaaccatcccggggaaacctgatttcccctccaaagtggtcatttaaccgaccccctcgcaggttcgccccattcttattgcgaccgtctttcttctatcccattaagcaagttttctcttacccatcttgtttgtcttctggttttttattctgcttcagcgatgccccgtcacattcctcccgccaccccaagtccggccagtccgaggccgaagatccggcggccgcagaggagcggaggcgagaagctgaccggcgtgaagccgcagatcgccttcgggaagctgaagaggccgcccgggaggccgcccgggctcgccaagccgaagaagctgctcgggaggaggccgcccgggctcgccaagccgaagaagctgcccgggaggaggccgcccgggctcgccaggctgaggcgacagctgctgctggcgcgtcacttgggcccactccctcgggcggccctcaggcgacatcctccgaggcggctcgcgacgaggccgcgggcgcatcgcctgggcctacctcaccgggcgacgcccaggaccaaacgggcccgggggacatccccgagcccagcgcatcctccggggggccaagccgcgtcgcattttctccaaggcggctcttttcctcatcttctgtcgccccgctgagcgccgagccccttctgcaggccctggccgccgcaaacaccgcagtgctggatgggttcaacgcccaagtggaggccctgcgtgcggaacgagcggagctcgaggccgcatgggcgcgcgttgaggaggggcggcgctcggtggacgccatggtggaggtgggccgtaaggctcaccgccgtcacatctcggagcttgaagcccgcaaggcggcgctggcggaggtcgcccgagaggtggaggaggagcgagaggccgcccttatcgccaccaccgcgatgatcgaggcgcaagacaccctccgccttcagcacgcaagctgggaggcggagctgaagaaaaagctcgacgccgcccaaggggtccttgactccgccgctgcccgagagcggcgggtaacggagactgaagcggcgtctcggcggcgcaaggaggcccttgagtcccgtgccatggcgctggaagaacacgccggcaccgtggagaggggcttgacggaccgcgaggccgccgctgctctccgggaggcgacgctggcggcgcacgaggccgcctgcgccgaggaggagtgcgcgctccgcctccgcgaggacgcactcgctgagcgggagcgagctctcgaggaggctgaggccacgaccaaacggctggcggacagcctgtcccttcgcgaggcggcgcaagaggagcaggcgcgccgcaatcttgaatgcgtccgcgccgagagagccgcactggagcagcgggctgctgacctcgaggcgcgggaaaaggagctggacgcgagggcgcctatcggcggggcggccgcgggcgaaagcgacttagccgcccgcctcgcagctgccgaacacaccgtcgcggaaatgcagcgagcgctggactcctccaccggggaggccgaggcccttcgcttggcgggcgagattgggcccgacatgctttgggatgcggtctcccacatgaagcgcgccggtcggcaagcgggcctctggagaggccagacgtcggtgccccccaccaatctggaaggcctcgctccgcacctcaccaggatggcctgggttctcgaacaactccccgaggagcttgagaagaccatcaagtcatcctcgagggacctcgcgcagggagcggtcgaactcgtgctggcgagctaccaggcccgggaccccaacttctctccatggatggcgctggaggagttccctcccgggaccgaggacgacgcgcgcgcgcgcgtccgggatgccgccgaccacatcgtcaacggcttcgagggctcggcccctcggctcgcgttcgcccctagctccgacgaggagggcgatgccagcggtgaggacgacggtggcgacgaggccggcgacccgggcgcgtcggaatgagcccccgagcccccgtcaatcttcacttttttctttttctttcttctaaggccttcgtgcctcttttgtatagatcaacttaatctgcaatcaaaaatgatgaaaaatttctatgttaactttattttgctatacttatgagttgaggatgatttgtgccgtggtccttttgcattttagcttgatttaagagctcgtgctcaagtcccaatcctcagatggctcgggtcggggctagtgcctggggagatccacatgccgagactggccaggccgggaacatggtgaccgagggttatgggtgacccgattgtgggtttttgccgattcccccccggagttcaccatgccccggggcacggctcggttctgggccccgcttggcgattttagctgaccgaaccgagcccccgagggcaaggttgagcacgagtgaccttatttcaagttaagattcttcagaaggaaaaacggcacagacacaacctttaggaaattgaaacttcttttattgaaatgctgaaataagaaaagtaagactgtgcatgtgtggtagcccccggccaaccctgcacacccgaggggggtgcggggttggcccgagccaaaacctgacacccgaccccccccttcaggggtagaagcgacgaaggtgttcaatgttccacgggtttggcagctccgtgccgtcgcccgtggccagccgtaccgagcccggccgggggacaccgatcactcgatacggaccctcccatattggtgagagcttgctcaatccagcacgcgtttggacgcggcgtaggacgaggtcgtcgacgcagagtgatcgggcccggacgtggcgctgatggtagcgccgcaggctctgctggtagcgcgcagctcggagggccgcgcgccgccttcgctcttccaagtagtcgaggtcatctctacgaagctgatcttgatcagcctcgcagtacatggtggcccgaggagacctcagggtgagctcagatgggagaaccgcttctgcgccgtagacgaggaagaaaggcgtttccccggtcgctcggcttggtgtggttcggttcgcccagagcaccgctggcaactcctcgatccatgaatcgccgtgcttcttgagaatgttgaaggtcttggttttgaggcctttaaggatttctgcattggcgcgctccacttggccattgcttctggggtgggcaggtgaggcgaagcagagcttgatgcccatgtcttcgcagtagtcgccgaagagttcactagtgaattgggtgccattatccgtaataatacggttaggcactccaaaacgggccgtgatgcccttaatgaatttaagagcagagtgcttatcgatcttgacaaccggataggcctcgggccacttagtgaacttgtcgatcgcaacatacagatactcaaacccgcccagggcccgtttgaacggtcccaggatatcaagcccccagacagcaaatggccatgacagtggtatgatctgcagggcctgggccggctgatggatttgcttggcgtggaactgacacgctctgcatcgccggaccagatcgactgcatcattgagagctgtcggccaataaaatccttgacgaaaggccttgccaaccagggtgcgtgaggcggaatgcgctccgcactcgccctcatggatgtcagcaagaagctcaacgccttgttcctgaggaatgcacttcaggaggatcccgttagccgcgcgccgatagagggtcccttctaccagcacgtagcgtttggaaatgcgttgtacgcgttcactcccttggcggtcctcaggtagagtcttatctgtgaggtatgtttggatctcagagatccaagcaatcaatctaagggagtttggagcactcccttcgagtcccgaggcctggactccgacggccctcgggggccggtcaggcgcatccgtctcccctaagggattgggtcgcgccgacggctgggtaagcctttcttcaaaggcgcccggtggggtctgggctcgcgaggacgcgagccgtgagagttcgtcggctatcatgttatcccgcctgggcacatgccgaagctctattccatcgaaatggcgctccatacgccgcacttggcgtacgtaggcgttcatctgtgggtcagagcaccggtactccttacagacctggttaacgactagctgggagtcgcctaataccaagaggcggcggatccccagtccagctgccactctgagtccggcaaggagtccctcgtactctgccatattgttagtcgctcgaaagtcgagacggaccaagtatctgaggacgtctccgttcggagaggtcaacgtgacccctgcaccggcgccctggagagacagagaaccgtcgaactgcatcacccagtgggcggtttgaggcagctgtgagaggttcgtgctggcctcgggcattgagacagtctctggagccggggtccactctgccacaaaatcggcgagggcctggctcttgatagcgtggcgtggttcaaagtgcagatcgaactcagaaagctcgattgcccattttaccactcgtcctgtaccctctcgattatgcaagatttgaccgagggggtaagacgtaaccacagtgacccgatgcgcctggaaataatggcgcagtttcctcgaggccatcagaatagcgtaaagcatcttctgggcctgtgggtatcgggtcttggcgtcccggagggtctcactaataaagtagacaggcctctgcacctttcggcggggccgatcctcttcgctaggggccgtatccccggggtgctcttcgtccaagtggcctctcggggcacactcgtctcctgcgctgatgacctcggggtccgaagatgacaggtgcggccttcccacagtggcctcggggccgtcccgggggtcgggggctcctggcgttgtcagacaagcgggcaaagggccagctccggtcgtcaggggcctcaggcctccgttcggctcgggggcctcttctccctgctctctcccgggtcgaatcagcacagggttagcctcggggtcaaagggtggtagatgcggccttcccgcagtggcctcggggccttcctgagggtcgggggcacccggcaccgtctgacaagcgggcagagggccgactccggtcgtcgggggccttaggccaccgttcgactcgggggcctctcctccctgcctgctcccgggccaagtcagcacagagtgggggtgcgcagaatgaggattgtcctcatcgcgctccacaaccaacgctgcactaactacttggggggtcgccgctaagtaaagtagcaggggctcatttggctccggggcgactagaaccgggggagagctgagatatacctttaactgagtaagggcatgttcagcttcctccgtccaagtgaacggcccggagcgcttgaggagcttaaacaagggtagcgccttctctcccagccttgatatgaaacgacttagggcggccatgcaaccggtgacgcattgcacatccctaagtttgctgggggggcgcatccgctcgatagctcgaatcttctcggggttggcctcaatgcctcgggcagagaccaaaaacccgagaagcttgcccgcaggtacaccaaacacgcacttatcggggttcagttttatgcgggcagagcggaggttttcaaaagtttccgctagatctgagagtaaggtctcttggttgcgcgtttttacaaccaagtcatcgacatacgcctcaacattacgtcctatttggctacccaaagaaattcgagtagtacgctgaaaagtaggacctgcattctttaacccgaagggcattgatgtataacaataggttcctacgggggtaatgaacgcagttttttcctcatcctccctagccatgcgaatctgatggtaaccagaatatgcatctagaaaacacaaaaggtcgcaccccgcagtggagtcgacaatctgatctatgcgaggcagggggtaaggatccttaggacatgccttgttaaggtcggtgtagtcgatgcacatccgaagcttgccgttcgccttgggaacgaccaccgggttcgccagccactccggatggatgacttcacggatgaatccggcctccagaagtctcgccacctcctcgcggatgaaggcttgacgttccggggcctgccgccgcactttctgccggaccggccttgcgcccggccgcacggcgagacggtgctcaatcacctccctggggaccccgggcatgtccgctggtctccatgcgaagacgtcagcgtttgcccgcaagaaggagacgagcgcgtcttcctatttgtcatccagaagaccaccgatccgtgtggtcttggatgggccgtcgcccaaggcaacctccttgaccgggacctcgtcgcatgtggcaatccgctgcctcggggcggtgggggcagaggggccaagcctctcgtcaccaccctcgggcttggacgcagcagcgaggcggtcggcgcgctgctccatgcaagcaagcgcgactttaagatcgccatggacagagatggggccaccggggcccggcatcttcatctggaggtaggcgtagtggaccgccgccatgaacttcaccaacgcgggcctccctaggaccgcgttgtagggcagactgaggtccgccacatcgaagctcacccgctccgtgcggaagttggcgggtccaccgaaggtgaccggtaggtcgatgtgacctaatggccacgtgtgccccggcgtcacaccgataattggctgggacggtcggagcaccatccccggggccttgatagcatcaaaggccgcgggggaaaggatgttgagagccgctcctccatctatgaggacacgtcccaacttcacgttgcagatggtgggggaaactaccatcgcaacctgccctccccgggcaatgcacggtgggtggtcggtctggtcgaaagtgagagcaacctctgaccaccgcgcccgacgcatcgcctcatgagtaggggccatggccagaagctctcgcttcatagccttgaagctccggcgagagacgtgagcacacgctcctccatcgacggtggcaatggtggccccaggttcttggaaacctaggccatcatcaccatcatcgatgtcaacagcgggggccttctgcttggcctcacttcgccgtttgccggaaggaaccgccggggacttgccctcacggcgttcctgcctcctgtcctcctcccacttcctcgttcgctcagccaaatttttgactgcgcgacagtccgcgagatcgtggagggaggtgttgtggacggagcaccacttgctgactgggcgctcccggctgggagtaccagcctctttctttttgtcgctcgcaggcctcccctttcgggtggcccgcggagcgctctcgacggcgaggacgtgcccctcgtcgccggaatgggccgaccttttcttcctcctcctgtcacgccgccctgtctgagcggcggatccgggggcggccgaagctgccacaccggaaccggaggggttccaggtccaggcctcctccttacgagccactcggtctgcgagctgaaaaagctccgcggtagtctggggctctttggaagcgatcttttcgagcatgcggttgtgccgcacgccccccctgaacgcgtagatcaccgcgtgtgcagggatgcatggtatagtattgcggacttggcaaaaccgctgaatgtacgagcgaagcgactcatcatcgcctcgctgtactgcatgcaagtccgcttcttcgcctgggcgcggatatgtgccttggaagttcatggtgaactgttggcacaaatcttcccaggagtggaccgacgcgggtggcaggttcattagccaaccccgcgcctgtccttttagggccatgggaaagaagttcgccatgaccctgtcgtcacccccagcggcctcgatcccggtcgtatagacctggagaaactcggtggggttgacgctcccatcgtacttctcggtgatggtgggccggaaccttgggggccaacggacattccgaagactcgccacaaaggctctacagccaacaccaccggccgggggcacggagggctgatcctcacgtccatgtcgaggtgacactctggacgaagaggcgtcctccgttgcgcggggagtacgccggctattacgccggcgctcgatgttgaggcgggcatccggctccccatgctgatcctcccgagtcgaaggtgtcgacgagggagtggcagccgaatgacgtgcagccgccgccgctcgccgcgccctccgccttgacgacacggagccggtggtagcggcgccggaggtcttggtggtggcggaccgtccaccagcacccaggcgctgctgtgccgtcatgaccaagttggccacgtcttccagccatcgttgggctggagactccgggtcatggacgacaggcgggtgtcgtaggagcgcgccagcagcctgaagcgcaccctgaggcgtgctgccgtcgccgtagacgaggaggcggcgctccccatcttgccgtcctcctgcaccacctgcaactggtgatgccacggatttgtcgaccttctcaagcgcctccccctgcttagggctttggcgcagaggaggtgggggagtacgagctcgacggcgtggattcggctccccgtcgtcgccgctcacactcggagagaggtcgtgcgcttctccttgctcggccattaggctgaacaagaaaaacttggcgcccacggaagagtctgagagctcagaaaacacacgctgagccccctacctggcgcgccagatgacggagctcgtggctcctcaccgggagaccgcgcaggcccccctttgccggttcggccgggggcttagggtgagatctcaagctctcgctgtgtgtggaaagatcgcgtgccaggaagaaacacgagacacggacgatgtatacaggttcgggccgctgggaagcgtaataccctactcctgtgttttggtgaatttgtgtgtggaagagctacaaaatgtgggccgacctctcccttgttctaggctctgaatctggaaagaatccccctccctctatgggcaaggtcctccttttatacttcaaggggataccacacgcaccctcctctttccaaactggacttttcttctctttatggacggagattggtatggttgctgtccgaatgacacttcgatgggacagcccacacctacctccactcccggcggagacgggcgcaacgtgggatcgtggctgcccgttgctgacgcgaccagtgtcagactggtcattcttgtccaccatgtgtcagtttaacaagatgcatgtttgcccttcttcgtgtaacaccttgcctgtaatggttaggatgaagcctggtataaatctaaccagggctaacgtgccatctctaagagataacacgctagctccggcttgagacgagttgcctagaggctttcgtcttgacgggatggggcaaggcgtgcgtcagaccgccagtcgccacctaacccttgatctgaccggtctgtgactggtcacagaccggataaaagagcgtgctgtactgcgttacatgcagcgtgacacgcttgaccagactgtaataaatgctgttaggtgagcacagctgtgctcacttatcccatatatgtggcgcagacttctttaaggggtcggggtgcctcggccctcggggccggggcaagcgcaacccgacccccccctcgggggaaatcaggaggagggcggacacctcaccctcgggcccgacgtccccgaaggtgccaggccacgtgggcgattgcgtctgcctcaagcctctggtcatgatactcccggtcccatatcaccgacagatataattgcttagctatgcttagaaacattagcacacgattgggataactaatgttttactattacttattgatggatatttaattgtagctcacgatggtcaatcgtgattgattaattaatttgccaactaaaacttgataatggtgggttgtgagcatatggttttgatggtcgtgctcatgacaattaaggaccggttcacgagtttcggttgtgaaacattaaccgtgctaaccacaagccagcatgggcaacggctttaccttttgtatagcatagttcattgcagggtaccagactgagaagtggcggagataagcccacgggggtcgctggggagtccatgccttgtttataagggattgattatgatctaggaacggtgcgctgtggtggattgtgttatgcgaggggtactgtcacagctcctttccgaggtaccgtggtggtattgaggcgcatggtgacatgtcgtggggctgtgtcttgtgggtacagtggtacacttctggccagagtaaaactattcgaatagccgtgcacgtggtcatgggcgggtctaacaatgtctttcgtgattagtcccacgctactcattaataataatgtggtaattgatggtaattaatttagctcctggtttggaatgctatattcctggtttggagatagatctgtacagccgggtatggttgtccaggatggttgggcctgtgcagcatgggtgtgttgttcagtgttgattaatattgatgattaattactctactgttttacgattctcaaatatttgctaaatactgcttttacaaatgaaccctatattataccattctttggtatccttgtgcacttgcatatttgctatgtggcttgcggagtattccatgtactcaccttgcaataatcaatcaaacctcagttgaagacaagttgcgaaggagaagacgtttggcttataccccagttgagctgcctgtgggagtggagccggagcttcgctagaccataattctgctgctattttctcttttcttttgtaagtatttacgttattagtatgatgaatctgtatattaaattgtcagtttgtgtacctcggctgattcctgaacgaggatttaatgcacaaataagttcagaaattactagtgaattaccagccggataggctaaatctaccgcaggggtgtggtggcaggggatgctggtagcggcgagcgtcagcctcgtggacatcgagcaacctctgagtttcgatggcgcggggacgacgtgcgttgtggtgggcgtcaacgcagccgaggaggctcaacaggacttgggccaaacctctgtagctttgcccatgccgccatccccaccctctcccctcctcaactgctcccctctccggtgtcatcatcgaggctgagactggtggtggtgccggtggctagatccgaagccttcgcatggcttggtccggcgcctcagattcgatgctgccatggctggtcagggaggaagaagagagctcacatcaagggcacataagggatgagtaggagaggacatatcacgggcaatgccagcagtagcaggaggatatgatggatatgcgatgcgggtgaggaggtgattgaggggagcactctcgcccctgcccctcaatggcgtgagctgcacatcaatcgcagggagagaaagagcgcgtggatagtgcaacggataccgcgggcgcggggcgtggatggcgcgcgacagcggtggcgatgaaggcgcgcgctagcgcggtggggatggggatggggatggggagggttccgaattggtgattccagctgcccacttttatctctttcacccgttagatttgatttcaccggttggattgcaagcggtgaactcatcctttttatattagtatagatatttgtttactatttggactgaggctaaggccgtgtttagttctcaaaataaaaacttttcacccatcacatcgaatgtttggacatatgaatagagtattaaatgtggggaaaagaacaattacacagtttgcgtgtaaattgtgagacgaatcttttaagcctaattgcgccatgatttgacaacgtgatgctatagtaaacatttgctaatgacagattaattaggctaataaattcgtctcgtagttttctaacggaacatgcaatttgttttgttattaaactacatttaatacttcaaatgtgtgtctgtatatccaatgtgacaaccaatcctaaattttttcccccactaaatctacctaattcaataggacttcaaaccgaaacagccatcgttagctctcagttcgtcaagtagtcgtgactatgagtcaattctataaagattatagttttcggtgaagtacggatgtgactatgaagatcatttgctacagtaaacgcagcgctctttgccacgctaccaggctactgttccactgttcatcttatttctagccgtccgatcagtcctttcgaggcgtgctggccatccgtagcattaggatagcttttctcctcatccatcgggggaaaagtgttggaatgtaaatcatgtctcctctatcaccggctccctttccttctcccgatcatggtttccggtcatgtttccataaatcggtagagtgagtatggaagatagaggcctatgcatgtaatgctccatgatcaatacaccatcgcgttgagtcattctgtctatcaaaaagaaaacgcggtcttctgcttccctgcgtccgccgcccgacgccctcctgttaacttcgtcggcggctacccctgtcgctgccttcatgtgtgctttcatctccttctcgatctcttgcgtctactgccagtctgccgcgcagccatgtatttctctgccatccttgccatcctcacctgctgccgtgccagaccggcatgtacccgttcgctatggttggcgacggtctccggccaccggccatatctgtccaccgtatacggcctccatttaagctgaatcggagtcgtatcgcgcgcaattgctatcctcctccgtcaccttgcctgtttcctcccaaagacccaaaccccgtcgattcgtgccttgctactgtttctaagtcctgtgttgttcttgctgttccactgtccctgaaggtactccctccttatttatgacgccgttgacttttcgatcaatgtttgaccattcgttttatttaaaaattttatgtaaatatgaaaatatttatgtcatgtttaaaaaacatttgatgacgaatcaagttataataaaataaatgataattacataaattttttgaataaattttttgaataagatgaatggtcaaacgttggataaaaagtcaacggcgtcatgcattaaaatatggaggtagtatttgtttgctgtcttaattaaaatacttgatatgagtgaacataaatgtgttgtatatataggctaagcgcattgccattgcaatgatggtattccgtaaatatttgaggaggtagcagctacttcgcccggcgaaaaaaaatagcagcagctttttttggagggccgccttgattagccttatgtacctaatttctgaatttaggggtgcttttatagttattgatatgagatctgtgaacatagaggttgttcattttgatgttagtttcaaccataccattttttttcaaagttacctaaaaatggctatgtttagtttgttgccaaatttgatcaatacataagaaataataccaaaattttggcaatattgccatcttgccaaaattttgacattgccaaaacttggtaatgtttattttggctacaatttgaacaagcccataattataaatgtggtggacttgggttaaaaaaagcttttatactaacttaaggtattaatccaaaaatcgccactcaaagctaacagttagaggcactgaactgactctgtatcaacattttgctttccagtttaatctaacgtttgcatctttccttttgttttccttcaaaatttttggctttcattgatcataattttcactcatggaaaaagaacaaaaaaaaattgtgatgtgctggtatcagtggcatttgatagccgtttattttggataaaaggaaagatcatgcatccttctctattatcatgtacttccttttgtttcacaatataggtcattctaacattttctatattcatgttaatattaaatgtaacatcaatataaatatggaaaatgctagaatgacctgcattgtgaaacgctgtttttcaccgtgattgagaagtcctatattcattttggatattcacgggatggtatcaaatcatgtttcccacatatgcattgtaatttttcttaatgcagtacccgttagacatgtacagtgatcttctgttgttattctttagtagattttatcgaaagcagggaactttctctaggaaaatccattacccactccccagtggagagagatttgatgccctgatgtatgctgcactctttctccaatgggttttttaattttcatggttggttctgatttactgcttgctatgctcatcgtcccttttctcctttgtttcacagctttacgcaatatatatttttaggttcttttatgtttattttgcctaaacttatgccttttgggtaccttttctctaaatagcatcgaattcaaccaaatgttcgatgctatttacgccaagtttagttccaaaatttttcttcaaacttttaaactttgctatcacatcaaaacttttctgcacacataaacttccaacttttccgtcatatcattccaatttcaaccaaactaccaattttggtgtgaaaaacacacccttagtatatactacactacatggacagttgtcctacattcgatcaccggtacggtgttgttttttctttttggttatatatgcatcagggaactaattagccattttgtccagatcaatcttcatttccacattttataaatattgcgtgcatgcttaccattatagtactcttcacgatgttcccgcggggtacagcctagtaaataggatgactgaaataaggttcgagtaaatgagacatgttaggttagctatacgtatagatttggaaagaggtaaccaaaaccaaattcaaaattttcaaatccctcaaatttgtaggcccccaaacctgctgcctactgcctaggtttccaatttgaaaggaaaaagtacacgaaaggtcccttaacttatcatcgagttacaaaatcgtcccccaaccacaaaaccagatatataaaatccctcaacttacaaaaaccgttcactttaggttctccggtggttttgaccctggtttagtccgacgtagcggctgagtcaacgtgatacccacgtgagccctacatgtcaggatgccactttcccctcctttcccttcctcctcctctccccctctcacttttctcctctgggcagggcggccggcaggtgaggaggaggtcaccgggacgaggcgagagaggaggtccgactgccggcgatgcggtgatggcgcccgccggtacaaatcccacctctgcggcgccatgtcctcctcccgcgggccgtcgtctcctctgtcccacccgaaccctatcgatcccttcgccgcggtagcggcggcgacagcggaggcgccaccgctccgaaaccctatcatcccccatgaccctccctcgccggagatggaggccaccgcggaggcgctcacctgggaggggtgctgtgttggcggaggtgccgcgccaagcatctcgttgatgtgtactggcggttctattggacgctcgggtggagctgcgggcgtggcatgggcgaagcctgctcgaggcagagcagctgccgctgctgccctccgcgtccaaggtggtcaggccggtgtccgcgatggtgccgaggcggaagaaatgcagcttcggcgggtgcaaggtgcggaccatggctatggccaggttctgccactcccacatcctctccgatgaccatggtgatggcatgtcccttccgccgcgctcttgacagacggtgtgggtgatgatgtggcatcctgacatgtgggtcccacgctgacttagccgccacatcggataaaaccggggtcaaaacaaccgaaagacctaaagttaacgatattataagttgaaggatgtcatgtatcaggttttgcggttgggggacgattttgtaactcgatgaaaagttgagggacattcggtatactttttccaatttgaaattgctttcttccaaggccacaaaaaacaagtaataagttcaccggaggtccctcaacttaacagcgagattttttgaggtccctcaaccacaaaaccagaaattttcgcccctaaactcattcaaaccgttcacaggaggtcccttggcagtataggtgggtggtttcgcttacgtggcatcctagtcagaaaaaaaaaattaaaaaatttcgtggggcccacatgtcagctgcactttattttttcttctcttttctctcctcttctctttcctctcctctctctttgccggcggcgggcggcgatgggcgagcgcgcgactggagtaggtggaggggcggcgtcagcgcgctagagcaggcggagcgcgcggtgtctccgggcgagcgcgactacggcgacggcaagcggtgggcgagcgcgacggcgggcaagcggcggctccgagggtgggcggtgcgcggccggagcaggtggagcggcggtgtctccgagcgcgggcggagcaaaggggcgggggcgcgacgggcgagcggcggcgacgcgtcacctctttccccctctcccgccggcctcatctcccccaactccgtccgctcccgccgctgcggcgcgccaccacgttgggctcctccgatgagtgcgacggcggcggcgggaaccagcagcaagaacgatgtgctcgttcgctctgtccgctttgcgcgccgctctcgccgccgccaccgacgcgactggcggagtaggccgccacgctcctcctttggccacctccgccgttgcggcctcctcatccgcctgcagtgctcattcgctcgctcgacgcccgtcgtccgctctgctcgcagcccgccgcgcttgccttccgctcgccctccgccgtccaacgccgctccgcgtgccgccgcgccacccgcctccattctgcccacaggccgcgctcggtggactgcgggctcaaggatgacctcgtgttcggggaccctaacgcgccgcggttccgccgccacctcccggatcccgcccccacctcccgccgcggtcgtccgcagtccgccgctgctctcaccggctgtcgccccgctcctgcatgcttcacctgccgcggccgcgctcgcgctccgccgccgccgccgctctcgtcggccgttgccccgctcctgcctgcttcgcttgccgcggccgcgctcgccctccgccgccgccgccgctctcgccggccgtcatcccgcccatctcgtctcgtcgaagaaaacgagagaagagaagaaaggggaaaaggaagggatgtggggcccgcaccattttctctcacttacatgtggtccccacgtactttatttatttatttttgctgactagaatgcaacgtcagcgaaaccacccacctatactgccaagggacctcctgggaacggtttcaatgagtttaggggcgaacatctctggttttgtagttgagggaccttaaaaaaaactcgctgttaagttgagggacctccggtgaacttagtctcaaaaaacaatcgtaattagcaggccgccagcccagcccacctacttctcctacacggcccaactgccacgtcagctaaccacctcattcaatccactccactccacggagccaacccgagctcgcgagatggaagctcacctccggccgctctccgccgcggcgctcctcctttcccccgctgcgccgcttcccaccgccgttgctgcttctgcgaggagagcatcccccggtggcaggaggtggagcagcgtgagggccagcgcgggcggcgggggctggctgtcgggcctgctcggaggcaagggcggcggcggcgcgccgacggcgatgacggtgacgccggggaccgtgaaggcgggggaccccgtcctgcacgagccggctcaggacgttgcccccggggacatcccctcggagaaggtccagggcgtcatcgaccggatggtcgccgtcatgcgcaaggcccccggcgtcggcctcgccgccccgcagatcggcgtccccttgaaggtaacccgcaaccgaggacacgattcgtgcgatcgctcctgcattattccattgcattaattgctccaaattactccactaagtcgtctactgttcaactgtttaattacctgcttatgtttgttcctgattgacacatggctgaattgctcgacctgttaaaatttcatagattatcgtcctggaggatacccaagaatacatcagctatgctcccaagaaggacattgaagcgcaggatcgccgtcctttcgatcttcttgtgagtagtagtacatttgtcctatgtagttgccttcaccaacaattatcattaggcaatattgccgccttctcatgccgttttattttccttgtgtcccttggataccaggttatcatcaatcctaagcttaagacgacgagtaaaagaactgcattgttcttcgaggggtgtttgaggtactcgctagaatgcttctttgtgatgttattactagtttctcattatgcattgtactggattacattgtgcttgttctcatgtgtcttctggggatggcagtgtagatggatacagggcacttgtcgagcgacacctggatgttgaggtttcaggtttggacaggaatggacgccccatcaaggtagaagcttcaggatggcaggcacgtatcctgcagcacgaatgtgatcatcttgaaggtacattgtatgttgacacgatggtccctaggacattcagaattgttgataacttggatcttccgcttcctgttggatgccctccaataggtgcacgctgaggtggagagcattccacattttaaaatttccaagtagagataattgcactctatagtatacataaaatttatcccaagtataatatttgcattgctgcttatttctgtgattgccaattttccatgaattgatttttcaatgtctgttgtggtcatacacatgcggagaatcactgccttgtatgttgaattgacatcatgtggtaacattcgttgttggttgtaagatgttcgctcaatgttttttgtatggtgtccatggactctgggagaacaggaattttacacttcaatagaactgtaccttttcctccagtttttgtctcttcaacataatttgcaataccatacacttaatagtgtatactgattatttttatcatatttctgatattcttgaacttctctatatttcgtacaacttgaattttctttcatctgttttgagatttgaagctagttgagattcttccaagtttatgtaaactaatgtggttggttaaattatacaaattgcttttggtggtatggttgtgtctctgtctctcaaagcagcatgtgttgttttcctaaactagagtagcaaaaggaaacatatccatgatgggtgtaacatgattatgttgtctgatcatgtctcagaaccagtttgtttatgcagtatattatgatataatattccttctaacatattaaattcaatacctttctgtattaattttaggatagcttgatgggtggtggaaggtaagccatatataatttaaacccttttgaaaatgcaagttcgcaaagagccttgaacgcaaggaagtgaacattatgtacaaagatagaataagaaaaatgagcactaatagaagttcacaagaataaatgaacagtttgtcattatgatgtatcatttaatatgtaagtatttctccaagtgtcttaaaataatattttaaaacacccttacaatcagttgtctggataatggagtgcatctgttacttcctactgtaggaaggaattatgagacaaaaagctaacaagtatgtacttataagataaattgaacctgaaggaaacagagttcatcagttacgacagaataatgaggaacttcacacatggaccttataacttgagcatcagcatttaacaatcatgacaagtacaaagtgagtcatggtgcagatggaggacataaatgttgcaatcaagtggccacacatgacacattagaaatcaacttaatccttcgaaaccaaaatgttacatcttcgtagtcccaagtatattgtagtctacttaaagccccaagctctgaagaatggaatgcttgactttaaaggcatgcatacatttggaacagtgttttgaagataccaattttctgattctgggagatgaaggttcacttgtttcagaggcaccaaattgtagaccactgtaaagaaaaataaaacaggagaattttcagatggtatgacaatcatatactgtaggcatagacatagccatgaaattaacacataaatcatgtttgaatcagtgttcatgccctcaatattcgttcaatttcgaaacaggcaactcccaaagcattcacctactgcaactgtgcaaaaccaaaggattgagttttatacgaagtagcagttgagattttctttgttacacataccttcaaacaatgaaaactacaataatgtgagaattagatataactacgaaacttttaacatgttaaataactaatctacaggagtgttatgatttcagtctacctaccatcacagcaagccacaagaaagagatgcctttattttttaatatttgcctcttttatgtattttgtcctatgatataggggctacgggttcaataatttgttctcattgttcattggtctatatactacagtcctatcattgagctttgtaaaagataggctggactacatgaaattgagtgctacagcctactggtatgaaactgttgccaagtgtcttaacattatctccaatcctgttgattaagagaactcctgtgggtaacaaaagcaatcatcacatccaggcttgttacaaacttagacaaagtttccagtccattacctgggctgaaggagcttgtcatggaaaatggaacatttgtcagaactctcacataggctggtcctactgacatccaaaatatagaacctgagctgcacagtgaggtggtcgagtacttgagaacttccttttggtcataaagattggtcattgggatccttcaaatctggcctgaatgcaccaactagcctattgcactagcttttttccatcatacagggcaccatgccgcacaacaaggcgacctgcacatggtctgcggttctccatatgtttattctccctttttaaagtagaggaaattgtcctttgcctcacccgctcattgcagagaatccaaactcataatccatcagtttagttaattggtgttggactatagactatagagattctggttgcttgtgccattctccaactctgctatatagatggctttaggaagacccatactgattcagaactaatcatctttgggagaggagagatactagctacacattcagattcagagctaacatccgcagtcaccattgcttcattggaggagagatcattgggtagcaatggcagcccaccatggtagcagcaggaagacaaaggcagagcagtggctattcggtggaagatggaggagaactgtgaaggagacaaagcatcctgttgcctctgaagccaagcctccagctccaacatttcctacagccattcagaaggatggcgacatctgccttgagaagtccagagttcatcttcctggcctgggacagagggagatcatcgatatcgcgcccgggaggaagtcaatgccggaggtggagatcaacatgaaggaggtcagggagatcatcgatatcgtgcccgggaggaagtcgatgccggaggtggagatcaacatgaaggaggtcgtctctgtgcttggtgtgaaggtgatggctgcagacatgtcgccatttatgcagctgcatgctttccggtgtgctaagcggtcccatgatagcttggacaagttcagctcaaggcagctggcccatgatgtgaagaaggtgagcttatttttttttctttcaatttgtgatctttcgcttgtttgtttacttttgttttgtattctgaaagggattgcactgattccgttcattgtatacgctccttccctttgtcttttggacgggttctttgtgaaatcaaattttagaaacttatcatttatgttgtcaattatgagatgcacttctagcatcttctgtatcatgcaatgcacatagccttaatgctgaaacacgtagtaaaatcattatctgatatattagaacctaaatagtgttgctgcttcactttttaatacttgtttttgaaggaaaatgtaatctggcttggcttctaacatcttgtccttgatatccaacaggagtttgataaagtttatggacctacatggcattgcatcgtcggcacaagctacggctctttcgtgacgcatgcgagaggctgtttcctctacttctccatggataagatcatcgtgatgctgttcaagaccaagatcaggaaagtgttagcatcatcttgagctccatagggaccaaccatgacatatctcttgtctcaatggtcaatacacttccatcatgagaaaaaaaaagggtaattaattagtctagctctgtgagagtgaagaaacaggggaagaaaaccacctcaaataattgttttgtccgtgagttgcaagttgcagctgaacaagtactgtggttggatggtgctgatgaatactaagcaccaataggaaagcaggttgtatatgtaaattaattaattaccacttggaaagtgatgtgatgatgaactgttgtttgggtgtagtagttgttgttctccttggggacagctctgacagaggctatacaacaatcgctgtcaggatcacgttgtgagattcctgattagtagagataatcacgggctaatacggttgatcaaataccacctctcgctgtgatgatgaggtagctggttgacaattgtgtctagctcttgtagtagtggagtaaacaatacctggatggatgatggatctcgtcatcaccaccgctcactgtttccaggttctagtccaagctccatggttagtccaagctctgggtttacaagccaagaagacttgttctaccacgtgatggccatcagctcctctggctgtgcaaccatggatgcatatgatgcccggattggttgagtgataagctgtaaaaatataaagaaaccaattaaaaatatttatagctaaaattctattttacccaccattccaaaatgatcatcagattacacaggtataccaaggccctatgtagttcacaccaaacttctccccaactcctaactttccatcacatcatatcacatccaaaactttcctacatacataaactcccaactttttttccgagtaaaatgcaccagcggtccttaaacttgtcaggaggtttcacctaggtccacgaacttgcaaagcgcacatcgagatccctaaacttggtttattgtatcatcccggtccaaaaccgcgtttgaccgtggtcttacctacgtggcataccacgtggatgatgacatggaattttttaatatttttttctcccttcttctttttcctcccttccttttctttctctcctctcccgtgcctccgccagtcgacgcgggagcgggggcgaagaggggggcatcggcgagctcggcgtgagcggggcggacacgagctcggtgtgagcggcagggtggcagggcgagctcgacttgagcagcgatgactgggggaggaggacgacagcgctgcgtgcgtgcggggggaggggtgtcaccggccgcggcccgggggaggtgtcgccgaccgcggttgcgcgtgaggggggaggcgtcggcgagcaagacgcgagcggggcgggcgcgagctcgacggcggcagcggggcggcagggcgagctcgagctcggcagcacgagcttgatggcgtcagcggccatatcgagctccgtgtggcggaggacgacgagctcgagctctctcccccctccatcggcgagctcacccccaactatcccaaacttccaactttctatcacatcatatcacatccaaaattttcctatatacataaactttcaactttttttccaaacctccaactttccccaaacttccaacttttttttaagaaataaacacacagccctactctttggccggcccggcaaaaaactgagcagcagccgccatgaactccccaccctcatttctcattactgcaagagaaattatttattttttagaccttttaatttttagattttaaaaatagtccttttcaaaaataaatttttttggccacgccagtcgaatgggccaacgtcgactgttgataggaattccttcaaccctatctcaaaaccaaccttgtccttgtcgtcaaatgtctcctgataaagctattaaaagctaatttgttagtctgctgtactagtagcagtgacaatcattcgaagtactgattttgtatatctatggcgtgccacacaaatactgcggacaaaattttttgtcatcggattcttttaggctcgtgctgattttaacgagagattgggaatttaaagagatgggattgctaacttctttgtttgatatgtgtttgggagagcacagaaaatgtggtggtttattaatgtataattaattaattaattaatagctaaaaataacttgaaaaatgaattaatatatttttaaaacaactttcgtatagaaattttttgtaaaaaaacacaccatttagtagataaaaagtgtgtacgcgaaaagcgagaggaagaactcagagttttagttggatggggatcaaaaattaagggataaactattgcttttaatacagttaaggggtaaaagttgaggtatttcctctttgcattgtctaatcaaatatcaacctatcgatgatatgggcctaggggtctcaagactagagggaggaggctgcccccaataccacgtggccctcccccgaggggagtcaggcccgaggtgaggcggaggccactccctcatgtgactaggggtcgggctcccccgacccccttagcgggtcaccacgtgcggtaggttaggtggccaccttcgagcgctcacctacccgcattaatggtgacttgagcaggcgcgccacgccgcattttatatggcgtgtaccgcgcgctaaattggtctgtgactggtcaaatgaccgacgggactcgaggtgttaggcgtactactgcatgggtcagggggcgtgcaccttgtcttgtcccatcggtcatgatgacgagaggtcttaacctctcatcccggccagagttggtccatccgccctggtcaattggggattccgtttcccggtgcaaacagtgacccagaagtctccacccattaatagcagctgacatgggagcccctcgtgtcaggcggcaagatttgacaggccctatcatcaagatgacgtgcgcttgctttccaagtcaagagacaagacagacacttaatgcaaaacacttctccaccggagctaggtttttgggcccatgtggtaaccccttgaggtataaaagaaggttcaggcctagtaaaaagggggatggatctgggacgatccatttgacgctctagagcagtctctagccccggatgatcaacaccacattttactccaacaagaagatcttgtaatccttcactcaaggagcatagaacaggagtagggtattacgcttcttagcggcccgaacctgtataaacccttttggtctcatcgtctttgaggggcttgaccccctcaagatcacactgctttgctcaccgaatccttgaatctcacccgctgcccccggtcgaactcacaaaggagggcctcacggcctcccgctatagaaggtcactcctcgacacaaccctttatcttaatataaaatcttatcacaatataaactcccacagcttctaccaaacaatggattgataaaaagaaaatcatgatatcctcactactaattccctacctaaactcctaatgctctctcctaaaatttccaaaacatgctatggtattaaaaacaagagtttgaacgggaaccattggcaggtgtggtgaagttacatgagtatactcatagaatttaaatcttggtacccacaaataagttgcacaccagaccgagatggcacatgcggaattggcatgatcctttgagattgttatggatcctcgattttttcagcatgtcgttccatcgatttataaagtggtgctttgaagacggaacttatggcttgtgttgagggaatctatcatgccatgcaatgggcaatggacgatgcttcctatagttgtggaaacatattgtagtgggatgatcaatatgcggttttctaaggagttagaccgaccaatgccttttttttaaaagaggttgagttccttatggtcggaaataaaaaatttgtattaaaaaaggttcaagctagcaaattatgttagttgtgaagcaagctcaaagtttttgtgggtaactcttgtaaactcatctcacatgttgtgagggaggatttatcttccgattaataaatttcccgtttcaaaaaaaaattatggtataagttgcataaaatctcataaccccaggtattatgacacaaaatttcgcaaaacaacaactatttatcatttgagtttgatctgcgaaactcacaatcatatctcaaatttatgagttatttatccatcatataaatgttacatctatgtaagattttaatagagcatgtcaatttggttaacggcataactgctaagctttaagactataatacatatgattatgtgccacatcaaaatctaagtggttttgtgtaagttgaatcataatagactatgttttataaaatttactctcaatataaatttagtaaatcgcacttctgaatatatgaatgcggtgggtatgtcttgtgtaatcggataaaaaaatttcctaatctgtttggcacagctccagcttcagctcctctcctcctggagctggagctcagccaaacagttttagctctaccaaaaatgggagcggagctgagtggagctctatcacaaaataaactagagttatgaagctggatttagacagcttcacaactccactccagacctaactcttaaagctaaatctagcagttggaactgtaacaaacaggctgtaacggcaccgtaataaacccaacgtcctagctggaacaaatttcttatttgtcaatagaaaagttgaggtcgcgactcgcgagtatatgaggtggaaggataggtttatttatcattaatccttttaatttcacttaagtcaaaaagaaaaaaatctatactccgtagtgcttagctcagcaagacgacgaatttagaaagcagagactcctgcgccgctacagcaaagcaaagcatctcgcgccctagccaagccagccatggcgccgtcgtcgaggaaagagagggcggcggaggcgagggcgagcacctccaagccgtctcctgcgccggccccggcgccggcggtccaggtgcagcggcggccggtgggcgggggccggtggacgagccgccggatatcgttctacgcctcccgcgccttcttcctcctcatcatcctccagatcccgctcttcaggtcgcccccttctcccctcccccaatcccctctgatttacctctgtttccgtgtcgatcgtgcgctgaatcttagctaactcaagaacgcctgattaatctcgtggacgctggtgctgcttggcgacttggggcgtgattaccagatcaagaacggctgggacgcagcacacattcgtgtaggggatgcagggtacgggccttagataggcataattgtggtagaattccatcgaattcctcgattccatgcaaagcctactgccctaaatgttgtgttgatggggaaaggtaggcggtgtactcacatctcgtcagttacccttgttggacaagaagctgttaaagcctccatagtttcaagcggttaaaagcagccatagtttctcgatgtgcagggtttcagtcctcgggccgaaaagcatgattcaggttgcaaaatttggtagaaggcgagttcaaattaggcaaaatttgccacaggacactcaaaaaatgtgtaattggctgagagacaccgcaaaaacgtgacacggctaatggacactacaaaaaaaatttgtgtaattagctataggacaccagagacaatattttataatttttggtcaaaagaggtgagcaatttttcgaaatggcgagattgcccttggcgccatcttcctccacctgaaatcacaaaattagctgggagcagccgccgcgcaaggttgtcgacggcgaggcaggaggaggccgcggcggcgtggagcgcgtagaggaggcggctgcgcgcgaggccggcgacggcggcggccgcgcgcgaggcctgcgatggcgaggcagttggcggccgcgcgcgaggctggcgatggcggcggccgcgcgtgaggcctgcgatggcg

SEQ ID NO: 8199 - DNA, 712 bp, Oryza sativa
gactacagagctctcaatgaagtcaccatcaaaaccaagtaccctcttccccggaatcgatgatctgttcgatcagcttaaaggtgccactgtattctccaagattgatcttcgttccggatatcaccaattacgtattcgtgaagaagatattccgaagacggcattcaccacgcgatacgggctgtatgaattcacggtgatgtcgttcggcttgaccaatgctcctgccttcttcatgaacttaatgaacaaagtgttcatggaatacttggataagttcgttgtggttttcatcgatgacattctgatatactcacaatcagaggaagaccatcagcaccatctccgtctggtgttgggaaagttgcggaaacatcaattgtatgccaagcttagcaagtgtgagttctggttgtccgaagtcaaattcttggggcacgtgatatctgctaaaggagttgctgtggaccccgaaacagtgaccgccgtcaccgattggaagcaacccaagacagtcactcagattcgcagtttcttgggtttggcaggatactaccggaggttcatcgagaacttctccaaaatcgctcgacccatgacacagttgttgaagaaagaagagaagtttgtgtggagcccgcaatgcgagaaggcgttccaaaccctcaaggaaaagctggtttcctcgccagtgttaatcttgccggat

SEQ ID NO: 8200 - DNA, 979 bp, Oryza sativa
ttgcgatctatatattttatcttcgtaaccatttgtaacattctttgaattaatttcatgtattatcttcgttgtagaatatagctacgtagaagtaagcgtagctcaactgattatgttcctatggtgtaaccatcccacctggactcaggtgctagacttaacatgggtagttgggtactcatatttacggctaaattattatctattatattattaaatgaatagaaaaaggagcctctatgttcgctctcatggcctagaaattctcacattaatcagagaaaaagaaaaagcagagtccatatagaaatacaatttagaaatagctaaaattcggaattaaaaaataaggaatattagaagaggagactagagtccatatataaatacaatttagaaataattgaaattcggaattaaaaaataaggaatattagaagaggagactagagtccatatagaaatacaattaggaaataactgaaattcggaattaaaaaataaggaatattagaagaggagaatagagtccatatagaaatgcaattaggaaataactgaaattctaaattaaaaataaagaatattagaagaggagactagagtccatatagaaatgcaattaggaaataactgaaattcgaaattaaaaataaggaatattagaattggagtatagagtccatatagaaatacaattaggaaataataaaaatttggaattaaaaataaggaatattagaagtatagtatagagtccatataggaatttaaaactaactaaaatttgaaataataaacataataaaattaaaagtagagtttagagtccgtataaaaatacaatttacaaataactaaaattataaattaagaaaaacatgggaagaagagtttaaggtcaatatatgaatacaaatataggaatacaatttagaagtaactgaaattcgaaattaaaataaagaatattgaa

SEQ ID NO: 8201 - DNA, 3054 bp, Oryza sativa
acaccctctatagctggctggctggctcggtcatcatccaaaatcgatttatggctctacttgactagataaacactatcctgattcccgagtctttgacgagcaatggctttacaacgagtccctagatcttgaagcgatcaatcaggacagaacccgaagaaatagctgagctaattcatgcagcatctttgataaagtttgagctccacttgatacgctcgcggttttagttcgcccgatcttttgttgagttgataataactaaaatttagaagaaatgttcaatcatacaagacgctgctatgttacgccttagtgattgatacatctctctgtgggttgttcatcttgtcggtgcaatatcaacattttttttgcaagtataaatcgaagaaacaagtacggacaaaataaaagcaatatgaattaaagctcacgataaggtggagttccgaagacgagtaaggctatgttcggaaccatgggttcccaacaagcacagtgtgcacgaaaaacagagcagtccattagcgcgtgattaattaagtaggagtattaggtattttttttcaaaaatggatcaatatgatttttaaagcaactttcctatagaattttttttttgcaaaaaacgcaccatttagcagtttgaaaagcgtgcacatggaaaatgaggcggaggagctaggaaccagcagttctgaagacaacctaattaggcggtctagccgacacgtgtaaatacaagggctaaactttaatctaaacaaaacctgaaaaactctgaaggggtacctatttattaatggaggtgggaggataaccaaggggtcactagggtcgtgctccactagattgggacgcaccccacatgagctcaacttgggtcgaggtctgaaacgaagttacaagcccgaaggtcattataggtgacgcaacacattgtttcttgaattgtggccgactgagatggagtttggagatgagcctggatctgttggaagagaacttccatagctttccatcaagtactcatggatataaaacggaggtcgtgcacatctggcatccgtttcaagtcaacgctgctgcaaatggccgaacttgtctccagaacttgtgcgacttgtctcctgattgagctataatgtaagtaatggttgtatcaatagcagctacggccacatcacatctctccgtctcctatattgtctctggaaaaaggatcagatgcagccgtttttcggagcatgaggacgattggatatataaactgtggttttctcaagctacaacactaaccgatctctgggagtagtataatttaataaaaatctcttaggctaacatggcctaattctctctgaagccatggatatttttattaatgccttctgccttttatttagaaaaccttccaatgcttttatgccttaaaagaggttgttatctttaccaagtaacttgatcatataaataaaaagttcaaatcttgggacataccgcaataaaagaaacagtgatgtcatctaccggacccatcgttttgcttattcgcggcatatttacaaacaaaaagtaatttgtgaataaaacttttatatacttgttttagcgatctaaaagtaaaaaccgaaaaataaactttgatgagaaaacctcaaaataagctccaaattaaaaattaaaaatttaaattttggctgataagtataagtataaataaaaatatgagtccaaataagttttcaaggaggggggattcttttgcgctgtactgtaaaatggtaccgtgttcgagctgtaatctttcgtttgagtgttttgagatagtgatactcaagatcatacttacatatgattagtacgagtgctgtggttatctcatctattaagcttcaaaataaccaaatttcaacctcaccaattgttcgtaagtgtcatggagcatttatcttttaataaagttgctccatatattttctcatattcacacttcgagtagtgctaatcctaagtaagggtgtgagatatatatgcttgtacgcgtttgtaccagcgctaaacaccaaccctacctcactgttactgttaaacccaatatgttcatccagtatgttatatggccattgtgaacttaagtgacaaaacacatctattatatttgcatggattatgtaagagaaaatacatctactatattttgtatgagttatggaagagaatatttattttgtatgagttatgtaaaaaagataagggtactaaatatagtaatacccgagattttaaatgttcccgcctttttatgcacttacatgcacgtgggttttacgaataaaatacaccactgcataccataatatccaaattttaggccttattttgaatgcaagcaactttccctatttccataaaaattggacatgttattacgaaatcattatgtttttaattaaagccatgtgcacgaacaataagtaaaaaaactgtatcaaaaacaccaagagttgcttgaaaagataactacattaacccctatacaaatatgaaaaattcatattctttttcttcaacaaatacctagaaaatcaagacacatttaataccctcaaaaatactaaagatgtcaacctgatcctaagagactaaaattcttggtaatttcttgcaaaatcaataactcacaaaaaatatacgttttcgatcatattctaaaaaaaatagttatagagtctagaaaaataaacttgctgcttgtaatctagtaaaccctacaactaaaacaactggatccacacaaagaagcatacacaattcccctcagacacagaaagagagcagcccgggcccacgcgtcagcctccaccgcgcgccgatccccgtcgtccgtccccctatccgccacatccccagccatgtctctagtcgcaaatccttagactcacccggaaaggcagcgacccaaactctccacctcctcttccagccctccacaccccccacagtctcccccacctcctcccccaatttccctcctctcccccggcg

SEQ ID NO: 8202 - DNA, 2809 bp, Oryza sativa
aaggtcaacaaaattggtactttgtgacatcttgtctcataggctcgtttgctattgcatatgtttaaggtgcccattaattagctagtgtgagatgggtggtggtcctgtcctttgatgatattacatccaccctttgttctgagtctattgctctcatttccactcatttttctctcgtaaaagtctccctgttgtagccattttggagtccttccatcatttttagaatacccacgctgtactctctctctctctctctctctctctctctctctctctctcctcattttcgtttttattgtttttgttcatgtgattcttatatgaaaacgtttgctttacgttcatgccattcgaccgtccctcttgtttataaaatcggccctgaattcgatatcggtaactaaacacggaagaacatcatacaagatcaaaacttgatgatgatatctatgcacgatatttagatcgagttcagtcgaaacctacatcttcatagcactaattatggacgatgattttcaaactagcatattacaatatatccaggtatcacaaccatcgatcggctcagtcgtcggctagtcgtttccacacctatgttactgtcactacgtggatataacatgtatgcttttctatttgcgagaagacttatgacagggtccgactcaacttctatcctatccttattacaattccaagttctaatttgtaattgattgcatattcatactaaacacaaactctatcttatcttttagaaagaataaaagaaatgtttctcatatgaacccactcataatatatactccctccatccaaaatgaatatttcgttggttttgtcaagataagttaattactcttggtcttggcaattaaaaaaaaatagatcttaaacttttggatgaaaagagtactactttaaataatgctaatggtggtatccaagtctgtctcaaacaccataaactggtatatatgtggggctataaggtatccacacgtgaataaccatgtaattgttattcaaccgtatgctttaatttagcccttctgaaaataggcccgtagaataaaaacatatgatctagcagcatatttcagtacggctgcattaaaagatggcattatatgcctaatcaactaactatactataaacttattgtttttgcttttgttgttatcttttataatatatgttgcaacgcacggcctttagcaagtttcctaaatgaatttacgtgtcacccgtattattgatggcatttcatcatgcgttgcacaagtagcagcataagtcggttgcaacctgtactgcagctatcggcctattcgcatttgttgaccaagtgggcatgcaaaatttcgcgttgctttctgggtgttttacagcgcggctccgtgtaccgcgcgaggaaagaaaaggtgggtgtgttccacttggtctgcaagggaggcagccgattggcagccaaaaggcgccacatgcgaccacagctgcacccacacacccaccttgctctttctcgcaagtgctggatcctctacaaccaccaccagaatgtgcagcaaccccagggtcaaacggcaatgtcaaaggctatgtgaactagaactacacgtcctgagatatttgatgacctcatgtgggattaatcttcgactgtttgttcgcggtaattgagagagtaaaggccatttgacgcagcttgtagtagaaaggaatgtataaaaatgttcatgtttttctcacttactctttccctccacgagattacggtagagaaacaacatgtttttaaaagattacgatagagaaacaacacggtttaaaagaaaaaatgaaaaaaaaaacttaaaaagaaaacgtgaccacaggtccacaactcagtcacgtatacgagtcgctgacagacttatcacgtgggggcattttacacgttggcttgggcgcgcccaccgtactgtagtcggcatttggcgagtggataaaccctatggacggccacatggttccatgtgtccaccaaatccaagagacggtggactttgggaggaggatatgtgggtcgcgcgcgtccttccttcctcgcccctcgcgggctcgccttgccgtgcgcgtctcgcgcgagcgaatcagccgcctccacttggcttagctagctagtccagtactcgtgcccccactccggcccaacgccaccgcaacacctgtcccaccctccccgcctataaatccccggcgccggccgcgtcccccggacaacgccgcatcattgtgtccggctccggctcccgggacacgacacagcgcacgcccagagcgcgctactacttgctttcgagagggttgcgtgcggctttgcatgaggaggaggaggatgggggcactgcacgtcggcgagccgcgggtcagcttccagcagcagcagcagcagcaggtcggcaagaacgggcagcaagggcatggccatggcgccgtggtggaggagatacacgggctcatcaaggtttacagggacgggttcgtggagcgcatcccggcgatccccgacgtgccgtgcacgtggggcacgacggcgtcggtgccgggcgtcgtcatcgcgcgcgacgctgtggtcgaccgtgccacgagggtgtgggcgcggctgtacgcgcctgcggcggcggcggcggcggggagggtgcccgtggtggtgtacttccacggcggcgggttctgcgtcggctccgcggcgtggagctgctaccacgagttcctcgccaagctggccgcgcgggcggggtgcgccgtgatgtc

SEQ ID NO: 8203 - DNA, 1840 bp, Oryza sativa
aagcaggcctgccaaagttggacaaacatacttatcaaagcctcaaaggtcgttcaaagtgtgggctcaaaccacacacactaacttaatttgccgtaatcaacgtcttgtgataacatatagacttctaacctaaaattgtaagagttgtaaagatggtgatgaaatagtcaacaaggttaaatgaagagtgattataaactaaaatatagacttccaagaacaacatgttgatataaggtataaaataaactatcgatcgtacagtaacaaatattatacgaattaacactagagatcaagtatattgtagtgaagtatataactgatgcgaacaatatggtaataggaatagcaataaaaaaaatggttcaaatgggtgttgtggatgcgccacattaatgagggactttccaatcaatcaagttactaaggcaatgatgtggccacgaaggagaagaatgaggtttggacaatagagaaaatatatatctatcacctacaatgtacaaagagcctctagtaaagcccttgcaattttcatgaacattgtactttcatcaggtccagtgttcactgttctgcctccggacaggcagctgtttaggttaaaccactaccaaggggagaccattggaattcatcaagaaggttctcaatgaaccattggctcattgcagtgtcatcagtcatagttaatttgcaaagggcccaagaacaatgagtacacaagaacaaaacaatagctggctttcaactaaatttggcaaccaataaattaaagctactaaagaagcataaattgcaaggagccaaggatgacagaaaggtagcaactagcaaggatactgcaaaagactatcgaaatacaaggtcaaaccaggtcctattagtagcttcaatgttcacaaaacaaattagcttgtaggaggagtgcctctacattccttttctttatattcttctactatatacaatctagagaggaaattatcagctgataaacaaacataaatcaaagatcattgaaatgaaaattgccacttaaagcacacgaaggcgtcagtcacaagatgccaattccatattagcatcaaacttcagtgaatcaagccactcgatacaaaccaaaccaattctcagtgaaatcttaagtatgcaactaaacagcaaaattctttcggcacataaatgaaatatagcacataagtttgattgtacaaaagaacaaaagattcaccttccagcaagggtggcgtcaaaggtgaaggcgacgaggaagcggcccgggcactcctcatcaggctcaatccgaagagtctccttcttgaggttgacgtcgttgcggattgtgatagccttctggtgctcgacgtacggcgtcggcatggccggctgcaatccgcaggggtgcggccgcccagagaccccaggccaccccgggtagtgttgcgggtgcgccgacggcgggaactcccctccggcgggcacccccgcgccgccgcccctgtggtggtggtcgtacggcgccgggaggggcacctgcagggacggcggcggcgggtagtagttcccgtactgagggtagtaccgcggcaggttggggttggtgtactgcggcggagggtacggcgtggcggcggcgaacacgtagtggctcggggacgactccggcggcggaggcgggggaggcgaggacggctggtggtggtggccgtggacctgatggtggccgtggccctgggcggcggagcctcgtcggcggtgaccaggggaaccccctccgccgttgctaccggcgttgcccatctcccttccgcggggcagagatcaacacgga

SEQ ID NO: 8204 - DNA, 4197 bp, Oryza sativa
ccctcctattaaaccaaggcaccctcccttcctttccctctcccattcgccctcgctccaccgcgccattgctgtcccctctgtctctctaccaccgaccaccgccgtcgcgtgtgccggaggagccggtgcgcgctaggacgcggaaggggactccgggcgctcgtcttcttcctcttccccggcccgaggccggagagatcacttccgtgccgtcggcctctcgtcacagcaccccgcctcgtctcggtagggcatccctccgttctccctcctcgctccatctcttccccttagctttgagtagcagctcgagtagtaccccagtagctagttggcgccgccccaagccacgccgccgctcgcagtaggctcgccgccgtcgccgcccgcgctcggtagtagccgcccgtcgccggccttcctcggcgatgacccgtccaatccgacgctagaaacggattcctggagtcgcgtagatgctctagctcgctcgaatcgaactcccgtcgcgccgtcgccgttaccctctttcctcgccgccggttgccgccgccgcaatccgccgccgtcgggctccttccggcgaatccaatccattggctcgtctcccctcgtcccgtgcaacctcccggtgtgctcgctttcgcctgtatcgccgtggttcgccccgctgctcgccgccgccgtccgccatccgttccggccggcgtcgtcgtcttcctcccgccggcccgcgtggctgccacaaaggcgccacgtcggcgccagctcggccacgggccaggtcggtttgacctcagtcaaccgctcctccgatccgttctcctgtacgcgcgtggtccacggagagccagccggctgcgcttgggcccgccgtctcccagtccacctggtgcaccatctgtgagccgcgtccgcaaacactagctcccccgcgccgcgtaaaccctctctcccgtgcaccgagtcactgactcgtgggctcgtccaggaccccgcacgatggatccggctcacccggatctctctctctctccacgcctccttttgttgggccgccttctgagcccgcgccagcccaattggttggccgagccgcgccaactcctctcgggccgcgctcaagccgcccgcaaagtctacatctcttccctatctcgtttctaatccaaaaaggaggttaataaatccttttcttttagtccagtaaatcctttagtcttagagactccatatcttctcaaccgtacatccgtttgactccgtttaacttccaaaattcctcaaatatcgagatctatctaatggcacgcttagaggtcaataatagagctttatttttaccgtttgttgagttgtcccgtttcgcgtgtagtttcggagcccgaagacccgcagtgcgaggatttcgaggatcaagctcaagatctcgagcaaggcaagtcacctttgatcatcttgcacctataatttaaatctaagtatttctcttccgcaaatattgcatgattaggtttaacacaagtaatttggccgcggcttgcgagaaagcctaccggccccaatcctaattgctgcaattaccctccttgaattattgaacaattaaaactcccttgtcgactgttgtgcttcgatgcacgggccttcaggcacgtgcatgggaacacctcccctcaaacttaaaatatccaacgatgggtaaaacttgaggttttacaaaagacttggaaaacccgacgcctgggtcggtgcttgcgaaccaaatgaatttccaaaaatcgcagaccgggggacgtgccgggagcacggtttcccactcttgcacttaaggaccgatttcctttggaatttcatccgtacatataacaagtacgaccacatgggtggaatgggacacccctggctgagtaattagctaatcaggggagccttgatgcctggagacaagtggattcaccagggtggtgtcggagaggacccctgggcttcctggcacagtatggtctgggacctaacctgttgttggtctgggacccctctcgtcggcatatggtaaacctgtgtcggctctcgaaatgccttgttatgaaagcctcaaggtcaccagacgtggctgttctgcacgggctgggtgatctgggttagtaatgtcgtgtgggtaaagtgtgccccctctgcagaggttattaaactgttcgaacagccgtgttcacggtcatgggcggatgtaaagtgattccttagcgtagttttgtttgactaccgctttgtgaaattgctgttgtggacttggggttcgatgtttggaacatctgtggctgacgggatcagctaggcccgggtggccattttaaagttgtggccgggtgccaatctcaaatctatcaaagactgatacattgcacatactccgaccggacgagatgcactgtctcatccgtgtcgtttgagaagcactcacttagttgttttaaaaaggagtttaactaaaaatcaattgtaaaaacaacagcctttcctttgaagccttcattaaacacataattcccatgacttgctgagtactcctgtactcacccttgctctatataaataatcccccccagttgctgaagaagatgagatggatcccgctgacgaggagttcttctaggagcaagtcggctatgatgagttttagggttttgatctagttcccaagttgcgcctgtgatgaatggtccaagtcttggcttccgctttcctcttttgtaatgcagttgtgagctcggggtctgttcgcagcccaacatgactgtaatcctactctataataaagagacctctgttgctgtgatattctgtcttcctatgataccagcactgtttcctgggactggtatcggataacaggttaatttggggcgcctcgggctggttccgttcggggctagttcggggtgtgacacacaccccctaaaacactttattttgtagttgtggtgtagtattgcaccatatttaaagtttttttttcaggacatatttatatttatacaagttgttgaataaatgtaaaactacagtcgccatttggctgtttacaaaatcaactcaagtttagaccaaagatggcatcaactatcatatataagggtgcaatataatgtttacaacttgtatataaaagaaatccaatttttcagcgccgaaataccgaacattagttgcatcgaatgagagaaacacatataacatcatctaaatactagatgaaaccccacgtgtctcaacaagaatattggatgataataaaaaaaaataaagtataagatgagtttgttttttaaagctaaatgtcgtaactttgtatacatttgtattgaacgatcattaaaagaagttataaacaattgagatgatacattttattacgatttaaatcaaacatagttctatgatccaaaggcaaaaactaaggtaatgtggatttatgaaagaagaacaaaaggtggacaatttgagctgtaaataaatcatgcagtggttagaattaattgattggtgatgttctttaataagaaaaggaaatcaataacatcaacttcacttagtgaggataaattataactatatatataggatgtaaataatatgattgtgctatatatgtctagatggcggagataaaattgaagtagttttaaatcattgaaatattatttaagggtaattgtatttttactctgttttgaagtctaactaatgattttatcttgtttttccaagtttactcatttgacactcttttttttaaaaaaaaaatgaaaatcaggtcttgcctgttttgtaaaggtaacctaacggtgttaacccggaaaaagaaatatcatttatgtcctcatcctggtttaccgagacaggtgatggtggtatccttgttgtcgcaaccttcctaaagatatcgtttgaaggtctatttcctaccgatctttcttcatgaggtatgtcctcttatggtggcactttataccactacaagatgaccacgttggcggatttatacggggaagaacggatccatgctctatgtcatgatttccctctccaacccaaagatgtgaataatggagctaagtgtagttgggacgttgcactcctgtttgttcctcagcatggtgcgattttgttgaatttttttttcttatgatc

SEQ ID NO: 8205 - DNA, 1558 bp, Oryza sativa
gctgttgactttgatcggtgaatcgggtgacggctgctgctgctcttcagctttgttgttgactttgatctcaagtagccgctcaacgggctgtcggcagatcgggcaccgggtcgtctggtacctcaggaccttggcacactcgctgcacatacactgtaccagagtatacaaatgtcagggtttactggagatgctaaaaatgcatggaaatggctgacagtcagcaaaacagcaccgatttgtttgaaatagttttcagaatacgaaatgtgaaccaggtaagccataagcataaaaagtatggttttagaaacagaataactttgtagctttatttaacttgatcatggacccctaatgctgcacatgaactagtcaatacacaaatcggatacttaccatatgcctacatgggagaacggtagtatcccttggctccgagaggcaaataacacattctttcccaggatcattggcatcagcatcgccttccaccgagtttcctattccatatatttcctgcaactcatacctagttccattgacccaaaggatctggctagcaactcgaacttgataatcaccgctttctttcttttcaaacagagcctgtgtgatctgtgagtttggagttttcatcttttgatcttctccttccaacttttgatcaacaggcatggttgtttcagctttaactgcaagtggatatacatccatgtccccctgcttcaataactcggaatcctcaaacacggagaagttgattccagtgccagaaggctgtctgaacttctgaccaagaccctctttgaagcttacagtaacaggcttaatcaggtcttctttcaccgccgttagattgcagttgagctcttcttttgcaaagaagtaaacagtcatgctgtccaaagaagtagaacaacaagaattgtttaaacactttgtttgttcgtattaaaaataaagatttactttgtttgtagtaagatattcacaatgcttgacacatacaacatgaatagtaatgatgacacaagccataagagcaggtacaatagcatactattagccagctataaacatattttaatgagataaaagatgagagagaagagcaacgggctacagatctgtagccagctgcagcacggactccaagacgtaatgtgtgtatgacaggtgggaccatatattaatagtatattaagtaactattgtatgaattggctattagattggctatagatgaagtggagctagtagtaggctatactattaaacttgctctaattaacaataacacggctttagtacaaaacagtaggaattctctataagaatatcagtaccacattccgaggaaggatgagccaaattgtgctgggtaatgtgattcccactaccacggacaattcaatggagaaaaattctaacacattcaaatatttaacaccctatcgcatttcaaactatttgtgagaaaactgtagcaagaagcaggatataacagaacgttattacagcttctggaacataaatgcttgataagggaaaa

SEQ ID NO: 8206 - DNA, 6194 bp, Oryza sativa
ttttgactgacaaatgggtcccgttaaaaatttttcctttttctttttttcttctctttttttccctttcttctcctttctctatgacccgagcagaagaaaggaaaaaaaaagaagaataagaagaaaacgaagaaaaataaaaagaaaagaagaaaaaaaaagaaaatggcacgtcatccatgtggcatgccacatcagcgccacgtaggatcctagaggggatgtgtcgatttgggacctagatgatacacttttacaagttctgggacctggatatgcattttgagagtttagggacctatatgagacaaccatacaagtttaaggaccgccaatgcactttactcttcattttttgccggatgaaactgtggattccgttaaacttaaatttctggtaatggaatcgggggaggggtctcctcccttgctcaaaagaaaagaaggcatagtgagataagacgtgctaaatcgtattagacaatgccctttactagcgtgtcattcaaaagaaaatgtgtataaaattgtacgacctgttattatctaggaaattggggtttgttttgtgctttatgaaaaaaaatcatgattaactgctggtgccttatcgacatgtaatggaagcttgagtgatacacagtaagataatatgttctgaggtagataatatgttctatctagtataagagaatcaaagtgggtggaattgtgcaccatctgtatctgctagatagaaaaaaaaatttaacttacattattctttcccttttcttgtctgtcatgtaagcgatatcttgtgagagggagtgcagtcgaggagaagattaccgcctgataaagctttccataattgattttaaggtgagaaattctaacttgtccaccatcaagcacctactatttttgtgctatatatttccttggagttggatctataagaagtatctttgctcataagagttaaatatcctcatgaaactgcgatgctcatttgacagaacaagcgagagaaggtggctgtggtggaatgcaggggccatgatgctgctcggttgcaaaacattgaccatttgcatgggtaactactttttgtcatggatggatttcattagaactaatgcagaatttactatctatcaacaatttctcaaataagaggattgtactgagatactgtgaatactcattttctgaggctctgtaggcacataattggattacaatgaacaccaaagcaacatactatagtagcatacttcgaataaaaccgagaaaaggataaatggctcattgtaccaattattagtgctatcttgtgtgtctttgttctctgtttttcattaaaatttctgttggatgcaacacactgtttcgctgtggcattggttctttgtggtactttttcaagcaaccaaaatgctgttaattaatgcataattgctttgggtcttactggcatgaagttggagttgtagattaatgctgtaacacctttcatattcccaaaatgctatgatgtgtgttgattgtcttatctttaatcagatatctttttgagaatgcacataaggattgcacatcttttgtaattagatgtcttgcataagttctaatgagtaaaggaagtgtgaaaaaagtaaagaggggattaagcagagtgagatctagggtctctcttggttgactccggtgaatgatggtaatggttaattatagtctgaggaaactgtggactcggtgcttttttactatcatttatttgttttatgctgagcgtgaatttttaatccaacctcaattttcctgaaggaataaatattttgtgcagttgggaagatgacattgttggtttggttgaaaagaaacatgggaatcggaaattctcgatctctttcgaatgtgagacactgaaggctgataaagctgcagatgagcacattagcaagtatatgccaaatctaagtggaatggatgccatcggtaagcacatacctatgtcttttgttgtttggggagtgcgcaagagagattcttggccttccaccatagtattttagttcctgcagaagtgttggggacttggggtttagtgtcaggttgtagagaggacatgtatatcggcaccacactagtaaaggatggatggtttaattattccgcaccaattttatcattgatccagcttacatttgagtgcaagtttccactgtgttcagtgtgcaacctgttgaaaaatttctactactaattcattctattttacactgcagtaaatatagggaaaatgagtatctctggcatcaatctggacgaggacgacgaaccaagtggagacaactaaaagcagaggcacatttgtcatggtgtggtagcagtggctggctggcccttgttctcctccctccttagcttttgaaacctcgcttttgaaacctcgaagaaggcgtgactgtgtggttaccatcaaacgccaaaattgcatccaaaaattacgtataccttggacagtcgtctgacattctcagtaatctgctaatgttaagtcaatgtggtttgtggaatcgtgggcaagatgtttcaagaattcaagtactcctaatcaagtgtttagcgtaatgtttgttgctgcatccgacaaaaaccctggagggattgtacacttcggtttggttctggtaagaagtgcagtccttgtctctgccgctgccactactatttgccatgcttgtacggcctcactgaacaaagcttgtctggttatgtgtcttcaattctgttgcgaccgtgagctcgtgaatggggtccggcttaggccgggggggctcatctagctcgttcggctcgcacatggcttgtgcaggacacaaaggaacatgcgtatctaccgaggattcaaggatcagcggtggtagcaggctcggattggacattttctaataccacgaatctaaacaggctgtatatgtcgccatgttggttctatgctcttatattttatgacggagatagtagcaaccaatctacagtaccaagctgcaacaggagtactgtgcatgcttccgtacaactgcttcaacgtgtccgtgttacacaatagtaaaatgcttcttctccaagagcacccaaagcatccaattgttacggagcaatatcatcatgaagctttggccgtttggttggtcgaagaaaaacatgtactttgctctggaaatcatttgagaatcctggattgatcatttcttcttcagccaaaagtcaaaactccaaagatatcgcgacagataagcacagaaaagaaaaaggcagtagtatgatatttgggcctatgcccacgaacaaaaggaacaaaagtctaggggagaagataagatttttcaaagcagtggagcccagctaaaccatagataccgttcatgggccccacaaaacggaacctgtccctcccgtccacgacatgcctcccactacgcccgcacgcacggcaggacccccctcgatcggatgccacgtgtcgcgcgacacccaaacccacggcccagatcgcttgaccccgtcggaaaggaacggcagaaagggaatggaattggaacgtttctctgacacgtggggcccacgctacagtgggggtgggacgcgtcgtcagcgatttcgttggcctcgccctccccccctgtctgccaaaagaagtccccggagaaagtgcgggcgagaaggggaggaggaaataccgaaatagaacgagagagagagagagagaggaggggagaaacggaaggttggtggtggtggtgaaggaggcggtggtgggatcgatggcgtcgcgcgtgcttccgtgagatttgtgatcgcgttcgtggtcgcaggtgagccgcattgccgccgccgccgcctccacttgtgttcttcaaccgcatgacgcattgttgtttcccttagtttgtgggggaggaggggggggggattgacttctcgcatgtctgcttgatatggtgaagtgaatctgattctgcatgcggatcgctgggggtgcagtccgaaggtttgatccataggaggcgtgtgttttgcttaattgcttgtgataattttgggattgtttggtgtacatcgtaacttttgttcatttcatattttataatatgtgcttcgctgcgaatttggtgcctgttcaagtggggtgcctcatttgatgaattctatttagagcttttagcataactacgtactatgatctctgtataacttgagttatctgctggaggcagaaatttccatgtggttcctacatacacgaacataaatgcattccgtaatgccattatgaaacagagttctcattacgtgcggcataacagaaccaaaactgtagggcgtatgctagtagtctgccatatttactctgtctgtaactctgtaactttgtttatgtttgtttgttatctattgaacatacccacctccaactaacggattaatagcttataggctgatatttagggtggatgtggaagccaactcaacagatttgaagccactgcatgaggggctaataaataagtctacatgcttcactttcttgtggtaaacccttattcctattgttgaattttgagtttcacgggaactcacttcgttctggattcctgtcacctcatatactttactagtagtatttaaggaagagactgggccaatcaaatggttaaatcacatgtatattttcactttagctctgaatggagagaatcattctgcattcagcgattaattattgaagtttgatttttttaagactattgatgtttgagtcgataatatcattgtgccacataatatttttgtaagaaatatggtgtaaatttatcacaggtaaccttgtatgctgtatcagtctctagagaaatatcaactcattggtggaaaagaaacattctggtgtgttcataactcagccatttagagaagacaatgtcagcttcggagttcaggattccttaccagcaagtaagaggggatatgctttccttacagtcattccagtatatagttcaccatttaaccacttaagtaaaagttcagttgattttgagtatatattgaaatattggactagtgcaattcattcaaagtaaaaaagtaaggtgaaggtttcattttgttgatagagtgaatttctgttatatgtttcattacagttatgatgttatttcaagacaatattttagcagtaggccagttacttcttcaggcataaagagtgaatctcattgaaggaacaaaatgaacatttcaatttttttcagcagtctcggtaatcaaagttatgaatataccattgctctatagcacctctctctggcaaaatattagcattttgtctcaagacctccttatgacactatattaaacactatgggcacacaatacctatcatgtaaaagttttttatttttgctaaactcaagtttcacaaggtcaattacatcactttactgtggcattagtgagtattcactccattttgttccatacttttgataggtatcatcttcacagactactgagaatgcaggccagttcaagatctgccgatgtggggaaggagacccaaatacaaacacatctgaaactggtgataaatcaccaactagttgtcctaattgccaggtttgtgagatttcttgcacttaaaacttgtgatatgtatttatctaaataacctggtgaacgacttattgtaagctacttgagcaagtgatacacgacttgacacatcactggtttgtagctaaattaccggattgtctatagatacataagcttccatttctatgcatatttgcagcttattcatacttgaaacttcacttttgatattgatatgtatcatttgtgctttggggagcatatgaaaggggggtttgttgaattcttatcgtaaaaccgcataattagttcagagctatgttcagtggaaaaagaagtagacatgattgcttttatgcttcatagtcgcatgcacaagtttccatgaccaattttaggtactcttctgatgcaggttcttaagagtggacatttactgctctcatctaaaggtacgatttgcagtaatatctgtaacggttgcatggattctgtttttagcattaatagatactccctccgtcccataatataagggattt

SEQ ID NO: 8207 - DNA, 4077 bp, Oryza sativa
gatccgagccgttggctcaacccctctcgtgctcccctttgtaccggtgaactccctctcgatcgaatcgctgcgtcgtgctccagtgaaaccccgccgtcggccaccgttggttggagctcctgttcttcttcctcctctctcccggcccgcgtggctgccacgtaggcgccacgtcggcgccacctcgacgcgaccgggtcaaagctgacctcggtcagccgcctccctccgtcccccaccctcgcgcgcggtccacggagagccaacatgctgcgcgtgggcccgccgcacaccgcgtccacccgcgggccgcgcgtggaccgcttcccccccgaaccctagcgccaccctcgcatgcgcccatcccaccgtgggccgtatcaccgacaagtgggccccaccgggaccccgcgcggtggaatcggtccaccgggccgtctctctctcccccgcgccccctctgttgggccgcctccccgtggccgcgcccggcccaatggctcggccgagcctccttcaaccctttgggccgcaccaatgccacccgagaaaagtccaaatcacatccctcatccctttaattttccaagggatttaataaatccttttcctttgtttcataaataaaattctttattccaaaattctatgaatcattttcctttggtcccgcacgtcagtgactgtcaataatattcttgagaatattatttctataaattccataaaccatttctcgtcttccagaaattccaattaaacttccaaaattcatatcttcccaaccgctcttccgattgactccgttcaacttctagtaattccgtaaaattgagatctatttaatggcactattattcagtctaaatagggtctttttcttggtcttttgtttaggtttttgtttgtttgcgtatagttgcggttaccggattttcgccgatcgcgggttttctcgaagattcgtgaagctccgtgaagaccttgagcaaggcaagtcaccccttcaaccaattgctcctataattggaaaatcattattattttgtttgcaacttgcattattagaatcacacacttaacttgcttggcctcggtttgcgtgccaaaccgacggacctacccagtagtcgcactaattcctataggttgtactaccctgattccttgtcgctccactcttgtggtacctcggtatccgtgctctctgagcgcgtataccaaatatcccacatacaccgttgattgtcgaaaaattgggaaatgggtttgagaagccttgaaaacccgacatgtggtgtcggtgtgtttaaaaataaaatgaattgtgaaaactcacgatgcggaggtggtgcctgcgtggcgctgtcccgtattcgcatataaggaccgattcctgtgggaaactcatcaatcataacaaagtgcaaccacaaggtggaatgggacaccctagctaagtaactagtcggttcagggaaacctcgcatgccaatagttggggaacgccggggcggggtcggttggagccaacccgggttcctggtaaggcaagaacgcgaagcttgccagattaccgatcgaggtggttggagtttgatttgtgaaaactgatctggcctatatttatgtgaaggatttgatccttctatgtggcatgaggtaaccctgggtcggcttgggaaaggctttgttgcgaacctccgataccgacaggtgttcggaataagttcgtatcttgtgggtaaagtgtacccctctgcagaggttaactaactgttcgaacagccatgcccacggtcatgggcggttgtgaggtggttcccgttgcgtagatttgtttgcttgtgctttgtgaaaagttgttgtgtgggaatcgtaaccagaatcagcctatgtggcagatggatgacctgagtggtcagaaacgaatctgtgtgattcgggatgtctgcgggcatcatagactaggcttcccgagtggaagtggattgttgtgctgctgggcagctggactctgggagtccgagaaaatgaaaaaggctctgggagccgatttaatcaagtgaaatggctctgggagccgagaagtaatgatctgacccgggaggtcggtacattatcaattgagttgttgaaatttgagacgcaagtctcttttcgacccgaacttaaaaagaaataaatcacttagtgatttcaaaatgatttcaaacaaaagatttaccaaaacaaccttgcctctcttccaaacttgcatcaaacacctaaattcccgtgacttgctgagtacgaaagtactcacccttgctctatatatgtatatatagttcctctgtcgtgaagtgaagatgaagtgaagtgaagattagggtttcgtcctggttcccagccgtcgcctgtggtgttgggtgttagaccgttggttccgctgctgctgctattgttggtgtttgcctcgtccgtgtcgtcggttgcattctcgggctgtctgagctgcaacctaagttaaggtaaataagtcctctatttattttaaggattgcaatgattcatatttgtcaccgtgggtaccagcgctatgtcctgggactggtattgagatcgcggtttcgtaggaagcggttcgcgccgtttttcctacgacacgctcctgtcaggtgccgttgtacggcagtgccggatcggggtgtgacatatttagatcgtctggtaaaattttacacgctatcacatcgaacgtttggacacatgcatgaagtatttaatacagacgaaaaaaataactaattacacagattgcgtgtaaattacgagacaaatcttttatgcgtaattgcgccatgatttgacaatgtgttgctacagtaaacatttactaatgttgggttaattaggcttaataaattcgtctcgcagtttacagacggattatataatttgttttgttattagactacgtttaatacttcaaatgtgtttccgtatatccgatgtgacacgccaaaactttacacccatgtatctaaacacaacctttatcccgtcgatagcgaggcgtctgtgatgacttcgtcaatctctaggatttgccgacccagtcttcgaagatgctcataggggtagggtttgcgtgcgtgtgttcacaggggtgagtgtgcgtgcgttgtgggtgtcttgtgttgtactgcgtaattcttaaaaaaaaatgaaacttttaaaagttttatgtcagcgggtttatttccaaattcataaagaactagtactcaaaatgttttgagatgaattatggggcaatggggcttctgaagaaaatctttattattaggggggttacactaggctgtgtttagttcctttaaaagttaaaagtttgatttgaaattggtacaatgtgactgaaaagttatgtgtatatgacaggttgatgtgatggaaaaagttggaagtttggatccaaagtttgatctaaacacagcctagcaaaagtgcagaactccaccgttttttcggtgccaaataaaaaaaaaaacccaccgtcttcccgtcttccgcttcctgggcggcgcaccgcggttctttggcgcgtggggaacaacgatgagctcagtctcggacccccaggcgaacggcgaccaccggccgccggcggcggagatggaggacactggggtgaaagtcgaggaggcggatgcgggtgagacgatggaaggcgtcgcgtccatcgcgctactgccgtccggcgccatctccggccacttcatccgcctcccggactccgtctgctacggtctccacggcacacgtatccatctctcttcgttgcctattcctgcacttgctggtgcctgatcatggggggctggctcttactgcatatttatagcctgaatcgtctgcggtctcacccaaaaacccttttgctctcaccaaaaccctctcttgctcatcgcctaatgagaagcaagtgatatacttttttttttctgttggcgaaatctgtgttggaatcattgcaaatgtccacattctgtcccagaaggaaaattgattgaaaagattaagggggtg

SEQ ID NO: 8208 - DNA, 37860 bp, Oryza sativa
  unsure (1)..(37860): unsure at all n locations
atccacaagatctttagaagctcacgggcgacacctaaccgtctaggagaagatctccaagagtaataagcccaagtgacaacccacaaggtatccaaagtgctcaatcagacctaatcttcaagccatctccaaaacactcctactctctcatctaatctctcaatctcacaagataggctctagatttgagtggaggaagtaaaggaagcttgggagtggctagaaaaccctagaacaagaatgaacagaagtggaatggccaaagggtgacctggggatgaaatccatatatataacgactaggtgacgtcatctagccgttactcacaagtttgaactggaaacctgccaggaggttccgggcaaaagtgccaggaacttctgggcagtacttaggaaattttttgcaaataaacggcgcccggaagtttcggccagaacctccgggtagccctctctgtcccgaggagaaaatcatttttcaaaaatgattccaaaaatattttgactcatggatatgactaagagcactttgtataccctagaaccacacttgaaacccctcttaatagtacggttttttctaaactcaatttcaaaagtgaaaaacctagtctaatcaccttcgttgttttttgcacttaggaacattcaaattggggggtctccttgcattcttagccatcacaactagctttgggactaaactcctgtgaataaacttgataaacacgttagtccgctttaaccaccttgtcattaatcaccaaaacccactagggggtttaagtgcatcttcaaagtccattccactaaaaaaattaaccagttgagttacactcacttcgttgcttcggtgtatcatgataatctcaattcaacttttagacattttcatgtttgccttggtggtttccagaaaagtgaaaaagttcttagctttttattatgatcttttaccaaacaatctgtagaactttttcaagatcatttttcggtatctgatttacctttggcaaaatttgctaaaggacactaaaagtttatggtctttgctatgagacattcaaagcacgcgtatctttttatggacaccgtaaaaacatggtaattagctgttggacacccaacatattatattttattatatccggtcaagatggagagcgaaaagagtgttggaagtaccattttccccctcgggtcgatcggcttctgaaggtgattgtgactatctcgaatcagaccaaattcgatcccctctcctcgaaccctaagttttggggcaatgatgatggtgcggcggcgagttgcgtcgacaacggtgagctctggtgagagcggtggccgattgaagcaacacggtgttggcatcgatggagctatgagctcagatcacatacgacgatggctggaattaatgtggccccccaacgaaagtcacccgggaaggggtcacccaaggtgaagaaggtggcggtgaagaaaatggcaagcactatatctcttttgaatcaaccgccactccccactgcttgaatctgccatcaccgcaacttgctgatgcaccgtcctcaccatcattgaccgcttgtcactgcaccattctcgggagattgagagtggaatgggtctagttcgaaccggtcccaatcagattaaacaaagatagccccaagggcaaacttgccttttatttaagtttctctcaccttcttgactgaatataataaaataattcatcgggtgtccagcaataccaagtttttgtggtgtccacgaaaagatacgtgctctttctgtgtctcatgtctcagtaaataccacaaacttttcagtgtaattgtccttacctttttcacccaatgctcaagcttgcaattgacatttggaatgcaacgtgcaagggcttttactcaagagtggaaaaagtatactttgactcccttaactatgacccgagtatgattcataaccttcaaccataaaaccggatatatcaactcctccaactatcgaaaccagtgcaaaatatatccctgagtggttttggaagcggttttggctgatgtggcacctacgtggcattgttgacccggtcttcatcccacgtggcgttgatgtgtcgcttatgtgtcattttataataaaaacaaaaaaacaaaaatatgtgggactgacctgtcattcacataaaaaatagtgggacccaccgacatgtgggccccacatgtcatccccttcctcctccttcctctcccctcttctctctccttcctcttcctccttcctcctcttgcgccatggcaatgcttgtcgctgcctccagtgtcgggatggcgctccgatatcggtcacacgtcgtctctgccgccgacggagtcaaaccacttgcgcacggcgaagtcgtcccgcgatggcttgaggacgagcgagaaagagacgacgccggctgtgttggccttgatggccatggccatggctgaggcggtggcgagtgagaagctcggcggcggccggctctagaaggaggcggcggacaacggcggctggggcggacacgacggtctcgggggcaacggtggtcccctccccttcttttcatgctgatcttggtgtgtccttcttccttttattaaaaatgtgtttctctctcttttattggctttctgggcgcatatgttgctttttttctttgagattagtttcattggtttaccctgccaagtatacaggttcttccatctgttcagttcttgttcttccctccccttctgattcggctcctgggaattttctcatccctgtgaattttttttaccatttgcttgcacatcatcacaaggctctaaattaatatgtttttgtttaatcgtttggtcttaaggtggttggacggttagcattgtaacgccccgattttcgttcgggattaaaaatcatttaataatgcatttcctagaaattaaataaaagttaaatcaatttaatcaagtgaaataaatgggagaattaaaattttcctttaaaaatcattggccgggaatattttgtaatattctttgtgccctaatgtactctccggaattttccgtgaattttcggagctcgagaaatagttttaaagtcacaaagttcattaaactaatttaaataaaaagaaaacaaattaaatttccccttcctccctttcgggctcggcccaaaaccctccctccttcccctcccgcggcccggcttgcctccccttatagcgcaagtctgtttttcctccctcccggcctcccctctcactcaggccgacaggtgggacccgtggaccccacctgtcatccccaacctccagcccgggccggcaactgccatggtcgcccgagccgccccctgacgccgccgtttccgcccaccttctacaccccgcgcgcgcgcgctcgtccgtgggacctcgccacccacgtccgcgccgttttcccccacctttcccctccaaaaccgccacccacaccccacgatgccgcccacgccaccggcggttgccgccccgactccgcctctcccgggctcgatcccgccttccctcccctataaaaacaatccccggcctcccctcatccatttccccaattttccccaagccgccgcgccctctaccgagctctccacgccgatccccttcgccgccgctcgccagcgatctccagccgcccgccaccgccgctcccgtcgctgccgcgctgcgccgccgccacctatagcatcacggcaccccgccgcaccccggcatccactccatctccctcctccaccgccggaaccaccttcccatcgcgaggccgagcccctaccgccacacaccgtcttcagccggccgctgccgccgcgttagtcgtcgccgcacctcaccgcttgcgccgtcggcaacgtcgtgccaagctctaccccggcccctactccatctcccctctccgcctccggaaaatcgccgcctcgcgcaccacctctctcgcgctgccgccatctcgcctccctccgtcggccgcctctctccggcgtcgccccatggtgagcaccccggtttcctcttcctctccctcctggcgccgtgcgctgccgcttccgtgcgtgcgtcgccgccgtgccgtgtgctcgaccggccggctgccgctgccctgctcgcccgggccgatcggtcccctttaccgcgcctcccttgcatgcgccgccgctccctccgtcgccggcgcccctcggtgaggaccccctccatctcctctccctttcccctcttttcgtcgcctcccgcgcgtgccgtcgcgccggtggtcgtcgccggcgaccatcgggccgtgcgccgtcgctcccggccggccgaccggtgagccggctcccgctcgcccgtggccgcccgatcccccttcggggcgatctgggccgtccacgtggccttcccgtgccgcccgcgtcggtgcctctgtggcgccacgtcggcgccacctccgctagccgtccgtcgtggccgccacgtgtctgccacgtggtgcgcccgcggaccagcgcgtgcgtggactcggtccacggtgcgcccgccacccgtgagtcaccgacaggtggggcccgcttgccggcgccatctctccccgtcggatgacgtcataattgatttaaattgcgcaataaatcgagtttaattctagaaattcatttaaatggctcaaaacttctaaaattcatatctaattcattcgaactccgaattgagccattcaacttgcaaaattcatctaaaattgagctctacatgtttgtttactttttatgtactgtttccttggtttttattagagtttttccttgttttgcgtgccagcgtgtagtttccgtcgtttcggaagtccgcggtcgcgaggaaaagagttcggaagatcaatgtgaagaagcaaggcaagtcacacattccccttgagcatgttgatcctaatttacaaatgttttaccgtttgcaaacaaatatgcatgttttgctaattacatgggatcagggttttacctatctgctcgcttgtgccatgtttacttgatatctatcctttgtcaaccttgggtaatgaatcgactagctcatgttacttatgtgacctagctagaactatatgcttagccatgcttaattaccactagctcagttgatgggataattacaatattagacctttttagtatcagagtgagctgcgtgctcgagacacctggccatgcttcatggtcgtaattatccaactaaaatgcgactgaatggtgggctgtgggtgcatggttttgctggtcgcacccatggcagttaaggaccggttcgcgggatgccctggaagaacttatcgtacttaccacaagccagcgtgggcaacggctgggcttgtagtgtagcttttctctagccgacgtacccaggcgagggtgggcgtgatggagttgggtcggccggggtgtccggttgatcggcttccggattcaccgcggcacgaaaggggggctgcccgttgcctgctggggacgggggcgaaccctaaggtgtggtgcgatcggttagagggggttatgcgaagggtcctgtcacggcctctttccggtatgtcgtggtggcatgtcggcgcacggaaacgtgtcgtggggctgtgtcttgtgggtacagttgtacacctctgatcagagtaaaactattcgaatagccgtgcccacggttatgggcggtcgaccagattcaccgtgattagtcccacctcaataaatcgacctaatacactgtagtttaggtgggttggttgggcctgttcaacgtggtgtagcgttgatcagtggagatttaatgttactttaattactcaacggttttactgttttgctcaataaaatgttttacaaccgcctttatgcaaatagccacaaaccgtccttgtgttccccttgcacgtctgcatcgttggtgtggcttgctgagtacggtggttgtactcagccttgctattatttcccccttttcagaagtgtagtgcttctgagctgaagatggagttagaggaccaaggctcagaccccagttgagttttgcctgtggagtggagctgaagccccgctaggatcgcctttttccgctgctgctgcttttgtttcggtgtgaggactaagtgcctcttctgtaagtattttacgctttatttacgttcggaactgtttattacttgtcgttttgtgtaccctggctggtcctggacagggatttaatacacaaaatagtctggaaatttgggctaaatttctgggcgtgacaagcatcttcctcaagctgaaatctgggaggggtcgttaccggcggggtcccggatgcgacgacagtgggaagtcgaaccctgtgcgcggcggtgctccaggacaggcggcggcgttaagaccgaagtggttttcggcggcgtcgcggatagaaggtgaggcgggcagctccggagctcggcggtcaggcataaaccggtgcgacgcagcaggtgggcggcggcgcttgggccgagagaaaggagagcgaggggagcgaggaggacgcagaaagaggaagaggaaggggaaaaggagagaggagaggggagaggaaggagaaaggatgaagatgatgacatgtggggccccactatttttatgtgtgaattacatgttggtcccacgtatttttgtttttgtttttattctaaaatgccacataagtgacacgtcaacgacacgtaggacggagaccgggtcaacactaccacgtaagcgctacgtaagccaaaaccgcttccaaaaccacctgggatatattttgtaccggttttgatagttggaggtgtcgatatacccggttttgtggttggaggtcatgaatcatactcgtgccatagttaagggagtcaaagtatactttcgcggtcacgaaaagtttgggccgcatggcccacaatagaggatgacacggtttatctgtgggctgaattgggcctttttggttgactcgaatctgcctttccccgtcctcccttcctgtagcagagtagggagagcgcagacacacaccccccatactgccacaagggccgccgccgccgccgggagcgatggccgccgccacctccatcaacgccgtcccctgctccgctggtcggccgaagcggaggagccagcgccgcggcgcctctacggtcgccgtgcgcgcgtccggcgacgctagcagtaagccccactcggaccactctccccttcaattccggagctcgaaggcgtttcacttcacccatggcctcaccgccgcgttcgctttgcttttgcttcgcttcgcttcgccgtcggttcgacgcgacagccgtgacgctgctggactacggcgcgggcaacgtgcgcagcgtgcgcaatgccatccgccacctcggcttcggcatccgcgacgtgcgcagcccggaggacatcctcgccgccgaccgcctcgtcttcccgggggtcggcgccttcggctcagccatggacgtcctcacccgctccgggatggccgacgcgctccgcgagtacatccgcagggaccgccccttcctcggcatctgcctcggcctccagcttctcttcgactctagcgaggagaatggcccgagtaaagctccttctcgctctcgcctcatcgtttgcttgattgctatttgttccattgctagcctgcgaatgaacgatggcctcatcgtttgctggattactaatctgttccattgctaacctgtgattgaatgaaccggaattgatggtatttattgtccaatgcagtaagcggccttggtgtgatacctggagttgtcaggcgatttgactcttcgaagggtctcattgtgcctcacattggctggaatgctttggagatcaccaaagacacgcagctgctcaagggagctgaaggccaccatgtgtactttgttcactcctatcatgctctgcctgtaaggaacagctcttttttagatgctctttcgttagtggacttatggaatgtgagttatttctttcttttcacatgcttagtcagatgaaaacaaagagtggatttcttctgtgtgcaactatggcgagagtttcatatcatccatctcaatgggcaacattcaggcagttcagtttcacccagaaaagagcggaggtaaaatgcagtttgatattgaatgtgttatgatatgccatagccaagtatgtacaatgtattttaagacaggattgaaacatgtagattcttgagttctgataacttgactggtcttgatcaccaaggtctgttaatacttaataatgcagaatatatagatacttcagatttttctaagcatacccattattgttttactgcagctactgggctttcaattttgaaaaattttctcagtccaaacacttcaggatcaaaggtagctgctatatgtatgcttattgttgctagttccttttcattaacttcttcgatgtaaaagttcatacttgcatttataacacaggtcccatctcgtaggaaagcatcgaaccttgcaaagagagtaagctttgtatcgccaaatgttttagcgtcaatgcaacttccattctcgcccttcttattgccttaaaatttccaggtcattgcatgtcttgatgttcggtcaaatgatagtggggatcttgtggtaacaaaaggtgaccagtatgatgtaagagaccatagtagtagcaaagaggtaccaagctctattcatttcccctaagaattgttcaactttttacacttaagggttagatctaagttcgtgatcttgagtagtttgtggtactttagggataattcatctcccaagaatctgatgagccaatgtaatagttttatattataaatgcttggtatgactgactagttgtgtagaaacgttatttgcctggtgcttgaatatctttgcgttctatatctgtaggtaagaaacctcgggaagccagtggatttagcaagccagtactacatagatggtgctgatgaggtatttctctacataatgctttattgttttctgtatgtgaacttatgatctgatgttgtgaaaaaaattctcctttaggttagcttcttgaatataactggtttccgtgactttccgttgggagatttgccaatgctagaggtttgttcaagacgtaaaacctccaaatgttttcatcatttcccttatccagcgaggtgacatgttgatatttatttctaggtattacgttgtgcatctgagaaagtatttgtgccacttacagttggtggaggtataagagacttcacagatgcaaatgggaggtcagttccatttatgttcatgagtaccatggatcgaaatgtttttctgccaagcaatcccttctcttactgacttgatgagatagttttttctgcaaatgattcccaaagtaccttttccttctctaggcagacttttttttttttgtattcgatctttcttaggaattaagatagcctgttattttatttctttttcgtttttttccctgcaactctgcatatttatgttctgatgttcaatcttacaaccttaagtgcctctcccccatctttttgaggtgttatttgttgtttgtcaatagtcaatactgagaaggaaaaggacagacagagtaattatgtattcttcccttgtcagatactactcaagtttggaagtagcgtcagagtacttcaggtctggtgctgacaagatttcaattggtagtgatgccgtttttgctgctgaagcctatttgcagactggtgtatgtattttatttttccatacaatcttcatctatttcccaattatacagttctttttgtgtatcaggtaaagacaggaaaaagcagcttggagcaaatctctagagtatatggcaaccaggttttccacgagaaatccagttacaatttgtttattaccgtatacaaccaaaacattatttttagtattcatgttagcagctaatcttcataatatatggaaaacattcctcctttttttcttcctaaaaaatatcacaaaaaagtttttgttcttccatccatgtgccactaatttcagaggtgtatccattgttgggaactctgctatttatattgaattggtgactgataagttttttgaataaaaacatataatgtatcttctgcatttgctcaagatacttggtgtgattacttatgttcaaccttgttatatagcattcaccttagtcattggtataccatatatctattcatgtcctactattatagttattaacctgtcaatcactaattgcagtgatgatatttctcttattaggcagttgttgtaagtattgaccctcgaagagtatatgtcaagaatccggaagaggtgcaattcaaaactgtaaaggtgtccaataaaggtgcaattcaaccactcatcctgaatctccatttgcatttcaagcattaagatctcatgtacttttttcaggtccattaggagaagaatatgcatggtaccagtgcacagtaagccatttgttttccatttactgctaatttcgcgttactctcttatccatgcacataaggggtatttttgtatattcatatgaaaagtttttcccagtacgcaggaatattattacccaaaacgcccataccaaatttcagactgattaaaacatgtgctttcttcagatatttggtgtactaccttttaggcaacattaaatgactttatgctggcataatctactgtggcatgctgtcctttaataagattgctcttttgttccaacaagtgttgtttatgtcttttccaggtaagtggtgggcgtgacagccgtcctataggagcatatgaactagccaaagcagttgaagaattgggtgctggagaaatacttcttaattgcattgattgtgatggtatgttcatggttttgaacagttcaatattatgctttgcctgatttttatttacgcaatatttgtagattttctgctaagtaatagcaaagtggaacccactaacaataaccagaacattctagttatgtttttctttcaagaatccaagttttcctttgaggcgtacaatcacagtaaactttgtcgtcattaatagaccagtggtaatcacacatgcattattgactattggtagcagtttgaccatgtatgtaacaccttaaaagtttcggttagggtggtttttgccagttgactttaattttcactgtctccattactcatgttaagaggtactccctccatcccataatataaggcatggtcaaacttggcacagtcttcaaaactaatctttgacttataatttatcatatgctataacatttattgcagcaacattataaccatcttaaagtaaatttaaatgtcaatccaatgatattaattttaacaaataaaatttaatttatattataataattgttggtcaaatgtttttaaagttgaatcttggaatatgtgcacgtcttatattatgggatagagggagtataaaaaacaggtgaataaagacaagacgaatgccaatatgccatgatgttgttttatttttcaggccagggctgcggatttgacatagatctggtaaaaatggtgtcagatgctgtgactatccctgtcattgcaagcagtggtgctggtactgtcgaacatttttctgaggtctttgagaaaacaaatgcttctgctgcccttgctgctggcattttccatcggaaagaggtattgtcccgccttgtactttttattcagcatgctatgcctggagctctacatgataatcctttattccttttcttgcaagttctggaaaactttgacctagcttacgttatttgcatttgctcagcagtgttagtctgttctatatgatcaacagagctacgtgctcagttaataatacttgcccacgttatgttagaatctttgttcacgttccatagtacctgtatagtaagattatttagggttgttggacgtaactgagcgcttctgctttatcacaggttccgatttcagcagtgaaagagcatctggtagatgctggcgtggaggtcagagtgtaggatggaaatcctttgatctattgggaaaataaatcagggctttgtaacagttgtgtgttctattttgggaataagatggtaattcataggccatggattggaaatgcaatttcgtaataaattgtttgaaatcttctgtttgattttttttctgcctgtatattactttttgtcttttcttatatcagacaaagctagaaaaactaattcagtcccaattagttgctactcatgcaaacaaatttggattctgtttggtttactgcaaatattgacaagatagtctggtaacatcaatattgtgtgacgaagcaaagtggacgaaatgatccatttcaataatccggtgaatgatctgaaaaggaaaacgctcgagaaccccaacctttaaccagtagtccacaatgtggaatttgcacgagcctttgaaaatactggcagtgccaagggccacaataaagaaacataattaaatcagaacaaccagtctatcaggacctgaccaaggataataatacagctagctgctttgtatagatttttatagcctatctctcaattcacttgtacagtggttaactcttcactataaatatatggtctacctatctgttttacagattttcttggttcatgtgtctaagccagctgtaaacttacaacccgctttttatctctcctctcctctctcatccacctcagcattcagcctttttatagccctctattatacttgctcttaggctgtgttcgagaggcctcacctcccgcacacgcaaaacggagagacgtattttcttatgattaattaaatatttacttttttgaaaaatggatttatatgattttttaaagcaacttttgtatagaattttttgcaaaaaaaaaccgtttagcagtttgaaaagcgtgcgcgcggaaaacgaaggaggtgagttgggaaatttggtgaaagaacttgagtctcaaaagtttcctgctaacaatagtaaaatttgaagtttcttgctgactgtagtaaagtttgagctaaaccagaacttttagaggcaattcgtttcgaagagagtatgaaacgggcgatcggaattcttgcttacgatgttttatgcaatatcccactcccccgagccgccgctgccgtcatcgtcatcatcgtcgctgtcgtccccgtgcaccagcgcgtcgaccagccgcgcccgggccgtgcggatcaccgcgctgtggcgggacgtacgtgtgcgggtcctcctcgcggaacaccaccaccgccgtcccgtcgccggcggcatcggcgtcgtcgtcagctcagccgcggccagtcccacccaacggcgcgcgcgctgtccactccggtacgctgcgcggcgccttgacgggcaggcagccccagccgaccatctcgtcgctgaggttcggggaaggataaccgtcgcccggcctggcgcccctcgtacccacccgctcatcaccggctgcgtgaggacgatgtacagggtgcagcacccggtgcgggtggccacgccagccgagcctctgcttccgtaccatctccttgctcagcctcccctactgtccaatatgagtacttcatgcagtaaaaaaagttaatgtacagtacataatgtaaaattgcatgtatcaatattagtagaccaaccgcatagcacacatttctctctttttttaagactgaagactttattaaaaaataaagataaagagtccccggatatgaaatcccattctttcaaaagggaaaggacagtctgggcgaccggggtttgactccagtggaccatcaaccaaaacaagacatatatgtgtgtgtaaattcattaacatctatataaatgtggacaatgctagaaagtcttataatataaaacggagggagtaatattttattttcataaacctcaatgtctattcaacatcgatacatatgagcatggtttcacaattcacactaaaaaaaaaccacataactcgcactacaccatgacatggaattaccaacagacatctgttggcaaaaataaacaattagtgataacatatctgtcggtaaaggtttttggcaaactatatgtcagcaatagtgcataatgagacatggtatatgtcagtaattctaaatatatttttggtcaaaatatctgtcagtaattgtaagagtacgagctaattatatgtcagcaaaacttagagggtgtatattagactattaataatactatattgcaagcccaaaaagcccatctagcctatcatatataaaccaaaccctaatttccccacaaccttatccttttcttccctacccagccgtcacgcactcacgcttcctccggcggcggcaaggcgacggcatcggcggccaaggcgcgggcggcggcggcgagcaaggtgcgggcgacggcggcggcggcgagcaaggtgcaggcgacgtcatcggcaaccaaggcgcgggcggcggcggcggcggaagcgggaggcggaggagtgggagaggcggaagagggggaggaggaggaggaggcggcagagacgagaggaccccgtggatgtgctcggggaggaggtgatggggcgggtgatggagctcctggacgcacgcagcacctggcgctgggtcgccgccgacgaccgcctctgggcacccaaggtccccccccccctctctctctctcattacagcctgcacggctcctgttcgacgaattgcctgcgaggggcactcgattccccctcacgagcggttaatcgagcagtggctactctcgtgtcttctgttaggatcgagcataccgtattcgggagtggtgttgattaggagcttttatagaattctcatttattgattgtccaatcatggttgccaaaagagaaagagcgcacattcggttagtgtgttctaaactgtctaattttcattggtattttgcaggcttatttgatgagagctggggctgtcattcatagccatgggatggaaacttgcattgcaaccatgcttaatactggtgcaaaagagtttagggtgaacctacttgtctcttttccccatgaatcttagctaaatgctccaggttctgctttatatttctcatgaagttagctgtaatgtttacagaaatgtggtagtactaagaaaatgcactatttctcatgtagtgtaccacattatggacattttctgtctgatctaatgtatcaaattgaaaaacggataattgttcatatttttagatttccgcttacttttccattacaagaacttcaatggtattaacaattaagtgctaatcttctatatgatgcactattcaataaattggagattatgtttgctccatttccttttcatttcatggcagacattattatatatgtactagaaagagtggtgaacattttttttaagatttgatctattattgatttcacacagacatgcatcagctatcaggaccagttggaataattgaaatgctaattgagaactttgcatgcaccacatagtacagcaactactcaagccaagttctatttactagtgaagccatttccaacttatatcaatccatttattagaaatatgcatgtacattgtgtgtttactgagtttttacttgtagaatgtaccatcctagtataattattttaaataaaactcccttagttgatctctgcaaattaggtggctagctgtccttgcagtgagttgtcgtagtacaaatttgaaacagtcttcgggcttcagattttccatctacattaattatgaaaatgtcacctacatacatctcaattctaatataagttaacatttgcaagtgggagccaattaaactgtacttcagcacttatcttctttttatttatttactagctatgatttgcgacctgtgggtgagcaatcaacttcttgctgaagtgtcagagaagggtacctgaaggaacagaagatcaacactaacttaaaggctcatacatcatgtaagctaaaatcagtttgttcccatagtttgtgagataaattgcaatccttgctgcttgtaaattgtaattgaatctgttacgattgcaattatactgcttcaacataaatttctcataaaatggaactggtaatttaatattggtggattgtgagaatatcgaagctatgctacagattgaattaaatggaactacatcagttatgttattgacacttatcctgcacatttgacactgatcttcaattctgtattgaaatagtaggtgttgcatagattacttatcattgaatggagtattattataatctatatatctgacccttaatacttttgtctttctgataatctgattcaagtttttagatgctcaacttatcatggcggtcacaagatattttggaggggctttcttttcaaaggaaattgccttgctggtggagattgccatcggtttgtctcatttgtagaattgtataggagaatttctctttttgtacaactaacctatgtacatggcatttgtaattaaatgaaattggtatattcagtactagtggaatgtggatgcatgagaactgttggtggtatattcaattctagatcagtaggatttgattccatgaactatattttttttaacccaatgcagggcacactaacagaatatctgtcagaaaaactgatatatgcaaactgcgtatctgtcagtaatccgttaactgtcggtaaaggaccatctgtcggtaacttccgtctgtcggtaattcatttgtaggactgtcgagttatctgtcagcaaacatttatctgttggaaaagacctttgccggcagcacttggcctgacagaccctatctgtcgggaaaagttatgctgacaaataatttgacagcatataggtcctttcctgacagatatgtagtaagcaaacttggggcatggtgtagtgtcggggaacatattttgctaaatttttctatattcaagagtaatagcctaatgggtgttgccatttgttcaatctctcaaatagtatttgggtccacatgtatgtgagataattcggtggcatgtgtgaataagaagatgaatgcaaaatacgatgcatgccacaagttattagtggtaaaaacattttttcccttgtctttcatttacatgtttaagtgttacatgcacaaggttttggggttgatacttgacacctatagcccgtttctttcttaattagtttgtttattctacttttggaatgaaagatgatatgctttgaataaattgggggaagctctaatcttcttgtgctagtaggaaaacataactatacttcttgtaaaaatattcttccatttaaataagagaaatttatagttggagttatgaattatagggacagaaataaatttaaaataatagtggtggtagtggtgaatctcctgccatgccaccacctctgctactattctttctacagaattctccctaagcatgcattttcatattatttataggtgttttacgccattcccttcttatttcgtttattagaaccacaatgtaacaagaaaaaaaatctaagatgttccaagtattgtgtatatgtggaattactctatggaaaaaagagcgaacaatagatttgatgcaaaactagatgcagcggctaaaagatatacatttggttattgatgaaaatataggcacttatattcttgagatcttgggcataatactaaaattatattgtttatacatgggaatatttcatcaacggctataaaaaaattgtgtcgcataattagatatttttgttggcattggtcacactacttcataaaaaaatataaatttttcattacttcaatgtttcttcaacatcgatacatatgaggacagtttcacaccaaagaaaagaaatcacataactcggaaatcaaactctaccaaaaattgtctatatacatacccttgaggggtgagacagcacgacaacgccctcaggagggggaatgaaccatcgttgtcggtccggccaaggccggactgagttttcacccgccgctcaccacctgcaaatccacggctgacgcaccaatgctctaccaccacacaagttttgccgacatgtgggacccctgcaccggcgtcccccgccggccaaccttcgtgcgccgaagaccgcaccaaaaccaccggcagctcctcctcacacctaggtcgcctcctccaccattggccacgcctctcgcgccaagccggcctccatctctgccgcccgcgcctctcgcgccgagccggcctccgctgccatcggctacgcctctctgcgccaaagccggtctccgatccctccaccaaacgatgccgcgccggccaaatgcagccgtctcccacaccctcggctagccgtccgaggccgccatgcctccggtgaccacagtcgcggccaccaccaccgcagccgctgctgttgaacgcccagccacctcgccgtcgtcatcctcacctcgcacccgactccttccccgcctccacttgcttccgccagcgacccgcttccaccgacgtcgccaccgtctccacagtcacggccaccgcaagtcggacgccgtcgtcgctgtcaccgatgccagccaccgcctctgcgaaccgccgccactgccaacggccacttcgctgtcgccctccgccgcgccgccgccaagttctccaccggcatcgtcagccgacgccgccgccgtcaactgccgcgactaccactgccgccgncgtcgcaagccgtcgcaagtcgaccaccaccgcgggccaccctcaagatccggccgagaggcacagatctaggggacaccgccaccgtcgccgccgagcaccgagccgtcatcgcgcagggaccaccgctgtcgctttcacgcccttggccgacgccatccccgcggccttcaaccaccactgccttcgcagccgtcaccccgccagatccggccggagcagcccggaactggcggtcaccaccgccccgtcgtggacgctcccttgtccgcctgaagcgaggtcggtgagacgccccgccaccgccgtccttgcggctggccggctttgcgttcgggcggtggcgagacggagggggaggaagggaggggcggccgggttcgtcgcctcccatgccgccccaggggagagcgacgcaagagtcgacagtataattccatgacttgcttacaaactacttgcagtcacatgatcctatgtagttttctgtagcagtgactatttgttcaccatcatcccgaatatatatatgatctctaattaatatattatattgtgtcatagtaattgatttgaattgcaaagcagtaaaagaaaataagtcgaagtaattcgttttcagagagaacaatgacaaatccttaattcttgctacgctgtcaccaatcaaaatactcctacgttcttcctcttcatcttcaaaccacgaacgcacctcttcctctccgcgcctccaatgacatgtgcacggccaaccggccgcgcacgacgttggccggcggcccccgcgccgggaacctccagccctgcagcttcacccattcaccgaactcccgggtccccttgaccagggccggcaggccgtccttctccctcctcttcctcccgcggtcctcgtcctcgtcctcgtcgccgtcgcgcagcagcgcgtcgaccagcgccacccgcgccctgccgatcaccgcggtccggctggacgtctgcgggtcctccctgtggaacaccctgaccacgccgtcgtcctcgtcgtagtagacgtcgcggcgctccacctcgaggtccagggacaggcgcccccagtgctcccgctgcaacgggagctcgaaggcgaagctccagccttctacgcggagagggtggtcgcggccctcgggaagcctgcaccatcccaggtgctcgccgccgacgtacgcgtgcagcacgcagcgcgacggccagacgtcgctagaaacacggatttcagagccttcgtagatcgggcgctcgtacttcggacgctcgatgcggacgtgcaggttgaagctcctcgcgccgtcgtcctcgacctgcgccattgttgttgcgggtatcgatcttgcgcatgcagtgcaggcggatatatatatagcagattcgtatatataatatatgaagtcggatgtagatctcctttaataaataagaagaggtataaccatgtacggtgctcttagtagtatatggtttccaagatgagatgagagcttatcaccaagtacggtagtttatctccaaactttaaatggtttggtagagatgtatatagatatgcgtatagcagtagaagaggcgagcgccccagcgttcacgtgattggtactccctgtttagttaagagaatatatattaggtatgtgcaggtgcaaaatatgattataagaatataaattaagtatgtgcgtccagttttcgatcgtatatattcttttggccttcgaaagtgaaagagagaatatattaagtccctatttattagttaagagtgggactatctatatttatattgtgtcaaaattcttataaaaattaattaaatttccggcatgtatttacacggtaaactatatatcttgtacaataaatatcatgcatttatttaacacacaagaaaaataagaaataatgtcaataagtaggagatacatatgagagacgcaatatacttaaatatagaaattggattttctaaatatcatttcatgcacttgaagcctacaattatattgtagggctatgcactgcaactttgttcggacgcgcctacggatcggtcacccgatccggggccggggaaatcgggcgctgacatcagcattacgtcagcgcccgatttacgtgcaaaattactttaaactaatttttctcttaaattacttattcaaatcatgatccgattgcaccattaaattcgttgcaattaaatctttaaaacaagaccacacatggatatattccgacggaagttttttttagcttattactgaattatttttaaatattgcacgatgtttcaccaggtatatcggaattgtttcactaagtagataaaaaatgtttcactcatttaaatcgggtgttgtttcaccttatataaaaacaattttcaacaaatagcgaaagaatgtttcagttcactgcaacatttgatccatacatagaaaaacattataagtacactaggtgaaacatttttcagtggaacaaaaaaataaaacgaattcccttaatagggggtttccaaaatatgcggatttttggttgcaatggaatatttcagttcactgcaatattagatctatacatagtgaaacattgtgagtacactaggtgaaacatttttggtggaacaaaaaaataaaccaaatacccttaataaaggtttccaaaatatgtggttaatttgttgcaattgcaggtggggcaggcactatggtggggcccagcagcatgcatgcaggcgcctcggggggagggctgcgtgtggggagcgcccgatccggctcccccggcgccggtcgcccggatagtatcattttccactttgtttctatgaaaaaaggattttgtatttattaattaatagtaggagcgatgaaaaccattggaatgacatccattggatgaggaaaatgactaaaattttagtcatacgaaatttagacgcctctaaagaatatttagcaatcacatgcatggtgaaaaaaatagtgattgcagtaaaaaaaaaacatgggcgtcacatttttagaaaaatgttttttcaactagtcatcccttattacaagttgtagagaacgaatgaagcatcgggatattgagtcaaacttttccggtacatgaaaacatacgaaaataaacaatggtcaataatagaactcatagctatgctaattagaaatatttgttgacatgaaaaaaaaaaagaagagaaatatcattacttcggttaacacaatgacttaataacgactcttagcctatgaaaaaatgaaaagagtagcaataaaaattatcttttggactaatggttagaataccttataaatgaatatgtatcgtctaatagtttataccgagctctacctttaaatgttacttaaaataggacatgggaatccccaaagataatactccataaaagacttgtgcccactccatatgttaatatgtacgtacatcagaacatcggcggaacatagtccaataaagaacataatgttccttcgacaaataaactattgtgaccgttgtacatatacaaatgagacggctacgcttgttcgtgtttacctatcgtgtcatctctttctatctctatactagggcattatcaatcgaaaaaaattacgggtgagcgttcaccccgcacgaacgtcctgatcatttccattttttttactactacgtagtttctattttaaaagtttatatacccaaacttttatacatgtaaagtttatatacacaattttgattcaggtttcggatttaaatgtttatacataggatgcttttatgtataaaatcctatatatacagttatagttatatttatatgtataaatttttgtttaaaacatatatgtgagtctcaaaattatgtggatgaacttacatgtgaattgaaagccaaaaatctaagtaaaaatatatatagtttctggattttgattttttttaataataaggttttaaatacatatttgtgaatagaaatatgcaggatccacatgaggttggctatccgcgcccactgtcaacgggcagatgcatgttaagaaactatcgtccatcggatatcacttgtattaatattgtggaaccaacattacgtgcgaatattaaaaacaataatttatatataaggtagtccggaaaaactagaccggactagctccatccattagagttcttgtcaaatatatgtatacaaagttagttataaagtactccctccgtcccattttaaatacaaccatgagtttccatgcccaacttaagtcgtccgttttatttgaaaatttttataattagtatttttgttgctatgagatgataaaacgcgaatagtactttatgtgtgacttatgtttttaattttttcaaaaaaaattcaaataagacagaagataaaagttgggcaggcttcactcaaatgggacgaagggagtaggacttaggccgtgtttagttcctcctccaaatctttttttgatgtatacggacgcacatttaaagtattaaacgtagactaataataaaacaaattacagattctgtttagaaactgcgagacgaatttattaaacctaattaatccgttattagcaaatgtttactgtagcaccacattgtcaaatcatggcgtaatttagctcaaaagattcatctcgcactttacatgcaaactgtgcaaatggttttttttcgtccatattaattgctccatacatatgtccaaacatttgatgtgacggaatttgtggaagtttgaaggaaactaaacacagccttaggtttcgtttgtttgtgctgttgaggggagcttctctcgtttatcgtgggcacacgcttttcaaactattaaatggtacggtttttcaaacactttctacgttgttttcttttaagaatcgaatatctcaattttcacgtttatatttgttaatatttaattaatcatgtgctaatcactattgtgttttccgtgctactgattatctcaatcaattaataatctttattgagtggcgtctcagtaaacttataatatgcatagtgcaaagtaaaattagtgtcggattctattctggacacactcttaaatatagaggcacacccatcggcctagctagttgaggattattgataacattgatatgtaatatacacttcggttgagcctgcatttttaaatatcgactctagatgtcccctgattaaatttagatctattgtttattcgcgtttgattacggattaccgatgatcttattggtgccattttttatataagaccacccaaagagtgtttccacaccacctctgccttccacacccttctgccatctctcatctctgcctcacggctcagacgacgcacttccttcctcgtattgccgcctcatactcagctagctgcacaaggctggttgtttagtgtaattaacaatccccaacttgggtcgattaccggcggtggacttgatcaggccatcagaatagttttgggatcgaaggagatggattcattattcgtgtgtagtatagttcttcatcttgtatcagctgtcagcatcttgattgcaattgtaggtagccatgtgtagcccaaaaaagaagatgtctggctcagatccccgtgcaagtaacaagttgactaagctaattgcaataaggtaatgagacactaatgaatttttcacgattgatgaacatagatcttacgaccttagcttaattcttaagtcgaactaaacttatagcattttttatatattggaaatggattatatcttcagcctctgtccgtaggtacacagctaaaaaaaaatttagaagtgaacagaaaaaagcataaaatggacgagatggaacaaagccccaacttctaccaataatatgatctactaaaataatatttctaaaacatatggtattgatgaacaaaatcctatgatcctgccatctcgtccaacaggcaacaggaggaaagcaaagagagagtatgtgtggcagcgaaggaactatggcgttgcattgaacatatgttagctcaacaaaagcaagattggaatttgcaggtgtcacatcagaaactgtagtgatgttgagatcttacttactccgtatttagcaaccggttttctgaatcccaggttgagaagtacaggtttgtggacctgtagtttgtacgtactccgttgaacgtttcaacggaacgcacatttgcagtgtactgtctgggcctacataatcatagagcaaattgctcgtggtaaaacgcggtttagacttggcagcagacacaggcaatgctgggggagaacggcatgacagttgacttgacccggacgggatacccgagcgatccaatctatataaccggctccgccaggcgccagcatctcctccacttccacggtaatcacaagctccatccctcgcaacacgcacccaacgggtcagagccatctgccaatcaatgttcacttgtgaattgtgagctgacctggttgagaagctaagcaaaggccgtgtggcgccatggcacagcaacatccgtgcgcgcaccgggacccgggcggcgtggagatgggcgtcccggccgtgtacccgccgctgccgaacccgaacgagcaggccatggaccaggagcggctcggcgggggaggccccaaccactgggtgggcaacgacgccaacacgctgctggttgtggccacgctgatcaccacgctcacgtaccagctcggcaccaacatccccggcggctactggcaggacaccaaggacgaccaccgcgccggcgaccccatcatgcgcgacctgcaccgtcccaggtacacgtactgtccacagctacgtacatgcatcggaagggctcgacgacaacgatcgaattgaacggcacgcggctgtgtaatggtcaggtactgggtgttcatgggggcgagctgaatggggttcgcgagctcgatggtgatgacgctgagcctgctggtgcggatgcccgtggactcgcgcaacgtccggtggtcgttcgcggtggcgtactccacgctggtgctcacgttcatcgtgtcgcagcccaggacgcacctgtcgctggacatcctcgtctgggtcgccgtcctcgccttcctctggttcaccatcagcctccgcccggagcgccgcgcgaaaatcgcccaggcgatctgctgcggccacaacagctgaagaaaccgcgcgcacggcgcaccaccactgattccttcattagcctgttgcgattttctctctcactaatcgacgattcgtgaacgctcctgtgcttacttgatggagatggttggcaaattggatgaattgatgtctctcgtccctcgattcccgttcctgtgcaaattacaagtttacaaccgggagagcctgtttgagaaaagccaatatcctgtgctcctgggccaactgcaatgaactcagcgtctcggctggcaggatgggccagggctccaaattatgaaagaggtaaccaacagtacagtagttttttaaaaaaagaaaaaagaataaaaaaaaaactccacatgacatggttacactgaccttgcgggctgcggcacgtgaatatgcacgtcagcacgagtacttttcattgcacgatttattcacgaaaagaaaaggataaaaggttagagggaaatggaaaaatggttaagaggaaaatggagaaaaatataagggattcaaacaagagaaaacaaaccagctgaaaatatcaactgacaaaaaatttggttacctacagtgcaaatggtctcatcggtgacttcaatttttcgattcagccactaccacttttgattccaaccctcatatttttctcaatttataacgaaggccaaattttacagtgaacaccttacaatggagaaaaaaaatacaaatctaacccaccaaccaccaccaccgggtcacaaccctctctacttcaccggcgctgccgctgccttcggcctctccccactccccgcgccgaggcgacgaactctgccgccgtcggcctctcctccctccccatcggcgcttctccactcccgacaccgctcaagcccaacccacatggggacacagtggcggtcgaggaggccgagcgaatcgacgacgatgagctcctcaaagtgcgagagggcgacaacttgatgagctcctcggtgcgcgaacgggggacgacggtgagcgcgagagggtgatgactcgacaatggcggcatggatctggagggcgacgaaccgacgactcgacgaccagatacaacaggtacctcaactgtcaaaaccgatacaaaatgagtcccaaggcagtttggacagctttttcaactgacgtggtgcctacgtgggtaatttgacttgatcttcatatgacgtggcacatgaagcaaaatttaacaatttaaaaaaataaaacaaaatatgcgtgcccacatgtcagtcaaatattaatattgaaaaataatgggacccacatgtcagtgggccccacttcttccccctctgtatcctatcccctctctcccaccatggaagtcccatgggagcaggcggagcggtggtgcaggaagtcgacggggcggcggcaggcagagtggggtgacggcagccggagcaacgacggcgcgcgaagccgaaggggcgaagcagggcggcggcgagcgaagcagcagcaatccactgtcggcgccgatctccacaatggaagtttgtgtcctcctcttcctccttctcgaacccatcgccatcgtcttcgtcatcttcaacggccacaatggcggggaagcaggtgggaagcgggagctcacccgttgtcgcccacggcaaggacgctgtcaaggtcagagagcagctcggaggatggcgaatgtggcggcgagggccgcgatggtgatggtgaggtgcgcgtcctcctcctcctcgaactcgttgttgttgtcttcggcggcagctatgatagggaagcaggtggggaagcgagagcttgccctctgttgcccctttcctccgccggcggcctgctccagccgccgccactccgctacgcccgtcgctcgctccactcagctggccgtcgccactccaatcggcccgtcgcccttcccactccgccgcccgagcgctcctgtgttttcgttgtagggagagagaggagattgagaggaggggtagggaggatggcatgcgagccacatgggccccatcatttttttttgtgtgtaactaacatgtgggccctacgggttgtattatttctcaagattgaattgacatgtaagcgtcacagcaatgccacgtggaacgaagacttagttaaacgatccatataaacgccacgtcagctaaacccgagatcaatactatcgagggacctcgtttgcatggttttgtaagttaggagatacgttctatccagttttttggaccgaggatgaagatcagactcgatgacaaattagggattccacgatttattcaaagtactcggtggattccacgatttattcaggaatagaaaaaggataaaggatagaggaaaatggaggaaaacagaaggattcaaagcaaagaagacaagtcaggtgaaaatatcaagtgacaaacagcaaaactggtaatatttgttacgaaacgtgattaaaaaagtgcacatcttttcagatttataattacgacacatactcccggcagtcccggcagagaaggccacgcaggtgaaggaaggaccatgtggtcgcgtctggggcagctagactttgaggagcgctgtcgtcggctcgagcagtgtgctgagagggcaagaggagagagagaaagaggtggggtcacgtgggtctattttgctgattgacatatggagctcaattttttttccattattttttatttatctggctgaccatattgccacgtaaccacccgtttaaactcaacgtaggaattgtttaattttggacacaaggaacatgcgacccgaaagcaacaaaacagaaaggactcagaactctcttcttgctcattgcttgggaaatctggaaggaacgaaatgcaagaatctttagagcaaaggaggcgaccgtacaccagatgattagtcgcatttaagaggaattaggttggtggagtatggccggcgctaaacacattgggagaatgttgtcacgaggagctaggaagtctacgtgcaagcttgtttgcatgttgtcatatatagtttttctctttcttagccctttggctatctgtactttttctccttctatcaatataacgccaatcaattctgaccggctgttaaaaaaaaaaaactcaacgtaggacagagtgacagactatcaatgtgccatgtgagtgttatgtagttggacaaaaccgctcagggacgtaaaatgagccagttttaatggatgaggctggctgaggggtgaaaatcatcttgggcgttagttgaagaaggaaaaattaacttattccttttggacgttgggccgtgttgcaatgggatgggttggatgcaaccgctatggtgcagagggactccagcaggaccgtcacgactcgtcccaaagtcgtcggactcgtccgcactcagcgggcccttgttcagattttcatgttgaaagacccgatggtaatttgttggcccaactgtccaagaaaatcccatacgtctgcaatgcacgatagcagacaactaggaaagtcattagttgcccatatttcctaataagtcattttaacttattaaaaataaaaattaacttataagtaaattttacaaaactacgaatattttgatcgaactatcgcaaaactatatatttaaaaatttatatcacaaactacagattcagcgctaaacttatcacaaagcaacagatatagaacatcatatcacaaaactacagatttagtgataaaattataaaaaaactacaaactttagagtttatatccgtagcactattgaattgcaaaagttattgttttgtgataaatatgataaatttattttttttatattataccttaaatatgtagttttaggaaaaaaatacgatgataaatttgtagttttatgatacacttttttaaatctgtagttttgtgatagattgatcaaagtatatgtagtttcgtgaaattttctcttaatgtataggtaaaatttttatatatgtgttcctagcgacttaaaaggtgacaataaaaatagaactacattaaaaatatattaaaatcaacttcaaattgaaatttcaaaatttatcttttgtctttgacttatcagggcaaccgatggagctctaggttaaaatcaggtgcaattacaactataaaatctgtatgtaattttctcaacaatttttgtagtgtgggggtacttcacgatgttcagatttatcgctatagtaatattgtggagtacccccacactacatcacattgctacagtataacaaactgtgaactgtgctagtctggacagttttatttgcatccgatagcgagagctgatactacctacttcttctgtcccatacaaaatcagcctagtactggatgtgatatatttctattactataaatttcgatatacatctgtttagattcctagtatagaatgtgtcatatccaaggtgtgtttaaggtgtgtttagttcacaccaaaattggaagtttgattgaaattagaataatgtgatggaaaagttgaaagtttttgtgtgtaggaaagttttgatgtgatggaaaagttagaagtttgaagaaaaagttagaaactaaaccaagtcccaattctagattaatttattttgagatagagtcagttactacagctgatctggatgacaaccactcggcaggtgttgatttggagtaaccatcgttccatcgtaggtggtaggcctgcatagttaactgatggcatcccaatccaagctcaacagttggtgcggggtgtttggatggggctaaattttttttagtctgtgtcacatcagatgtgtagacactaatttggagtattaaatatagattaataaaaaataataatttcataaatgagagctaatccgtgagacgaattttttaagcctaattaattcataattagcaaatgtttaatgtagcatcacatagactaatcatggattaattagactcaatagatttgtctagcgaattagtccaaggttatagattatgttttataattaattcatatttaatactctaaattaatatttaaacatcttatgatacgaactaaattttagtccatctaaaccacaaacttgcggagggcctgtttgtttcacggcgactggggaggcaagcttgaccagcaatatatagctgctcatttcggtcatggagtggagactgcgaggtgcgaacagtgagacagggcaaacgtgagaacccgtgtgaaacagtgaagttctgtcggagaaacacggcctcccccgggcaacgccttctccgctgcagagtccagcccaaacagcgatgaattaatcacacgaaaccaaacacgacaatgagctcgcgtgaggccggtgaggcggtgacacgctagtactcaactcaaatatccacaaggatagatgcccactgcccccacggttctcatacattatccaggcagggccctagtttttgttattctgtagcagcaccacaagccgtcaaaaaaagacgataaatacagagcaaacctcgctttagtatctcggcgtttggcaattaggcagcatcatctggatttgatgggaaccgaagaatattcatttacgctaagctcgacgcagaccagcgagcaagtcagcaaagcagttacgcatttcacctccccccggtacgcctctgctacgcaacgccggcgagcctccggcttttgtttcgagcgtttttcctctcttcctcttccggatacaagcggctaggcggctagcttgttcaaagtttttttaacatgttcagcgcagggtgccggtgttcgagttgctctattggcacgttgcgttgtgcaccttccattcaaggaaaaaaaaaacagcttctaaggatgaatttagatatactgatatgcatttatcgagattcatatgcttatttttttggacagcgggtgtaggtcatatctatttttttagttttgatatatatttatcgataattttttccttgaaatttgacaaatttaaatatattgtaacttacatataactacaatataatttgtatgcaactttacataattttgaactgtcatatttacttaaagattcgtgcaaacgaaaaaagtaaaaaattcatagtgtgcgcaccagtggcggtgaggggattcggtcccgcaacctccattttgcgaaaatattgtgttaccatatgtttttttgaaagttgcatgcaacttacattgtaaatataacaagttacgatacaattgcactatatcatcaaatgattgattgattcaagttacaacaaatataggttttccctttttttaatgcaataagacattatattaatcgataaatgttgttacatactattattacttgttacatagaacaccaacacagtctgcaatgcacatatttcatcgttacttttagtaaatatatttattaaagctattacaatataacaacgtaaaatttattttcatgacaaatttaataatattattttctcacaaattctgatatttgtttcataaattaatcatttaatgttttaaggtttgactgtacatgttttcagatgacatcaattcaggaacggaggtagtaaaaaaatagaattgactcctagccatcctaacatcattaataacgatatgaaagacaaccctaaactatcttattactccatctgtttcaaaaacagtaacttagacatagattagacatatcttaagacaatgaagttggatagatcctctatctatacatattcattatcctaagatatatctaatctttgcataagttgatactccatattttaagataaaggaaataggtagatacaaatatttgaaattttgttcataaaaggtttagatccccttacccttgtgaccttgcaacaatgtcaggacttattcggcttgaagaaaaataaatgatttggattcttaaggattaatttctacgagtgtcattcggtttgtaggtataaggtatagaaaaatcaaaggaaattttctttttcttcaagttgtttttgagaaatcataggataatttccatacactcaaatatcttagaaaaaatcttatgaattgatgtgtgcatacctttctattccatcatttttttttctatttttatgggctaaaattccttcaaaccgaataagccgtcagcagtgagaacactggagttgaagcgcgagtccacatatttttttatcatcgagagattacaggttttttctgatgttacttactgttttttgaccggactggtgttagtacttactgttgacttctactgtagaatttctttttcgaagttattgaagactagaacggtactagaagtaatcctcgttgtgcggatcgaaagttagctgtcatttctacgaagaaccacaccttgcaaggctaaaaaccataacaagattaaaaaaaaggcttaaaaatcataacagagaaaaaacatggagagtatatcttgcttttggtaaatccgggaaaataaaccatgtccgtgtgctttactttagtgctgaatggtcaggttacaagttccagccatttttttctcagcgtgagcgttattattctcccttttcctctggaatcgttgtctattatccgtcctcactcggttacgccctcctgcatcttcaagtcagcatgcacacgtagctttcatcgagatcactgactcactcactgacccctgcctggttggtgcaagcaccttgcgtccattgaatttgatcaatgtgaacgaattgattcggcctgaataacttgtgagtggcaggctcaaaggtcctgcccgggggaggcaccaccggaccagaccggctatagaaaagaaagctggcctaatcctggcgtctctgcagttcaccactgcttgatgtgcccctgcaaaagtcgactcaagacaagtagccaacacgctcttgcagggaaaatatgtttgccccttttgcactttaatcaagcggctgtcgttactcgtctggtcgatttactgtactgctcttactcggttaaaatgccaaaaaaaaaattccattcgctctagaattagaacttctaccggtgatttttttaaaaaaaaaatctgaagtctgaacagctactatttgagattgtttagcatggcatcgttcggagacgtgcaatcactcgatgctccaacgaaaaccacgaggccacagttgccgtcagccgtcccaaaggcaccccgcactagcacctgatccaccccttacctgagacagcgagccttgtggagggggaaaaaacaagaagatcgcgcatagtacttctctagcaatatctctacactactttttagtaaattaatccccgatttggcagcgaaacggcgagtccacgagggctgtgtttagataaaagtttggatccaaacttcaattctttttcatcacatcaacctttcatacacacataattctttagtcacatcatctccaattttaactaaaatttaaactttgcgttgaactaaacacagccaaaaacgcatttccccccataaaaagctgccccttttatggcccgtcgaaaaacataccaacaaagtaactgacggactaggactgaagctgcacgtacgtacaagcgtcgttacgccgagtttaacaggtagcgcgagggtttccaaaaataaaaaaataaaaaaaaaacaggtagcgtgagcgcgagcaacttccccggttgaacctgtgtcacaccccaatctgataccgccgtacaacggcacctgacaggagcgtgtcgtagggaaaacggcgtgaaccgcttcctacgaaaccgcgatctcggtaccagtcccaggacatagtgctggtacccacggtgacaaatatgaatcatagcaatccttaaaataaatagaggacttatttaccttaacttaggttgtagctcagacagcccgagaatacaaccgacgacacggacgaggcgaacaccaacagcagcagcggaaccaacggtctaacacccaacaccacaggcgacggctgggaaccaggacgaaaccctaatcttcacttcactttgtcttctcttcagggcggaggaactatatatatatatttatatagagcaagggtgagtactttcgtactcagcaagtcacgggaacttaggtgtttaatgcaagcttggaagagaggcaaggttgttttgcaaatcttttatttgaagacattttgaaatcactaagtgatttatttctttttaagtttgggccgaaaagagacttgcgtctcgattcgtctttaagagatgtttttcaacagctcgatcagtaatgtaccgacctcccgggtcagatcattacttctcggctcccagagccattccacttgattaatcggctcccagagcctttttcattttctcggactcccagagtcctgctgcccggcagcacaacaatccgcttacactcgggaagcctagtctatgatgcccacagacatcccgaatcacacagattcgtttctgaccactcaggtcatccatctgccacataggctgattctggttacgattcccacaccacaacaacttttcacaaagcacaggcaaacaaatctacgcaacgggaaccacctcacatccgcccatgaccgtgggcacggctgttcgaacagttagttaacctctgcagaggggtacactttacccacaagacacgaacttactccagacactggccggtgtcagaggttcgcgacaaagcctttcccaagccgacccagggatacctcatgccacatagaaggatcaaatcctcacataaacataggccattttaggcgttcacaaatccaactccaaccacctcgatcggtaattcaacaagcttctcgttcttgcattaccaggaacccggtttggctccaaccgaccccgccccggtgttcccaactattggcatgcgaggtttccctgaaccgactagttacttagccatggtgtcccattccaccttgtggttgcactttgattatgttcgatgagtttcccacaggaatcggtccttatatgcgaatacgggacagtgccacataggcacaacccccgcatcgcgagttttcacaattcattttattttcaaacacaccgacaccacatgtcgggttttgaaggcttcacaaacccatttcccaagttttcgacaaacaacggtgtatgtgggatatttggtatacgcgctcagagagcacgaataccgaggtaccacaagggtggagcgacaaggaatcagggtagtacgacctacggaaattagtgcgactactgggtaggtccgtcggtttggcacgcaaaccgaggccaagcaagttaagtgtgtgattctaataatgcaagttgcaaacaaaataataatgacttttcaattataggggcaattgatcaaagggtgacttgccttgctcaaggtcttcacgaagcttcacgaatcttcgagagaacccgcgatcaacgaaaaccgataaccgcaactatacgcaaacaatcgaaaacctaaacaaaagaccaaaagaaatatcctatttagacctattagtagtgccattaaatagatctcaattttacggaattactggaagtggaacggaggcgatcggagctacggatcgagggatatgaattttggaggtctaaatggatttcctggacaaggaaaaggaattattaattcccttggaaaagaaaaggaaggagggatcggatttagacttcctcgggcgacttaggcgcggcccgagggattctcaaggcttggccggccattgggccgagcgcggccacggggaagcggcccattagggcgcgcggggagagggggaggcccgacggggtgggcgcggtcctccgcgcggggtcccgagatgggcccacatgggggcggtcgggtgtatggtggggagggcgcacgcggggacgagcgagacggaccggtggattgggtgcggatgcggtgcgctggtcgacaaggaggcggcgggcccacgtgcagcctcatggctcaccggggtctgcgcgcacggggatgaaggggcgagggcgagcggctgaccggcttgaccgggtcaagccgacgtggcacctatgccaggccacgtgggcggcgagaggaggaagaagggggatgccgagatggacggcggacggtggccgagttcaccggagtttgatgcggaggtctagggccaaggggagcacaccggaacgatggctaggataagagggagtgagcctccggctcggattcgccggggggattcgacggcgacggatttcgacggtggcggccggcggcgatcaaaaggggaaatcgcggcggggcgacgagaggtcgattcaaggaggagggagcatctccggggcgcggggaactcatttccggcaccggatggggcggaggactgccgaggagggctggcgacggcggcggcctccgggagcgggcggcaacggcagcaagcctatggcgggcggcggcgagacctggggcagcgtccatgcgtgttcgggggggctagccgagctaccacgcgagctaaggaaggagaggaccagcgaaaaaggggaacggagggtggcactaccaagccgagacgggcgcagtgac

SEQ ID NO: 8209 - DNA, 8225 bp, Oryza sativa
cccccccctccccgccgttccgctcagctccacgtcggcccggtagaagggagaggcggcgccgcttcgctcgtcgacggaggtgggggcggccgccggcgaagatcgagggcccggcggcggctccggatttgcctcgatcgctttgcgaggagagagagagaggaacgagggcgagcctggaggaggatgagactgagcgaggggtagtatggtaagtcaacaatttagaaatgggggagccctgaattttcctatttataataggcgggggaaaattttcttatcgggaaaggaaacagtaatacacgcccagatagagaacggacaaatcgcaggcgcagcgaagaatgaacggatcacttgaaaaccttaataaatgtggtggatggctattgtacatgtgcctttttaaaacaagtggtacaatgatgcgaaattaaacgtttccaaaaattgaaagcggacgaagcgatccgacactctggtagtattaatgcgttacacgtgacgttgtactcgttattatacttataccctacgtgtgtccgaaaaccttatttgtctcgaacacgaaatttattatagcgcctagaaagaagagaaatcacaagatctataaaacgtagtagtatcaccttgtaaacgtgaagagtatgtcaggaatgattatagatcttaaagtacgatgatgagaaataacataattgatataaagtataagataaaaaagtaaacgattgaagataccatgaaccctgagataaccacatatctttagagaagaaaccaataaatctgtaagttaatatttttgaaataaacatgacaaaaatctaaatcttttagtccatcttaatatacttgcaaggctagagatttttttgtctgataaaaaatcacatatgctttcccctctaaatcaaatcttcaaccatcttcatggatacaaaaccaaatggaataaaaaaaacatttgcaaacccttacatgtaaatcaaagcggctgacggcgcagatccgcgtatgcgagctagcatatggagaccaaggggatgagaaaattattcagggatgctcttatttatagatggaacaccttaccctaggagtgataagtacgtgtacttatcatctgcttatcaacatatcaatcagctcatgcacttattgactgtgataagccactggatgtgataggtgataaatccgctggagagaaggtggtgggggtccgctggagccattaacgcaaaggaatccggtgtggctgggtggagtggatttgctttttgatgacctttcaacaacccaaaaaaatgccttttgtttaatgacctgatggttaagaaacaaaactgaccattattagcaagatttcttaacaaaatgtgatgcctaatgtagcacttaatgtctcaaaacatatcaacatttatacatggaacctataaataacctgtctcaaaatagaccaacatttatacatggaatctagacataacctatgtctatatttatggataggtattactgcctctgtctcaaaataaattaatttttcacccatcccacacgtaccaatataaaattgaaaaaaactaaaatattcctacgttatcaaatctcaatgcaactatttctcaatttatctactcacagtacaattattttgtactttcacaaactttgatgcaacaattattctaaaaatgaacttatattaatggaagatgctaataatgaacttattatggtacgaaagaactacaaaatttgctttattttaggatggaaggaagtagtttggaaagataattatgccgtgagaaaatttatttttggtatcaacgaagttgaattgtacaaaaataccattataggtggttgatgctttcaagaatgaaattcttctgcatgcttgcaaaatgaaggatactcttagctctcccattcttagctagttacaaagtttgtaatttctagggattttgtttttgtttttctgttctttctttgtacatatatttctgctcttaataaataactgctaggcaaagccctgatagaacttaaaaaaatcatcgtacaagccttttctttcacgtttctattgtcatttgatatttgctagcccctctaaaaagatcattttgtccttaaaataataacatatttggccatagcctcataaattatatttctaccaaatttgcacgtgcaaaattatcttcagaatggcatatcaaaatatgcaaaactttttaccattcaattatttgcaaaattccattgtatggacaaaatggtcttttggcggggttatcggatgtcaagtgacatagtaattctaacgggagtgaaaaaaaaaggggactataaatacgcttgtaaggtggcatttgtagaccgtaactttgtccagtttgtagaaccaaactctttggtagcgacaacatgtagaatttatctttttctctaaaggaccatgtatccaaattgcatgggcttttggaaaagaaaactaactcctaattaatttttaaatttaaattttgggcagtgacggattctttatagggtattacctccgtctcaaaataagtgcagccatagatatccgaatttatcgttttgaccatccgtcttatttgaaaattttaagaaaaatatttaaaaaattagtcacacgttaagtactattcatattttatcatctagtaacaataaaattactaattataatattttttcaaataagacgaacagtcaaacgttggacatgaacagtgataaaactgcatttattttggaactgagggagtacgtaaactaccttgctacttatgcgatactcttgaaaacgtaaaaattacatctctcagtaggaagggcctaattgccgtattttttatgccaacgcttgaggttttctccataatctttcttgactctctgatcaacctgggatagataggcttgacatgtaaaacctccatctcatgattgatggatgctctccacttggcttttgtaatgaagtttcatgaatacgtcttcagtgatacaggaggcagtctctttcataaatggagatttttattgctcaaaataacctgatgtaagcacagattgtccatatcacaaaacacgcatgaacgcatttctatcttcatgctcactgtataacggattccttgggtacaataactcgagatataaactaggatacaggctttgtggcaaaactgcgaaccccttagaaaacccagaaatatgatagatgataaacaagctgggggggggggagggggcattatgatagatctggtgcaaatgcaggtacgctgctggcagagccaactggttcttgtagagcaaggttcagtggaaacatctcacattgagcaatgtgcgccatcagctggtccatgaggactaatgcggccatggactccaccatcggcacagctacaagagttaattgattgagaaaatgtcagattatactatcatgagtgagtggttaagggaaggaaaatttaggtactccctccgttccagaataagttaatctagtacgggatgtaacatatcctactacgaatctggataggtgtttgaccaaattcgttatactggatatatcacatcccgtactatattaacttattctaggacggaggtagtagagccgtagatccattaccgcgagggacaacacatgggtcgtggcggccccttgctaaaagttcaacatcctcatgctcccttgaaacagtatgttgtttcttctggaaaagcgaaatccaatatctcaaataagtagcaatatagccttttaagaaatagaaatcctcaaatgttacatatgaatatatgatacaccgtaaaagacacaaaatgtactatgagaaaacactggttttagctgcatccacaagactacaacaccatagtgcttgccatttaaaaaacatgacatagcactatttctaaggatagatttttttttaatatactgatgaaaaaatgagttacttgaaccggaatatctcaccccaatagtcgcggttggcttgaaagctactttgaagtatataatttcaccatttgatatccctccctgcatggacatacacattataaatactaagacaacggtgttatactatttactagtatttttttaatctagaatgcagctagatgtagcgaaaacaataaataatataactgtaaaacaacaggggactaggataaaacctgcacaccgcctgaacgattagttcttgttctcacatttccagcctcatccatatagaactcatcattatgctcacttccagtgtagtcagtacctgggcacaagttattagttagtattgaggccagtagcaaagtagttggcatgcacagctatttgcaaaaaataaatcaactaattatgtgcagattaattcaattacctgcaaatccactgccgatctcaaaccccttgcttgcaggaagagaaagcatagctttcgccaattcagcctcaagtttgtcaaatacaggagagccaatcccctacaaattgtcgttgctctatcatatcagtagctcaacagagaaaaaatatttttctaatgaatgatcaagcttcaatgttcaaacagattttgtgcaaattccaaagcagggcggtcataagcagagagtgcaaacgatgagcttatttagtttattttagctggaggacatatatcaaaataaacataactgcagggtttaaatacttacacgaggaacatttcttgcaatgcatgtgaccacaccaccaatcgaatcacctctaactcgtactttatcgattgcatcaatcatcttctgtgcatattctggatcaggacatctaacaatgttgctttctatctggaaaataaaataaatataatattcagcaaatgccttcagagactgtccagaagtgttaaacttgaaaatggtgggaaccacagacctgttccattgttacagtgtcataatcaacggcatcttctggtagtacaacttgatgcaccttggacacaaacgccaagatctgcaattgaaaatattttgctgctatgagacattggacagaatttgttgcatggcttcagcatatttaggatgtatattcgaatgctgattcatttttcttcagcgtccaattgttcatggataagtaaacatgtcaattgcgatgcttgatacaaatcttgatcagttaagagtaaaaggttgccaagtaggatcacacctctactccagatttgagcttaagaattttctttgcaagagctcctgcagccacccttccaatggtctctcttgctgatgatcttccacctccctatcattcggttgatagaagatgttggttaggcattcaagtaagagaagtttaggtaccacagttttagacattcaaataagagaagtttaggtactacagttgatggttcaatgaatggctatattacacattataaaacatgaaaaaaagtacctgcactgctctaacaccgtatttgaagtcataagttgcatctgcatgtgaaggtctgtaggccttagccatttcactgtaatcctgtgggaatgaatatggttatttccagctttaatatgttactccctctgtcccaaaatataagcatttttagctatgaatctgggcaattgtgtgtccagattcgtagccaaaagttgttatattttgggacggaggtagtatttcaatacattaatgcgaaaaaacttaggtacttacaccccctctctgatctgtgttcgggacaaaaacatgaattggtgtcccagtggtcattcctgcagaaaacccatcaatgctatcgtgaatatgagacaagctaatactctaaattcaaaaatattttttccaagtttatcccatgtcctgaaagacaccataccttcatgtgtccctgaaagaattttgcaagtgtcagtctcctttcttggggtggttattctgctctggcctggccgtctgtgataatcaaaattttatgtcagttaacattatggtgtaatgtaacataacaatcatattctgcaagaggttagcaggattgcatttgcataatcctgtttttgacagaagccagctgtcagcacagaaataatggatttttcaagagacaaacctccggtcgagttctacttgcatatctgcttcagtaagtgggattctgggtgggcatccactgattacgcaaccaacaccgcctccatgagactctccataagttgcaacctggaagtagttcccaaatacatttgcagacgccttcacctctgttttcaaatttcaggagcaacggatttaattaagtcctttcgccatccttctaatagaacaaaagtaatgcaaagtagcagatttaaatactctatttctaactaagatacgtgatcagtatccacgatgacactcaaaatccaaacacggcaacattaaagctagttgtcatcctaatccccaagatctaaattctcaatgatactaaacaaactcttgatgctaggatagaacgaagcagccgtttttctctcctttcaaattaccctatacaatagacacaatcatggcataaaaaaatgctaaaaaatggtaagattctttcttagccagacaacgagtggcaaccctcttcacccacgagtagatgaccagacaaaactcaaagccgagagaggccagccaagcaattcccagctgccccgtagccgcgcaggaagcaaactctacccgaattccaccgaacggacccagacaagggggggcgaaacgattccaataggcggacctaggcgagcggcgcggcggcggccgacggagaagcggagggaagccggggcggactccgggaaggcgcggaacccgccgccgccgccgcgggggaggacgcgcgccaccggctgcgacgacgttggcgcggccatcggagcgaggttgttggtttggttggtgagagccgaagcgaggcgaggacgcgaggtggggaggggaggaggaaggaagccgccggtttaatacgcgacgggggtgtcgcctcgccacctacccctctccccactccggccgcccggctcttcacctacgaccaccggtccggtcagtccgaccggaatgggattctttttcaataaaaaaaccgcccggttcaccagccgaactagcttgaaccgcccggccgattcactgatccggtgtttgaaccggacagacgttgtcagattttgacttgtaatctgacctcgccattctgatggagtgatcgaatctggtaacacctaccaaccgaggacgccatcggccattctaaagtggtcgcctattccaactcccagcagcagccaggtaaccaaaggtttgggatcacacgtttactttgattttaccactagcaaaaaagaacaaagtttgaagcgtgatcccaacggcaacggcagcttgaccattgcaattagctatctggccatgttgcaagtttatttccatgcaaaaggtaagagcaatcagagcagaacatatatggtgtcatctcatctcatcaaggcaaaaatataatgagaatcatgaggaaattttgtacaaatctggagtccatctgctgtaactctttttactcctgatggagggaaatcccattaagtatgagatgttctccacttcttcaggttagggcaatagtacacgcatgaatccatgtgatgtgtatatggtacacccactccactcctcttggcatctaagaccttcacccacacaggtcaggtcaggaagccacattatgccagaagcttacatgctaacatacactggaaggtacacatctgttacatctcctccccatgctcaaggcgagagcgcagagcgcgatacggggaaggtcggaaggccccaatctaggatcatatatcatgatcatatgcgcccgacattgtcgcagctacacctcttccctgtgtgggattggcagcgattgggatggctgctgctgatgctcttcggctttgctgttgactttgatcggtgaatcgggtgacggctgctgctgctcttcagctttgttgttgactttgatctcaagtagccgctcaacgggctgtcggcagatcgggcaccgggtcgtctggtacctcaggaccttggcacactcgctgcacat

SEQ ID NO: 8210 - DNA, 41715 bp, Oryza sativa
cgcatgatacctgataggtatcacctgatacgtcgcgagtatcacctgaaaacgtggtagaattgcctgataccttatatatatcactcgataccggacctgatacctaaccagtatcatcccgttcaaaaacgggattccgttatatagcagcccctagaaaatattatgttgtgccgtggtgaggttcgtttcagggaaaaaaaaaaaggaggcctatgtgttgtgcaattgatacacggtctgtgcttttcggaatgacttgctgatccagatatgtatattatacatcgttttgttgactatgtgcacctttttactttaaagtatcttgatacggagaatttgtttttgccaacaaaggtctcttgtgattgtgatcgagcttacggtctgctcttgccagaaagcagctagtagttgtgttttgccatgcatggtcggcatgcttcttgtgttttgccggtgatcgaaccaggttcccctgaagtcaagtgaccagtcaagagtttgaacgttgaaacgttgccttctagcgatgtgccatgtgccctaacgagtttagccaatcaaagctagtcacaggtcactacagttcgcaactgattttaccctggacaagcaggtagcttcagaaattagactgatcattttgccatcaccagtgtcacctcaactgttccacccgtgctctcgccagtaatacctctctatgtacagctctctgtccctgaataacaaatataattaagtttcttttggtatgcttaaggtttgtttccctgtcgttatgtacacagagcatgctgttctctgttttttcctgtttggtaagataagatttgtttgaaataacacagacggcatggtctcatgtctctgtaatcaactgttcgttaactgttgatggtgacgcataaaaatgcatctataggaccaagatggatccgtgtgatctgatgatctgatgtgcatactgcatagtatcatactatatagttttctgtggttggaagtgtcaagtgatcgaagtttcagttgaaagatccatccatcgatcggccgcatggcgtctgatccgctgaacacatgtatattcagtttacgatcatctctccggggcccgtcagattagcacgccgtctgacttgacctagtgcccatctctcgaggtttcagatcggattggagatccagcatgcaggattgatcgaaacttccaggcagacaagataatactagtgcgataataattaagaagaagatttaaaaagaaatctagatccatagttacatagcccatagcattatctcttgagtagaccttaataaatagtatgaagattttctgtagttcatgtaaataaaaacaaatctatccagggcatgtataaacctctgctcaaatgcttactgtcgttgatgcgagtctggtagaaccagaataaaacttatgctaattccggcgcatcaaccgtacgtgcatgtggctcacttttctacatatgcatttgcaaattgcagtttaggagctcctaaacttgtcgctgcttccaattccgtgtcaacattcagtggaaataatagaataaatgtttgcgtaactgaagattggagtgcgaatgttcagtggaatatatgctgcgtaattgcagatgggtgagttaggcgagagtgtatatattttcggccggccgcgacggttcgatcggttaagtacgtgtgcactatgccatggatgccatgagagacctgacgatgtatataattttcagaaaacaaatgctgcgtgtagctagtgcataatatggatgcatgcatatgccaggcttgatgatgaggaatatgagttggtaaaagccccaattcccggtcgtaattctagtgcccaaaatgatgctcccatcaaccaaacacgcccgcttaactttgatcaattaatgatgatgaaattgttccctagcttgtcctctccctaacctatactagctgtccaactgatttgcttttggacaagattaagcgttaaactactcaggcgcaaattgtggaatactctaccccaaaccaatccaaacctaccgttcagattaactatgactaatctagtggccattactgtactgcttttgcagctagcttcctctcctaacaactcaagcatgcatgcgcgattgcacgcacagctaaaacgaagtcgtctggttctgatgcgttgatgcctctttaattctgcatgcgaataataacaatattgtcttctccggcgccgtccatcctcgagattccctacgctcaggccatgagggggtatgtacgtatctatgctgttttttctcgttattctgcttttttaattagttttctacgcagagattccctgctctctttatgatttctcttgtagcagtgaaaaattaagaactcggcgcaagtacagtgttaggaacgcacgcacatgtcgtggatttcgccgagaaatgattgattcgcgcgctacatatgcatggatgtttaattactaaatcgatcacaaatctgcatgcactttgcggctagcacttcacagttttaattggttagtgctctatatttgtttgtgcctagctagccagcagcttagcccgaaaacactgaagaaataatgccattttgagtaataaggagctaattaatctatagctacctaacgcctatagtgctaacaaagatgtatcgacgcgtgctatctgcgtgttctttccctgcaaaagatcgataagaacagatcgactttcttgtagcttggaattaaggcaagatttccagggatactgtctgtaaagttttcatgctggttactccatttaatttttaaaaattcgagcacgtgatttgtacaaataatttgcgttttaatctgattattcttcggttcagttgaacaccacgcacctccaaaatatgcagatcagatcagcatttgttccaaaattaatcatcttcccttcgctgcttcgattaggagagcatgctgccggctggaggagtagttctgtttattatgcagcaagcataaaagacaactgaacgatcacatgaattgaacatatagaaaagactcgtttcaactgtcaatatatacagaagattcgtgtcagtttgcagttataaaaggagaagattacgcacagttcagatcgcgccgtccgccggccggagatgacagttagtgatcttgtagtcttgtgcacgcgacgccgttggctagcttacaacggccaggtcattgtactaggagcacacataccggtcacggtcagccgttgcaagttgcaaccgaccagatcattttgaccgtccagttatacgcgccccagaacgcatatatgatctagctctgcgatctaggccacgatgctagctgccatgcaacagctatgcagctcgatctgatatatccatcttactagattcttattagtagttaagcattagttactgtactatcaacaagttaatttcatcgatcatatcaaggctatatatatatatatatatatatatatatatatatatatatatatatatatatatatcttgatggattgatctctagctttgattcctttgcacagaatctggtgttgcttgcaaatactactacgagcagtagtacatcaactggtagctaatgaagtgatgatttatgccgcctgcatgccaattgccagccacgcgccagcgccgccggcggccggctcgacgccctgcgcgcgcggcctatcgtaacatggcggccttgaattggaggccgcagtgtccgacgagtataaattttcacaggtcgtacgactgtcacgtgctcccgcgacgctgcgtgcgcttccggtaaaagcaaggggcaaccgcccgctgcccacatggatgacgcgagacgggcctagaggcggccccggctgctggtgggcgtcgcgatcgagcaagagagagactcgagacggttgtgctcgcgcgtcgtcggagctaagaacgaggagcgcacacgtggatgcgcggcgactttgcttgtgtccaccggcgagtccacgcgtacgtgcgcacgcctgggtgttggagttggcgaatccgtgttggcagtcgcggatccccgcgcggagaaaagctgcagaggctgcgggtggtgcagcttgcagctacccgcgctcgctcacggcaacgaccgatctccacgccacgcaacgcaacgcagcacgactgcacgactgcagctgcacgggtgttacagtgtaacagtgtctgcgaggcttgctgcagtggattcggctgtacagtagcgaaagccgtaggagcgtgcgccggtccagagcacagtcgtacttaaaaatgtaccccattcataaaaatggaaagtgtgatcttaaacatacacatttgatatctctagaatcagttttttttaacagagtaggagtacgcctcaagcagtggtagatgcgttgcgtgcacacacgattgagctagcgagctgcaggaacaaacgttaccagctgcactagctagagagagtaaagtattatatacggagtactgaacacactatacgctacacgcgctgtgactgtatgtctgtgacctttgtactgtgctgtgccagtgtgccgtgcagtccggccaggtctccgcgcgccgcgcgccgcgcgccgcgcccccaccacgtcgcgcgacgccaatcagtgcgtgccgtatgaacgtggcgacctctgggtcgatcacctgtcacaccgagctagctgcacgcacgcacgacgtcgcgatctcgcactaccggggccctggcccttttccatgcacgcgcgtacagcgtcgtatagcgcacgtatgcaggccgcgggcgacccccaagtccagtccagtcgctacgagctgaaagaaacacgctgcccccgccgcccaagcgcgcgcgcgtactactgttgctcgcttgcccggccagccggccggcgcgcggcctggccgcgccgcgccgtgtcgcgcagggtgcggacaccgaggctcgctggcacgcgggcctgtcgcgcgcgcgccgcggggctatccgatccgtgcccccaccacgcaccgtgtacacggttctggctctgccatactacatgaacactgtgtgcgtcatgcatgtgtgcaggcagcgtgcgtgacagtgtgagagcgccaacgcggtttacgtgtgcgtcgcttgtgcgcctagcctagctgtgtgctgcaacactcgtacagaatccaagtatgcagagaccggccggcgatcgatatcatttcgatatatgtaatttgttgcgtgcgggcggctgcatgctcatgctgagcctgctgcttgcaatgcatgcaggctactggtaatgtgccaagtggatgtgcatgcatgcatgagagtatgaaactacacataaaaaaaatagtcctagccctagcccagtgccccagtaggccagtagactcaaaaaaaaaaaatttgaccaaaaacaacgtatcaaatatttagacatatgcatagagcattaaatgtggatgaaaaaaaccaattacatagtttgcatgtaaattgcagagacgaatcttttgagcctaattacaccatgatttgataatgtgatgttatagtaaacatttactaatgacggattaattaggcttaataaatttgtctcgcagtttatcggccgaatctgtaatttgtttcgttattagtctatatttaatactttaaatgtatgtccgtatacttcaaaaactttacacccaaaaaattaaacacaccctaagccggcaatcgcgggctcaatgcgaaagtttctaatctctgtccagctacgagagattttacgagcatatatagaatgtcatatcgatcgatcatcatcattgctaatgatgccagtcaagcaacattcacacacatcctgctataaggacatcatagcctcacgtggcaacgtgttggcaagtcatgtactactacattgtacatgccttgccataacgggagctactccagctacgtgcagcttgggcaacgcatgcatatgcatccaatgcctggttcgcaaagctctgctttccatcagcgcgcaacaaaagcagccagttggaaaagggttttggttcaagaaggtgctagctagctagctagccatgtccatgcatgtctctctctctctctagctttggcaaactcccatgcaagaagctagcgaaagcgaaggcccgcccatcattcgccttctgatccagcaagcccacgccaactccttgtctctttctttcttgcactgcatggcatattggcatggcagctccaacgaatcaatcattgtctaggttccgtgaaccaccgccatctgctggccccctgccgccggcgccaagtctttcttatgcccatacctgtatatgacctcttcttctctagcttcgatcgatcttgccatttcttggagaatactagtaccagagagctgtcaattaacacaccataggtgctttacttttgttaattaggatcatcagatcactggaacttcttttagtagcttgatcatgaaaatgtatttcttcattttcatttctgaataagaaatagattgaaacacttgtctaataataaagtgatcgtgctaattcgttcattgcttagagatgattttttttcgagaaatgtgcataaggactgctcatttgtttgaagatatgaataaagagggagttcagctgatttgttaggctgataattcaatagctggggaacatacccacattgtctcacatgctctccccatcatattttatttcaccagcccccacagagagagacacataaagaaatgccagctccaatcatcacatgaacaactactactcgctgaggatcaggtgatgctacatagccagaaggccacttgtacagcttaatttgtagccagccacttgtttgatttaattttctgctctccccccatattcatttcttgacatgccagccagcttagctctcggctcttggggagaaacgcattatttctgaatttctgatgggtccatcagatcgtagctagtactagctagatagacgcctcgctcctgctgggagttggagttaatcagctaattatcatactgcaactcgatcgatcgcctcgtcgtcgtcgggtccccttcgtttcagagaagatcatttgttcagaaaagaaaactaaactaaagggttcagagacgatcgatcaatgcatcatggaccacagaacgtgtccctgtcgggagaaacatgcagatcgagcgatggctggccctgcgacgcccattgaccgcgatttgtttaagcaaggcgcgcgaggcgaaatttgtttagcgatgtgatcaggctaactgtggagactgatggagttcgtcagtcagatgggggcggttgccaattggatggcagagggccctgccttgttggtggtttgcctgcagagagttagagagagagagaggactgacaggagatgcccctaactaactgcattcataaccgtagtacctacctactcccggtaggtaagttgttttcagatctgcagagtttattatggctagagcactgctacatttactaatttttttactaaacttttactaacaatcatcttaatcatttaatttagagatgaaagttatgaaaaatctatatgtactcatgatatgacatatcgtttctttaaaaatttagtaaaaaaaagttagtatgtactagccttttccacatggctaaatgggttagtacaggcagcaaacctatctgctatggcagtaatctttttcgtttttacaagtgtgcgaggccgcatccacgttaaacgactaaatgcaaaggacataactacacagctaaccagctaccactctatctataagaggtatcatccacctatacttcaaataagattttctcttaaactactcatctgatctatgatccgattacaccgttgtgttcataataattaaatctttacaacaatatctcacatgattatatttcgatgaaaaattacaaattacttttatgatatgtctaaattacttttagactttactgaatttacttcttagacatagaagtaacttagtgaaatctaaaagtaatttagatatattataggagtaacttataacaaaagaaagtaacttcaattacatgcacggggttgacgagagacgacgccaggtcccctccactctccatgtcatcggctgacacatagggtcagatccagccgctccgaccattgagaagcgacggttgcgggcgacgaccactgcatcagggagatggaatttgtccaatgaaaaaaggcataaattaaatttactttcttttgttataagttacttctataatatatgtaaattacttttagactttactgaatttacttttatatatcttagaagtaacttagtgaaatctaaaagtaatttagacatatcataaaagtaatttgtgatttttcatcaaaatataatcatgtgagatcttgttgtaaatatttaattattacgaacacaacggtataatcggattgtaaatcggatgagtaatttaagagaaaatcttattttaagcatagatgataggaatatttcccctacttgctaaatggaataatagcaaccaaaacttctaaagtacaagcacatgggtgtctctaattaagactaattggagaggcctctccaaatagatttaccgaaatgcaaacctttgtttgtacacgtgattagcaagaaccaaaccatgtttcaacctgtcacggttaacaaggccatctgaactgaaggcccaatacgtcagcgagggacggccttcttcttggctttacttcggcggcggtacagcccatgtgtatttctggggtttaggcccacagcccacttgaggccgtggatttttgctggacttcggcccattttgccgcctctcctttctcctccagcaagccacctgcacgcgcggcgttccggcggccacgctcgcgatcctcctcggttcctccgcctccgtcagcgacctcggaaggcggcggcgcgcgtcgtcgtgctgctctccgccgcgcgccacccggccttcccgcagctccggatcgcgtccccccagctgagcatggaagtgtgagtgctctctacttggcttcgattgggcttggaagtgtgggcggagagggctccgatctgatcgtgttcgatcgctgtggcagggtggcgtcggcgccggggaaggtgctcgtcgcgggaggctacctcgtgctggagcggcccaacgccggcctcgtcctcagcaccagcgcgcgcttctacgccatcgtccgcccgctccgcgacgagctcagccacgactcctgggcatgggtgagccccgagccccagatttctcgaacaaactttactagtagcatcgcggagaattgctccttactctgccgagcacctgtaccatactaggcgtggacggatgtgaaagtgacctctcctcagctctcccgggaggccacctacaagctctccctgaagaaatcaacgctccagttgacgtcttcaaggcaagtcattgatcatttgctgggattgtggcagcagcgctctggtctgtagttgttttcggaattcacttttggtgatagtgttaacaacttaatgttgcagggaatctgcaaacccttttgtggagcaggcagtgcaattctcggtagcagctgctaaagtgactgtcactgacaaagaggggaaggaggcactggacaagttgcttttgcaaggttttgcgattttagtctgaagttttgctcctgtgcaaatcatgtttttgtatactatgctatattttgatttcgtttagttgttaaattttcatctctatttttttttgtaggtttgcacattacaattttgggctgcaatgatttctattcttatagaaaacaggtaaagcttatttccttaattagcttgcacgtatgcttgcctttagccttttgatgagcttcacagcaccaaccccaggctagaagtcaaaaaagaagtgagatttaacctgaacgtggccctagttggttatttcagctttgcgaaccacctaatcttaaacatatattttcttcatattccactaaagcagtaacaaactcatttgccacttgccagtgcctaatttatggattaacatgataatttactgaaaagaggtagctcaggtagaaccataagggagaagttgtactgtgctttgtaatcggtattttctctttgtatatccgtggaaaatgtttacaattcacctatctgaaactgcaataaattgcacaattatttagaggcattgctttgaggtctgttctttctcttatacagttaataaatttgatatttgttcgtgtgtgctctatgtggtcatgatatcgtttatcatgtaaacaaataaagattcgatgggcatgcaaaggatgaaccatttgtaaataaataaaaaaaaaatcagtgcagataggttgcacggttctataaactgaaatatactctcttcccatgtttaacttatgtgtgaattacaatgcagatcacccttaaagagttgtgccactgttaaataattagcttgctattttctatcgtttctccagattgaagcacgtggccttcctctaactccagaggtattgctttcgttgcctccattctgttcaattacatttaattcagaagttgctaatggaacaatgactggagaaaattgcaaacctgaagttgccaaaactggacttgggtcatcagctgccatgaccacatcagtagttgcagctcttcttcactatcttggaactgttaacctttcatgtttgggccaatcttccggtggcaacgcagctggacgagatcttgacttgctgcatgctattgctcaaagtgcacattgtatagcacaaggaaaaattggcagtgggtttgatgttagtgctgctgtctatgggagtcaacgttacacaaggttttctccagaaatattatcctcggctcaggtataaaaaaaaaaactgtcattaccagatagttgtctatctaaaaggttttctattataaagcttgccatatctgattggctgataatatatctgcacaatatttacaggttacaggtgggcactgcatggcagatgtggtggcagatattgttacacagagttgggatcatgagaaggttaagttttccttgcctcctctaatgtcccttgtaagttaaaaagaacttatgattgatgactaggtttcctaaatggtcaataaactatttaacgggctgtcaccagtcattagaaaaattatgggtatgatgattgccttataagatttacagcttgattagaggttagttgcacttctattgtgcctttttaaccatcagttcatggctgttttttattatcacagtttgtgagaaaatactgttataagcacgaatgctacaaatcatgcttgtttttttctcagtaagaaatgaacatgctagtttttgtgatcactatgcattcctcaaccagaacgtagtttgtaggtttgcattctcttaaaaatatctatccttttgatttaggtgacttgaaatgcagaacttttagatgaagctttaagggcactacccagaaacgcctttctgtttacaaggcacagcagagatcagacattttttgtgagaacgcaatatgaacaatctatccaatattctttgcagtgttatttgattgcttgttgccttattgattagggagattgtgttctgttcgttgattgtaaggataagtactacttctgactatagggaattttttgttagcttctaggggaacctggaactggaggatcatccactccatcaatggttggatctgtgaaacagtggcagaagtcagaccctcagaaatccaaggagacatggagtaaattggggattgctaattcagtgcttgagaaccaactgaggaacctaaacaaacttgctgaagatcactgggaagcctatgaatctgttttacgatcctgtagtcgtctcacgtgcagtaaggtaaataactagattacatattcttatatcaaacattcaatattgtaaacatataatatatttgtttcaatgggcaagaagaaatcatgttgttatggttaataatatgattgttaactgtttagactccatcaaggatcacggttatatagtgcataaataatgcaactgttatcctggaaaagtgttttttgatggaccagagcttgaaccatccaattttttaacagcatcttctacacaattctgatttctgaaatacttatctttgttgtttgcatgcttcttgttcttagttatcaccaggtgcatctgtgaatttggaaagagaactcgtctttcagtactatatgctaaaaccttttctctttgttcttgcaagtggacagaggtggctaccaatcaacatcaagaactaattgttagatcattactggccgcaagagatgctttccttgaaataaggcttcatatgcgagagatgggcatagcagctggtgttccagtaagacttagttccttttaatgaaattatggatgttgaagataacatgatcgattcttctacatggtggctggcatagttacatctagacaaattgtttagctattaatttgtagataatggggacattatagtaatatacacctgtctcgttgtcctcattttgcagattgagccagaatcacaaactcaacttctggatgccactatgaatatggagggtgttctactagctggagttcctggggccggtggctttgatgcagttttctcagtgattttgggtgaagcaagtgatgctgtagccaaagcttggagctcagctggtgttctccctcttcttgttcgagaagatccccgaggtgtttcattggaagctggtgacccaagaacaagggaggtgtcaaccgctgtatcatcgatacaaataaactgataatgttgtttgaattccgttagatttattcatgatgtgtacgtttggtgtctctttcatgtagcactagccaaacatgatatgttgaagaggctacacgcggacatggttaaataagtgctgtgcacggagcaagatatcatgttgtgacagattgatatgatttagccatgtgaaaatgcttgtaactattgaaatgtacgcatagaatgcctatttaagcattccaataagctcaaagttataggagttcgggcctttgatttcagaactcctgtaacagtttccatggtttttgttagaaataaaagctgttgtaaaagtttccatggtttatcacagaactggacctgtttttggcgtttgaaaggggttgtgacaatgtgacttgtgagctgggtcgtcatctcatctccttggataaggactgcttttagtgaggaaatgctgagagcataattctgcaagaaatgcgtccaaaggcttttcaaagttgagccttggaggaggcattggggctttcggctttagcttttcggaaatgcccagggtcaaggaatgtccctaggtgcgcactcttccttgggctacaaatgcttcaccaatcaaggtgcccagggtcaaagtattttcaccaatcaaggtgaacttctctgaatacaaggtacctgtcactgtagctcatcctgaaaactttggcgactacttttttattctgtaagcaataaatttataaatacttaaaaaacatcttatattatcaatttatgttgcatcctaaatgtaaccatgcgaattttgtgcatcatatctaactattgttatttgctagctgcatcataatcttatactaggctcccaagaatctaacaaataatgttggcaatagaagtcgtcgcttttcaaaattatgatggatttaacaggagacggcagcaaaagctggaggtcactaaaacggcggctggttggagagtagggtgcctaccatgtctaagataatgaggcatgttggtacaggggaatggtacgttacgtaccctgtgggagcatcggaatgaagccgaggcagtggtcgtcgttttcgctccaggtaacaccggatctttagcacacattccctgggtgcaaagctgtttctcttcgatggctcacctcgcgtggccatccatatgcaagatctgcttacgtagaggaggaatatatggtgaatttttgtctatacaagacttgaaaaggctcaaaagctcccgtggggatgtagagaccaatcaatctcgcgcctcccttcatagttgacatatgtctataggccaatcaatctctacgtagaccactttgattcaaaggaaaaacatagaaatttcatagaattttaattctataggtttaattttttcaaattattatttttgtctaaatgacccttacctcaacccataaaagttttggagaaaatttagcattaggtttaacctcatagaaactttctttcgaatctctctttttctcaaaatccttttttttctacggtctaacccaataactatttttgtttttttctatgttttacagtccacaattttacactttcatttctatcataatcatgtgttttttcaattgttgtgttttttcaatcatatgttttaaagtgggcagaaatcttattggttcgcacaaggttttagactcagtttgtggttttgtgctatgctgtgtggtgcttattttttaaaaagttttggcacatctgacttttactgtttatatgtatgtgaaaaaatattaaagtatcttgctatgaaaatgttttccctagaaaatacgcggatcattactaacaacatatctacaaagttgacttttcggaaacatcatgcattccacggagagagtaaagagaatttgtacaaataaacttaacaatatttgtacttgtgcctacagtaaatcagtaatcactgtagaaatattttgttagaggactgcacaaacattagtagttgtcaaatacagttgtaaatgctgatgtagtacgcaataatatatcagaaattgaagcataaaatctttcggcgtgcgcccacaaaattcgaaggaaaagtacactagcattatggatcagtattggactaattgataataatgcataacagtaaatataagggtaaattggatccgtgccattgtaaacatgtctatttagataaatgccaatacaattcgtctattcgtagccatgccactgaaattttataaaacgttttccatccattttgcgttgaccaggccggctggcaatctcctcctcgacggaaaaatggcgatggagcttgccgccgtctgacaatctcgccaccgccatcggaagaaacaggaggagaaaaattggcaatggagcacacctccatctccgagacaagacgagcttgccgttggaaaaaagatcacaattcacagggaggaaaacaaattgatgatggagctcgccgttgtctgagacctcatcgccaccacgacaagctagccattgccgccgtctgagaccttatcgccgccacgacaagctcaccatcgctgccgtcagaaacctcatcgtcgccacgacgagcccatcgctgccgccacctggggccacggaggaggcggcacacaccgggggcgatgccgcggcggaccggctcgcgccgtccgggagtgcgatgggcggctggacttgccagggatagataaaggagaaagaggatgaggacgagcatctcgcggccgctttgtggcccatggcgcgctgaggaaataggagagtagggttggcaacggggcgggttgggccagaacgcccccggcaccgctcccagacttctcccccggcccgggccccgcagagatggtcgggtgaataccatcacccgtccccgcccccgcaggggacccgcgggtgagtgggcccccgcaccacccggctgacgactgatgattgacgagcgaggagccgaggcgacgctgacgagggacaacgatagacaggtggctggggactgggcatcgctgccgctgtcgccgcggatgcgcctccctggccgccaccgcggatgtgcccttcatggccgctgctgccgtggatgcgatgctagcccttgccgtcgctgtcacggatgcgccgctgacaccgacgccgatggccgtgcccttggtcgtcgacgttgcggctcgtaagaggccgccaccgccgccggccgcaagaggccgccgcgcgtggccgccgctgccgccgctgttgccgtccatgcgtgatggctgggtggggtgggaagggagctcaatgaggataaggttagggtagggaatagatgaggaattagggttagactagatgggtcttttgggctcgtaatatgctattattaatagtctaatatacatttcttcggggacccgcaggtcacctgcccccgcccccgtaggggcgggtccccgaccctacgggtgaaattgccatccctagaggagaggatagggaagaagggagaaagaaagaagaaaaccgaaaaaaaaggatggatgaaaaatgtgtcagtattggtatggtcctaattttataaagtttcagtggcacgatgatgaatagatgaattgtaatactccctctatatcatattataagttatttgacttttttttaagtcaaacttctttaagtttgaccaaatctatagaaaaatatattagtatttttaacacaaaacaatcatgttattaaagtatatgcaatgttatatttaatgaaactaatttaatattttagatgttgctaaatttatctataaacttggtcaaacttgactagaaaaaaaaatcaaacgacttaaaatatgaaacggagggagtagcatttttctggataggcaaatttgcaatggcatggatccaattacccaaatatcaatttttgcatctgaaaattctctacccaggagcttccaacgcatcccttttacctttctttcggcactagaatatcttttcacattaattaattaacaaattgcaatgcatttttatggttgagcttctttctttgattcttccgaaccagaagaagatacgcaacaattcccaccgatcaagtatatacatgtcgttttctaggtggaaaaagatggagtaacaaattttgtatcatttgcagctttcaacgagtatttgtgctctgtcgaggaggggttctctgaaatcacagtacacagaaaatgcatcaccatccaaacagagctactcctacatgaattcttttctgaaaaggcagagctacacctgaatataaatatatgaatctgaatgtcccagactagctagtcaagcacagaacctctagccgacaacgactagtcgtcagaactctgaagaccactcgccgatgcatgctacagagaggctgacgaatgacaatgtccaagttgaatcaaatccactgccaccatcaccacagaaacaatatatagagattagagcctattcccttgatgccaatatgctacctggtgcgtgattatctcaggtgtgcaaccccaaagcagcttagcattcatccacttgggctagctgtgttttgtgcagtttttagtgtacataatgctggaggaggaatcatctatggcccccctcttttgtgcacttgtgctagacgttccatattaacaaatgaaattattccttatcatttgctttttgttcatgatctccaaacaagtgattttctaattcctctgagggacctaaagcctggtgcagtatgcatgtatattggtgttgggcataaagtctggctgtcaacttgactatttttcttatctgatggaacctaaatgtgctagactgatagtcatgggccatgccaaatatgtgagatcatatatgattggctcatctcttttcaatataaggtaaaagagatccagagtgcaaatctagcttgttggagcttttgctttaattactctgcgcctaagaaaagtgaaaaattcttttcagagaaaggggggaaaattccagactatccagttcctgaacaatgtacctgcatatatgttctagtggaagcatttttcaggccgactgctcacagctatctctttgtgttaatgttgatccacataacagcgtcaaataacaacacatacagttaaataaatattgctgtatttacgagtaaatagtatcttcagcactcaaaatgacactcgtgtttcagcaagtaaaaaaacatatgtcaaagtacatgtgcatgcattatctacctttcagaatcacccaagtataactggattttatacctcactaaccccggcacataaactaattaatctgtcgactgatgcaaaatggaatcgatccggcttatgtggcgaccaattaactccctggaacttaaaaaaatccaagaggccagcggggggtaaaataatggattgatttgatcgatcatttccatccagctaaattaaagcgtcgatactttcttacgtctgtcgaataaaacgccctccaatcgctcgtcgcggccgctgttgagctattctccgatcctctcgtggcaatggccgccgatcaggctgcatccttgcagcaatttgcagtttaattctcctttccattaagctttcatctttagcaagtcgcctcttaaattagtgcatatatataatctgcactaccatttgcagcagctcgcgacaaactagctaagaggctaattagatagcttacactcccctataaatatggctcagtcgagtgctcgcttggaagcagcagcagccagcaagctagagcactgagcagtgagcgtacaaacgatcggtcggccggcgagaagaggagtagaaagaagaagggtttgcgtgtgtgtgtacatggattggagcagggcggagaacgcgaggttcgagcaggcgctggccatgtacgaccgcgacacgccgggccggtgggagcgcgtggcggcggtggtcggcggggggaagacggcggacgacgtgaggcgccacttcgacctcctcgtcgacgactgcggcagcatcgagtccggaaactacggctaccccggcaccggcgccggcgccggccgcggcagcggcaacggcaacggcaatggcagggacaagaacaacgacggcaacacgaacaggcgccagagcaggtaaaaattactgacgcaagatcgatcagcgatcgatcatatcgccttcgatttcgatcgatcgaaaaaaatgacatattttcgctggcggctgcattagataggtcgctagtgaaaattcattttgctgatggtcggtgcccctcaccctctcgttacgagtttgctggtggtttttaaatttttccaccaataaaaataataagccaatattatgaaacatcatttttctagtagtgatcgaggtgtctctcatgattttatataatgcatttgtgcatgcagagccaacgggccgcagacatgacgtacggagaaatgaatgtgtgtcaacaaacaacaagcacgtaaagataacaagagtacgagatatgcatattatgtgtgctatatatgtgtatttacgtatacatatctgaatgtggtctacggctttggatattggaagcatctaccttgatagctgtagcttaatttgttatgtagtgagagtctgagagagagggaagagcatgcatggctagctgctggagtactggctaaagcttctgccatcgagcagtagtcagcagtggtatgcaactacgtatgcatgcagttgtcagggatgtaaaatgtatctggctctactttgtaacgtgtggtttgttggtcttgattaactaattaatgtaatggaatgcaaggtttggtttctgactatgaaagaagtatatgtgtttttgatttactaactgtcaaaataccttatcaaatttgtagaggtagtgtttctcttggtctctttcttggtttgaagctttaccactgcaactattgctagcatgaggcccttcacagggcgcttgcgtggcgagtaacctcgtcggtctagctacgccaaaccttgacgtggaggagaaaaggaggtgagtcccgtgtctttgcaagttttgtgcatcctattaaagtcccggtttcctcacacccgaaaaaagaaccacgcttgctactcctcaccaatcctccccatttcgaagatactctgcattggatggcctgtacttttatgtgtgtcttcatcacctttttcttaggtggaagctggaactatgggctatgggcacggtgcattactcttgccatgaagctcttctccttatggaatatagtcctaggtcctaacgacaaccttgtgttttcgtcaaccctggttttcattttaggatcaaacacaagtagccaagcttggggttgggggggggggtgaattggatgagggacatcaatgtgtgaaggtctgatggaccgtgggtgtctgcgggacatgtatatccgagggactgtcgatgtacggtgaaggcggtgaataggccgagagacaccaatgtgtgaagggtatgtggtaacttttcctcggtcaacccatcctccttattctttcttatattgtgtagctggcaccacaaataccttgaaacattattgttttcatccctagtggtggagctaataccctatttgagaagttttcagcagctataactacttctagaatatccagctcaaccaaatagcctatattctcattcaggttttgagaagcgatagctatagaatctaaagaataaactactagttaaaagccaaaaaacctagtttctatatattttcaccaactggatgcttataagctagttcttcaactctcgaatcggacctgaatttgtaaactcaactttgagtacggatataattcttaaaaagataaaagcatgccaatgatgctttaaaacccttatgagatcaattattagacgactcatagcttccattcaactctaattaacattgaccattcttggatctgtatctcctatacttagaatagattttaactctatttttattctgttcttataattttttctctcaccaataatagttctagaagtctacaaagcatgatactgttgaggatgctgtatagtttatgtgccgatgttagcatgaaacctaggtaggtatgctagtaccgggttggatctatatcccctatacttacaacatatttcaactctattttgattttgttcttacattttttctatctcactaataatagttcaagaagtctacaaaaagtgatacaattgaggatacgtccagatcggttgcatccatgggccatgtacagatcagtagcttccatgagggcgaaattgaaagcattacaatctttctactgattgattcgccttcgctgccgatcaaccctaataagctatcgactgcaaggctttccactgttccccaagcgccatcaggatatggatttttgttaattgggataagggttttctgatgttgaatattgccggtctgaatgtgtatgaacttatggattcacatgttcttatcaagcataggcaaaatgctgcttttttctagcagatcgtgagccctacatcgagttcagttactgtgtggttttctttaattttccatgcaaaattcatcagcgtacattttttttctactgaaaaggtagaaacttgtcaacattattacaactaggaaggaagcccgcacaactgcgccggcaagaatgttaaaagaagtcatatatcaccatattcgctataaagaccatagattactttaattataatcataaaagtaatatgtataccgtcaaatagacaaatgatattcaaacaaaagttactttatcccggttatacatatacttatctatcaccactacatattaccattgtcttaaaggtatgtgctcttttaatagatagaaccatatttatacttaaaaataaacctaatatatcaataatataataaagaatccatcttcacttcacagtgtccatgtcttacttattactccccccgtcccaaaatataacaacttatagcctatggaatttgtcccaaaatataacaacttctccaccaacattctcttctcaactaatcacaaccctccaccattcaattttcctacctaccttcacttctcctccaatcacaacaccctccccccccatttaatcctatcaactttcttaataaccgtgtccaactctaaaaatgcttatattctgggatggagggagtagatatgtaatcctgatctcctgtacacgtatgctgcaaaatctcctatatgtatagaaacctctctcctaatctctcctaaaaatatctcttgtatttatagaaacctctctgtcctaatatccatatatgtacgccataaaatacatactgttcaccaaaaaacctccatacatgcgaacaacatacttactgagcccgtcctgctccatgacactaatgtcatctactaaactatgtatgaatattaaaaaatatcgcttttatcaattaatatgataaaatcactaaaattatatataaatgttcctctaacgcatcaagcataacatagcccgtcatggttttcttctcttatgccttaaaccatgggtttcgcatcgacgttgccataccccttaagatcagtgtggggcacaatttcaacattcattgtcattacaataataaatgattgcatcagtaactaagccaactgagctctattaacaacagtgacctctcactggaccatcaccttagcaatattgtcatagtatttacaatatcgtagcatgccctgtcctccatactttgtgccctttagggaataacatagagaaaatagaggtaatgaaaatagttcttttaagttttgaatcgatttgtggtatagagtaggcacggtgtttttatggtattaatcagtactactaaattttagtggtacaaatataattttctcttttaaaacttagcagagttgatcattcgacactaattcagaaaatctaatagctttagtggtgagaaccacgtggaaaaatatttgcgcaagtaataattctttgcaaatatatgattttacatgggccttgatattattttccttgtattattatagatcttcctcacctatacatgttcatgggataatatatgatagaataatctgtgttgttaaatttatttatgctaattgttaagactatttaaatgagaatgacatgaaaagggatagaatatgttccatgtgaacttttttaataaaaatgtagttcacatatttatatatttctttaaaaagattagcgatcaaagtcagtaactgaatatagtaccgctgccagttaaaaagattatttggatgcgaaagacataataaaaggattataatattgttccatgtgatagtattttattcaaatatagttaaatgggatgtagtattttttttaattcataaatcctgtttaactatcatataaacatgagcgaaaggagctacggaggaggggctggtctaactgtatgtattacatacaaacataaaaatattttaattattaatttgagaattaggagtgaaggattggtaggatttttatcgtacttatgtttttttttctcgtgaatactcccttagtaaaataaaatccaatcttaaggataaatcttaggattaggttattttgggcacagggtttatgtattatttttttctcttataggaatacgtttaaagaggtgagttaaaatatatatgcgtgaggtgaggtaacatatgagtatgccgtgcttcaaaaggaaactaatccacgattgtgttttatatagtgaataaaagtacttgagaaaaagaaaggtaaaaatctgttataggtgggcttatacgtacgtacatgccgtatgattgttttttatgtgcgtgcatactcagagagagatattaggagggaggggttaattactcgatagatctaatctaatggttgataataacgggtccatcaatttaaataaaaattgatggttggatgttttgcttttttcttagaatttatatgattttctctatttattagagcgccacgtggtggcgtagaagcatttgtagaatatcacgtggcgctttgaaagtatttctaggaagtttaatgaacttttagtatataatagtttgcttttcaataacatcaagttcttctttaatctgcaagtggacattacaatagcttgatcgaacctaactgcaagctgtcactttcatgatcatgagctgtgcatagttgtatagtactctgcgcgaagaactattctacgtgcaatgcatagcatgtacaacagttcttcctcccagcttgaacctttgatatgttgtatgaagtctgatcgggtttttcatatgtacatgagtcgatctgcagttttcttaataaaaaattctcatgaaccctatctgtacgtacatgaactgtctagatttttctcttcttttgcataattgctacatcaatcactcaatctgcttggtgttttcatccacgaggtgcttatgtacttctccattgtctcggcactcctcatcagtcccagaagcagtacctctcaaccctccttggcctagtggcgaagtcagaaattatcgaagaatagggataaccctaaggcttaactaataagttgttcatattctgtaaaatttatatggtaatctatctatctatctatctattatattatattattaaaatagccttgaaaggagacaccacgttcgctgtaggggctagaaattcccacattaatcgaagaaaaagaaaaaaaaaagaaaaggagagtccaagtagaagtacaatctaaaaatagctgaaattcggaattaaaaataagcaatattaaaagaagtttccatataagaacccaatacgagattaatcaaaatttaaaataaaaataaaataaaatccaaaattagaaaaggaatggagagtccaagtagaaatacaatttaaaaatagctaaaattcgaaattaaaaattagcaatattgaaataagtttccatataagaacccaatacgagattaatcaaaattcgaaataaaaataaaataaaagccaaaattagaaaaggaaacgagagtccaagtaggaatataatttaaaaatacctgaatttcggaattaaaaataaggaatattaaaagaatagtccatataagaacccaatacgagattaattaaaattcggaataaaaataaaaataaatcctaaattagcaaaagaaaataaagaagagttcaagtaggaatacaatttaaaattagctgaaattcggaattaaaataagcaatgttaaaagaagaatccatataagaacccaatacgagattaattaaaatttcgaataaaaaaatataataatatccaaaattagaaaaaactaaaagagagctcaagtagaaatacaattttgaaacaaatgaaattgaaaataaaaaataaaaacattaaaagaacacaatacaatattaactatctttttgaaaaaataaattctgaaatagaaaaaaaagatttcaattaggaataaaatttataaataactaaattttgtgacaaaaataaagactattgaaaaaaaaagaccatctaaaacacatgacgagataaattaagtaacaggcctataaaagagtagagttggtggtggttgatacgacttataaaaattgttaataaaacaccaaatagaatcctaatgacgattaaaaggagggacgtcaggcaggccgtgaagcaaacaagtaaagcggttgccgggacttctagaaagtaaaaaagaaaaaacatattgataatcattttcgatttttaaaatctcaatgacaataataaaaaggagaagcagcgggcggggtgtataagagtatagttgcagagcctccaacggttgacgggacttctagaaaataaaaaatgaattgcaacgatagttatgttcgaattttagaatcacaatgacaataaagagtgggcggcggatgggctgcagagggatatagtgacatcgtttgatgggacttctaaaaataataaaaaatgaaactacaagtccaatgttagaacttctaaaaagtaaaaaaaaacaataataatcatgttcgattttaaaatctcaatgacaataaagaaggaagacagcgggcgagccgtagaggagtacaatggcaaaaccgctgacggtttggcgggacttctagaaattaaaaatgaacctaaactataattacgttcgatttttaaaatctcaatgacaataaagagaagagatagtggacgagacatagaggagtataatggcaacatttgacgagacatctagaaattataaaaacgaaacccaacgtgacaataaactcgaaaaactgtaaaaatccaatttttaaaggttccaagaagaatgaatagaaatagtgatagatcgagcaagcaaataaagaaggagatgacataaggggtagcaattggtgtaatttttaaaaactatataattaaaaacatgaggatgataagatttggtcttttaaagtcttaacaatgagacatctatttaataaattttaagtaaaatcatacttaaaaaatatatgattgttatgtgctagctacgcaattgcgtgggccacccagctagtttaagaaatttcaacatgattttggagtcaagccataactaccctaggcctacctccgcccctgcccctgtcatggcctcctccatcgtcgatgccggtgaaccgccgtcggtcccattgctggatcagttcaacacaatgaacacaattcagtttagctggctttctattattgagaaaatattcctctctgatttcaatcggtttattgcccattaacctaggtttgcaattatgaaaccggttcgtgactctttgaatgttccaaacccatccatgtcagtttcttttaaacccaagcttccggtgatgcaacttgaattccacaagcaagggtgtcaacttagggtttggcacttgttgcaactctgaaaattcctaatgttcttcctacactgtgcacaaggttagcaaaaggtcttcaatcgtatcattgttcttttataaaccgtagtaacgcacaaacaatttgctagttatatataaattacaagttgacttattataactcatcggcaattttaaatcgtctaaacaaacatataaatgtagacggtaaaaagtacttaaacaatatttataatgtgttataaccatcagattgataataattatcacactttaatttttataaaaacatatatatttttaaataatgtaagctttatttaaacttagttaataacattacatcaagagaataaaatctaactgagtgatccccgacctctgcatataatgcacaaggccaaaaaaatatatgaaagaaacgactagaaatatctcccaagtataaaagtttgatagaaatatatatcttagtggctagattagaccgccacctatgctctggataaaaaaaaactcatgcaccacctggtccaattgtcgtgacagatatttgtagaactatttatatcattttataatatctacatacatcactgaaaaccaaataagtaacataggttcttcgcagtcttcttatatattcacttaaaaagcgtctcggattaaattaaattgacaaatgatttattaattgcgctattttaggctatatatcgtctttcataagtgaccaccaaataacatatataaattgtgctacttcggtttatttcggtcactcccagacttaatagataaaaatatgatttggaaagccatagacttacccgtttaatagaacaccaacttttaaatttaactttaaaaattaggtctgaaatagactaaacataaacatagtttcacatctctaatttatattgtgagagcattttagccagtttcattttttaaggtggaactaaaatcgtttaatcgtttggtttggttttaacttgagtagagatgaagctagagtctaaggtcgtgccaaacggccctttagcagatcgaaaacgtgatttggaaagccaaacaacaaagcaacgtgcaagcataacggattgggtctcttctctcttgacttgtcacatccggcttgcgctggccgtcgcaaggccgccgcatactcttctcccctctttgactcgttttgcgcccaagtcgatccccaacgtctcctcctcgctggttcgcccgccgcgccgcgccgatctccatccgttccacgagcagcggtgaccgggtgctgtcgtcctgctccccgcttcccttccggctccggtgagcacccgtgccgacctcacatcctctctctttccccatccatcccgttctacccacgccttctctcgaattttgcagtaaccttatcttctcttctagatctggaagctaggttttcaccttgtcttcttagtagccttagttttactagtagagtagtagtatcaaccgccgtggcgcacgtatcgttcgcccctggacctgaggattacattccgtgtctatagttcaatccttgaccttaaggagtataaatttcattttggaccactttttattaccggtgttttgctttcgaccaccctttaatcaacgtattcactttggatcagataatcttacctttgttgcattttggactaccctaactctcttctcaagcatatgaacgatttcgagtacgccggctccgattcatcagtgaattcccaccgctttatacctggcaatttatttgacagatgacaagtttgatgtagatagataaaagatttgagtgtgctccaaagtgacacaaaggtaagattttccggttcaaagtgaaaatattagttaaagggtggtccaaagcaaaacaccagtagtaaaaggtggcccaaagtaaaatttactcttatatgaatttcaacattgattctgctctgcagccgatctggttgattgatgagcagcccattgccttttttggcagatttgaggcgctaaagtttccattccgtgttacgaaaagctgcattaggacatggacatggcattgccaatagtgaatgccaccgcagcggtgcttgctcgtgtctcagctgcattcaatgccccttttgcccgcgcagttgtctttggggttcatatcgatggtaagcctcttacgtccacatcaatgaggaacttgtgatgtgataagggcgatcgacattcggtaacattccatttttcagggcacctggttgttgaagggctccttatagcggtcatagtgtttcagctttctaggaagagctacaaaccgcccaagaagccactcagtgaaaaggtaaagttatcttctgcctgttcctcgctgttactttgtgttagagtattggttttggtcattgctttccagaacttgttggtgaaagttagcattttgatctttgcaggagattgacgagctatgtgatgaatgggagccagaacctctgtgtcctccgatcaaggatggggcccgaattgacacaccaatgttggaaaggtttgtatgatggttacattctaattaaagtttaaacggtagttgatgcaccatatgggagttcttttttcttactttaaggaagtttttatgtttgatagtgtctgttctgaaggtagtttcttaaagctccttgcaggaaataattcgttttcagtattcctctatattatttcataagtagtgagttactagataaactatgagagaaagcatgacaggattggggcagttgtaagctcaagcattggttaacttaactaggcagtgcagcatgtgggaaggcaatattgacttgaacctttattcttgacaaatactgcatgcaaaaagatgatttgcatgccacaaatctggtcaaattttagacgaatacagggcatcatgaatcacttgaagtatcatgtatcccttgctttccaaatgcttacaatcttctattctttaggcagactaacttttcttgaagttattatagttgattcgcaatcgccatctgctttctgtaacttgcagtatcttctcaaacatttttcctcttctttttacgacgttaataagaacatcaaatgacttaatacatgctgccaaatgcatcttgctagtattttgttataaaagttgtcctccatctgttataatcttgtatctttatccagttatcaacaatactccatttatgtgcttgcgttgcactaataatggacagcagctttctgaataatacaaatttaggagtaacttccagcatccctaacatagcgtggccaatctcaaataactctcactcgtagaatattcattttgttgcccttccctcagatattgcaatgcatgatatatcatctgtttgatgagtccttgtttatggatgtgtaatgctggaattgagaatgtttatgtttgcagaatacctgcaattcttgggcattgcatgttttttctcctgagttttgggggtcttaacactattacgtttcttgctacagtgctgctgctccacatacaaccattgatgggaaagaagttataaactttgcatcagcaaattatcttggtttgattggcaatgagaagattattgtaagccaaaactctattatttaggagttattttgacacttcttccaggatatttgacatgggtgaattgcaggattcttgtgttggttcactggagaaatatggtgttggttcttgtggtccacgtggcttttatggaacaattggtttgtatactctctttttgccaccactgatctgtgttgcaaatatggaagagaaacttatcttttcattgtggaacacttgcagatgtccaccttgactgtgaggcaaaaatagcgaagtttcttggaactccagactcaattctgtattcatatgggatttctacaatatttagtgtgatacctgccttttgtaagaaaggagacatcatagttgcgtaagttaaccttttgcccacatagtaatatgaacaataccggcacatatagagtttgtcctctctttttttttcagtacaacagcttatataaatgttttagttattcacattttttatatacctgccttttgtaagaaagaaatcaaatgaaaactgcttccttgccccccccctccccccccaaccaaaaaaaaagaatgaaaatcctgcacaaaccctttagaaagtagtgtatatgtctgccttgtgatcttcaaagttgtcacctcttacatgtatctattctttagttgttattcttcctcatgcaattagctccatacctggatagttcttttactaggtagcacttttcttttcttgatttttcatgtttgaacctaagcaagttttctatatgcattgcagtgatgaaggtgtgcactgggcagtgcaaaatggtcttcatctgtcaagaagcactgttgtttattttaaacacaatgatatggcttcacttgcaaacactttggaaaaacttacacgtggaaataaacgagcagaaaagatcagacgatacattgttgtagaatctatctaccaggtgtggtgccttttatgataactctgattggacatgagtatggttttttctcatttttctcatgaatttttacgacctagaaaatcatgaaatcgtttaaacatatgactttggatatatcctctcttactgtgacgattgcagaattctggtcaaattgctcccttggatgagattgtcagattgaaggagaaatatcgattccgtgttattctggaggaaagccattcttttggtgtgcttggccagtctggacgaggccttgctgaacattatggagttccagtgagtacccctgacatttttgttctctcatcgcaccaaagtagaagattaaaaagaataggtataatccatggagtcctggtagacacctgttaatttatgaaaattgtgttactgaccattttaattggatatattggcacatcttatttcttacattttcttgcatgtgcagattgacaaaattgatattatcactgctggaatggggaatgcattagctactgatggtggcttttgtacaggaagtgttagagttgttgatcatcaggtaatgcaactctagattgacggaaaatcaattgcaatagaatgttgttaaatatcttgacctattaagttattgtgcttttgcagcgtctaagcagttctggctatgttttctcggcttctctgccaccttatcttgccagcgctgcggtttctgctgtcagctacctggaggggaacccgtcagttcttgcagacctgaggagcaacatttctttcctgcataaaggttaagaagattatcttgttatttatatacttatttgaccaacatttacttactttttaatgtgattaatgtagatgtaaagtttttaatgctttaatacctagcatgtaatgttgtggcatcacttttatcatgtatttttcccattagtggtagtttcaaaacagctgcattgaaattgtgaaacacattatgggattcaatagttgaatttgttcaggcataatatgtcgttactggtgcctgctgatcaccttgatgccttcgatgttttttatctgcagaactgtcaggtactccaggacttgaaatttccagccatgttctgtcacctatcgttttcctcaaactgaagaaatcgacgggttcatcaaacaccgatatagatcttcttgaaactattgctgagagggtaagtccatgtcgacacaacagaacctttccagctgcaaatgaactttcacttgcatatatttacagcatcctatttccaacaggtattgaaggaagattcagtttttatcgtggcgtcaaagcggtcacctttggataggtgcaaacttcccgtcggaatacgcctcttcatgtcagccggccacaccgattcagacatctccaaagtgtcctcatccttgaagcgggtctcagcatcagttctgtcagattacatctgatcccctttctctacgagctgtgcactaatctctgtgtgcatgtttggttaatgtacataacctgtacatttgtaggttccgatgattcccgttgccgctcatacttgcaaacacttcgaaaaatagacgtagaacagtgaaattaggtgtgttatgtatcgttcggtcttctggtagtggtttcccggtagaattcattctatatctttaattttgtcctctattcatcacttttatcattttggcttcaattcatcactttctggtggatttatattcttttttttagtgtagattggttgcgcaaatggcgaaaagaccccaaattctcaaatcggcacaaatcgtttccaggtttcatcttacccaatcgctccttccttgcaaatccaacctgagcagccatattaaccaaactgaaagcgctgcctatcgaacaccacaggcggagacgatggatttgtgccggacaaccggagcacgtgcaacgcgtccatgttcagcacaaaaaaatataactacttcaagctattaggacaatgttatatccaaatacatagaaaaaatattgctatattttggaatggagatagtacttccattcaaatcatgatatatataaatattaaatttgaaaatgtacaaggattgttctgtcttaaaaaagaccaatactacatgcaatttcaaaacccgcagcattgaactattaacaaaaacaagcgccataacacgtctgatcaacagcggtaacaggttaccatatgcacactcgtttttgagttcaaaatacaccagacatcttaataagttagataaacatctgattaatttttgctagagtagcaacattctcatctcgctttgctcttcttaagaagctttggatgcagcacactctgcgcgataagctttgaatgcagcacgctctgcgtagtaggccggtacaactagatagaatggaataagcagtgagtaataaaacataagtgatccgatgtgcaaggcataagcagaacatacaatataagcatttctaggaagtactccctccattcccaattatcattatattacatgagtgcaacaagaccaagaaaaactacgtttactgaggtaacaaactcatatgagccatcctcactatgttctacccaataacaaacaagacatcacatgtccattacttccatgcacaaataatgaatagacttaaaaaatgaatactagtatgatgatcatttcagaataacctaaaacaattgtacgatgatcaattggaaaaggaggggtatcctaagtttgatcaaatttgtagaaagaatacatcgaccatgtcaaataagtaaactacaaatgatgctcatttgatatcacaaatattatcgtttcttctataaacttggtcaaacaacaaaaaaaatattatactttggatagtagtgtttactagcgcaaaatgtatgctcccacacaaatcacaaaaaaggacatgccctcattgttcggttactcgtaaaaaataaatcacaaaaaaggacatgccctgccccttgtgctcatcaaccaattggagcagcatttctttcctttccaaaatccagaataccccctaccctttcgacaacacggaacccccacacctttttttttaaagaaaacacagacacaagaaagaagaataattgattgataggtagtataaaaggactcacctgcatctatctttgggtattcccgacgatgacggctgggtatgaacatgcatttgcaaatatggtcagaagtgcctactgatagttgatcacagcaaagcaatccaaaagtagagctgtgaaacttacaaggtgaaaagcttcaaggttagagactgaagttcaccagctagaaagttgttgtcgtcatggacaacgtggtagcggaccacgcgggaggttgactacagtcaaccaatactagctcaatatatttttttcaaggatagacaactccttatgagtatatttgcagattcaccaaactaaaatgtaccttatgagtagtatggcggcaaaagaacttatacttagcggtgtcagcctcagttcctatgaaacaatacccagtcaccaaagccaagtagcatgtatgtgtattcacctcactcggtaaaaaggaaatactacaagcagaatcagcaaacacactaaccaattgatgcagtaggcaccacgaccacatatgtcagtgatggttgatcttctttgtaggaataggcacaagcctttcaagggaagaagcacaaaaccatcaaaatgagcaagtcaaaccaagatacaggaaggcaaatcatattgtattcctacctgtttaatagcatctatttcttgcaggcaaatgcgctccatctcaccttccattaatccacctctgtgcaagatgttgcactgttagcatatatctaatagtatcacactaatcaaggaatacaagtattactacctgtagaagattatcctcttgggtctttcttttatcattttgtagaaggaccgaaagaacttgctggaaaaaaaatgaaaaatgttagtacaccaaatggatcaaagtgacggtgagctacagattatgtagaacacagaattacgtcatcatgccaccacgtctagaatggagatttatgatgccattatgaggttgatgtgaaattaatgtatgatactttctgaattttggccagtccaatgaagccgccacctacatgactccaacaaaaaatatgatgccaattggattgtgtaacaacaaaacgcaaatccaggagatggtagttacagaagagacatacagatgcaatgccctctgaatccactcctgcctctgaatcctctccaagatcatagtgtatcgtgtgagcaccaaaaaatcgttgggacttctgacacaaggggtaagtgcagtcgctgacgacgtacataactctttacaacctgattaataaaccaaaaacatgataacactataacaaacaaaatgagaccaaagagaaatgaccttcaattgtatttggcgtgcaactctcttcagattccgtttgcttaggcagggtaaacagaaaacataaacaattctaaggctctcacacatctcttcaatttcccctgcaatatatcatatgcaactgtcaaaaaagaaaatcaacagtgaacctgacacaactaacttccataccatcataacttctatcatctgccataatcacaattagaatgtctatctttttgggcacatccagcaaagtacgtcgtatatgaagggaagtaaggggtacatcgacatccatttttggtaatgtaccaaattcctatcatacaaagatattaagtcagatgtgtggtacatgattagtagaatgccttgttcaaggaaagtatgcagggctttaccattcccatgtctatacactttcctataatgtcactgacaacccgcgctgcatgtttacgcttaggtgaaaaatttacacatgcccaacgtctcacaattccacgttcgacctaaaagggaacaaatgcctgtttgagaatgattctataaagatattatgaatcatgacgagagataaagagagttgcatagcagtgaaaataccaaaaaccccaaacgttaaaactataccaagaatccatcagccaagtatgttcttaggttgccccaatcatgtttgtcaactgttcaaggtaaatattatattcagactatcagatccctggttttgaacacaactttccgattatgtggttctcatattgttttgtgttggaagacttgcaaactcgcatcaagcacgcaacattaactatcatacaagagttgtaacacacaagctggtatagtgcacatctcatccgaggactatatgatgcataatttgatttgagtatgcatgacattttgtttgatgatacttagaacatcatcagcaaaatatttgtcctcgcggcattatttgaacattgaagaaagaaggtgaatcgacaaaccaaatatatacaattccgaaacagaagaacacactgattcaaccacaatatcatggcatcaatcaagtaaagtagcaaatttacaacagttgctaggctgaggtggtgatcaaaaaagattttccaaacttcagttgtcaatgtccttttcaatattcagattgatagcatgaaaatggtatgcacatatctctatagtaaaaattgttatcgaaaggtccattaggtctaatagatctacaagaacagaaatcttttgacagtgttaatttctaaaacaaccttatgagtgaaggaagtactaaataactagcaatacctgcagctcatcatagtcatgactgatgtgattttcccatcgcctcacttcaggagtgttacattctgcagcaaccaagtccttatcctccacaggcatgttgctgagtttgtagtagccattggtgtcaaacaccttagagtactcatcccaagacacgccgctaggcttcttgtatggatgttgtgtttcccatcctgtcttgagaatgtgctcgcgttcccctggagacagaggaagaagcaagaaagcataaacaagaaaggacaatcaacgcaaaataaaaagggcacaacgaatgccacacgaaattattaagaaaggtgaatggactagactgggagatacaaaagagttaagaacaagctgctggcctagggtagattgattaactttggactagaccagaaactgagttttaccagggcacaggaaggcttcaaatgaaggcggttcacttaactcagaataagtacttcctgctaacgctgtatgagtctctatttccttgtaggttttgaggcagccttctgcgctattggcggcctgttcatgtccattctcttccagccgctggagctgtttacataattcatcattctctctcatctgctgcacggaaccatcatcatccatctcttcatcaggagatactggtacatattcatcatcatcaccataatcatcatcatcatccatctcttcatctgatgtagggaatgcttccaagtaaatgatgtctgagtcagcatctcccatatcttccaaatcacttagatctgactcactatcttctctcatctcatcagaaccatagactttctcagagtcgccatttaccctcttctcctcacaagaacaaaaaagtgttttgccctcagcaacatgattaagaaactctagcatgagagttgtgcaaaaggaaaaaagaacaataacacatcaaacagaatgagagagaaaccttggaacgaatattgtgagcaacattgttcaggtatagcttgctgggtgtcctagcatgctcaggcaaacaacattgatataagaatccaaggttcttacagatatctttgactttcgctgcaaaacatcgcatgcaactgtcaacaaaaaaaaaagaatataaaggtgcggttgatgcaaatcataacttccataccatcagaacgtctgaattctggaagaattacaattagaaggtttatctggtttacttccactccttgtccgccaaacagttcttgcacatcatgcaaagtactttctagtttattgggagagttcaagtctacgaacactgcatgaacagacttcaaatcctattatgtaaagtcaatgtcagatgtgtcacatgttgccaaagtaatggtgcccaggaaagagtggacggatttaccatcccaatggccacacacgcttttttgagctcagatgcaaatttctgtgtttctgtagtacccattaaagaaaaatttacacatgcccagttttccacgtttgctcctttgacctaacatggaaaaaaaatataaatgtgagaatgctctctaatatatatgtagtacagaaggtaaggagagtcgcataacagtacgagtcgtcacaaagaagatgacatgctaagtgttcaagcagaagtgacaagagaacatcttatgtggtcaaggtcttatttgaaatcattcataagctaatggagcttgcatgatggtatactagattataactttgaagttccaacggcaaatctattttcatagcaagtccgacacccgcatgcactgcaagtaccaagttcatgtacaagaattaagcgtcactaaatggaatcagaccactattttgtatacaggacacatcctgaaacagtagtagtagcattcaaaagtagtgttttattttggtcggccagcaagatgacttgcctcggatttgttcttcttggctacatgagcaccatacgctgcagaacactcatcatacaggagggcagcagcatcaggaggaggatcttgatctacaactctggaacactcattatccagtagggcagcatcagtaggatccggatcctgatcttgatctacaagcgaggcagcgaaggctttgtcctccccaggatcttccgtactgaaattgcatcggccattgttgccgtctttctcatccatggcctgtgctcctaatcctgcctccagatagcctgatcatgagagagtaggagacgtttatccatctataatctatcttgctcaaacgaacgcaaaacgaaaaacagcatgaatatatcacgaggatgcaacgaaatccgaattagttagagctaatgataatgataaatcgattaataagaaatacgagatcagaggcatggaggaattaaacctagttaatttaccagggaccaggaggagtgctccgggaggcgacagcaggctgtagggctgcgtgcggcgcgtatccaaccgatgctcctgaagggttttcgacttgtgttgatgtatggaatggaatcgactgcaacggaatatggtaaggagtattagcccacatactctaaaaaaggtaatagcccaaacggcgacaagtttttgggccaaaaagttcatgtttggcccaaactttgattacctcatgggctcaaattcagcttaaaccaagtcaggccgatccacttggaattttgagctggtgttaattaaaccattaattcctctttgcagaacaactgcgcctcacctaagcccaagaaaataagaacggcatctgctgctcggatgactgttggctgcttcgatacaggagtactttttttatctgcacaagttagaagtagaactgtcagatattgcaagacttgaaatttgaagccatgttctgtcacttatcgttttctttccttaagctgaacaaatcgacgggttcaccgagcagcgacctagatttttcttgaaactattgctgagacaacagaaattttccagctgcaaatgaattttcattcgcacatttccttttaccaacagttcttgaaggaagattttcttgggaatacagtttttttttcacctgtaaaatattttcacttttattcttgggaacaccgaggattcatacagtcaaaaattttcaggccgtttgggtatttggtaagggtaagacatctatctggctagtcattgcaacaaaaacgaactctgaaacagaacgaacatggcgaaggggaaaaagatgaatagacccaaatctgaatcacaaagccatatcgatacggagcctaggcaagccgaatctctcgcagggtgttgaagcaatgagccaatgatgtgggctgaatgtacagagaaaggagaagctgggacgagagataaagggtcggaggcagagtatggaccggtgagtatgaggcgacggcgcagatcgttctcgccctagattccctctccgcttgtatcagctcttccttcccttatggatagcgaaggtgggtagacaacggacccggcgtgaaccgacgctggtgcagcagatggtggtgaggatcgaggccggtttgcataagtggcgcagagtagtagagatggttgcggaacggatcgcggcggcgccggcgatggggcggcgcaaacgtggcgactcagcggcaacaacgaaacgaagcggagagtggtgtgcggtggcggcggggcagagcacggagcgtcacggagtagcgggctcgacggcagtcgaggctgcgaggttcgatatcggacggataaaaatttgtgccccatctgcggttaatttacatgctaaaacggctgtaaagttttggaataagttcaccggccatccctcaactttacgtcaagtctgtataaggtcccctaactgcaataccagaaatgtatacttctaaactatgtaaaatcgtaaaaaaaaaaggtcccgggacagtatagatgcctggtttcgttgacgtgacatcctagtcaggaaaataataaaattgatatgtggggcccacatgtaagtgagagaaaatggtgtgggccccacatttcacttttctttttttttctcttctcttctgtcgttgattctctcaagtagtcgagcgggcgtgatggcagatgggggaga

SEQ ID NO: 8211 - DNA, 13163 bp, Oryza sativa
agcaactaaatgtctttaaatgctgtttactgcaaccctaaccctttatattataattcccttgtactcccttgcatttattctgcatttgtgggtgtgtcttgttgagtacggtggttgtactcagtcttgcttaattttcccaagcccagatgaggagttcctggaagatgaaggctttggtgtctagctcgtgcctgccgtcaagcgcctgtggtcgtcgccctagtcttccgctgtctttcgttgtctttgagtgtgctgggccttcgttgcccgtgtaataattttatatacgcttccgcttgttaaactctgtattgtatcaacttttggtgtaccttgcctcctgggacaaggaataatacacgcacgtcgggaacgcctgttgggtgatttccggtcgtgacaattgattgggcttacatgaggaagaagaacaatgaagtgttcaaccaagtgatgcaagtgtgccacaacaagaatcttggagatattcttgccttggagtatgattggaatgaggaggtcattgcacagttctatgcgacagcattctttggtactacaaggaagggaaccccttatgtgaagtggttgactgagggtgttaggcacaagatttccatggcacagtttgctaagatgttggggttagatgatgaggatctcattaggcccaacattcatagtgaagcacccctccccatgatcaagaccaagttcatgtatgcaaaggatgctcctaggacttgcatgggatctactcatggattgcatcccaactacaaggtgttgtactccatctttcgttggtctttccttccaaaggttggagatgctactgctttgccatccaagcatgctcatcttctcagttgcatgcgctacaatcagcctcccttcagtgtgatgaaattgatttggtatgagatcgccaacaccattcttgagcctaagcggggttgcatctatgctcctttcattataaagatgattgagacagtcaccggggtattctacatcaaagatgggcaccataattcttttcgccctcgtgctccacctttctcttctccagtggtccctcgatctgttccttctacttcagctggtccttctactagtgccccaccaagttcctcgagttcttctcccatcaagaaggcacttcaggcaatttttctgtatgtgtgctaagactgccaagaaagtgaaaaagatagaaaggcgtcagaaggaagatagaagagaggctgggaaagaagtgttagatgattctgaggatgaggtctatgttgatccatttgaagcttatgaggcagccagcaacgttgccgttgaaggtccatccaccttcttcaatgaagaatcttcccattctgttgatgatgatgatgatgatgatgatggtgatgagggtgacaccgaggcagctgctgaggatgctcccactgatgttgatgagggtgacaccgctgctcagtccgatgagtctcatctctccggcgatacagagattgttccctctgatggagatgagtgatcatcttcttctcttcatagtttctcgcctttttggtgccttgatgccaaagggggagaaattgtgaattgaagggggtcatttaaatccttatcctttttgctgccttgactgttgtctggtcatttgaccggaagttccgggtcctatgatctggaggttccggccaggcagatttcctctctattatctctctctatatggacatgtaatcgtattctattttggttggatgtaatgtctgttagatgctttattatcctttatgtcagtaagttagaccatatggatgttgcattttgatgtgatgttgtgttcttttcatcttttttgagtgattgccatgtcatctagtctttctttttgcatcactcatcattcaagcactttcatctacatctcttatttgatgagggcagtgtgaagtttcttttgagctttccttcatcttatgcataatgttttcatttcaagttctttatatgcatatctttagggggagcttcacacttctctcatcattcaaaatttaaattctattatctttttgtgtgctttaaccatgttgtcatcaatcaccaaaaagggggagattgaagatgcacttaaaccccctagtgggttttggtgattaatgacaaggtggttaaagaggactaacatgtttatcaagtttattcataggagtttagtcccaaagcgagttgtgatggctaagaatgcaaggagaccccccaatttgaatgttcctaagtgcaaaaaacaccgaaggtgattagactaggtttttcactttcgaaattgagtttagaaaaaaaaccgtactattaagaggggtttcaagtgtggttctagggtatacaaagtgagtcaaaatatttttggaatcatttttgaaaaatgattttctcctcgggacagagagggctacccggaggttctggccggaacttccgggtgccgtttatttgcaaaaagtttcctaagtactgcccggaagttcctggcacttttgcccggaacctcctggcaggtttccagttcaaacttgtgagtaacggctagatgacgtcacctagtcgttatatatatggatttcgtccctaggtcaccctttggccattccacttctgttcattcttgttctagggttttctagccactcccaagcttcctttacttcctccactcaaatctagagcctatcttgtgagattgagagattagatgagagagtaggagtgttttggggatggctttaagattaggtttgattgagcactttggataccttgtgggttgtcacttgggcttattactcttggagatcttctcctagacggttaggtgtcgcccgtgagcttctaaagatcttgtggatgtcccgggaaagtttgtgaaagttttcctcacctccgcaaggaaacaaggtaagtgagtaaagattcttgtgctgagttttcagaggttgtcctaggtagagcaacttgcacttgtggtcttttctagaagaaattttgagttggatcttggtggtcactcaattctagaaaatgacctagaagtgttgagttgaaggctgtggacctcttctgggatctttgcataagtgaggcaaggggttaattgagacccggctctttggagcacctcaacggagagtaggattcatgtgatccgaacttcgggaaaaaatcgtctttgtctctcttgtgcatgatctttgtgtgaatctgctgatattctgcaatcttcatcttgttcctctgtgtgcctaaacttctcttgctaggacctgtttttcatctctgttttaatttatctctgctgcccggaaattcctggctcaagaactccggaagttccgggctactcatcctgcccggaagttccggtgttcatcaccaggaggttccgggccctgtcaatttaaccgctgcgattgttgagaaaatttcaggaaaacctattcacccccccccccccgccctttttaggctacatctctgatcgttcagacttaaacccgggtgcttgcatttacgtccaattattttttcagtggtaagcagccgatagtgaggcgtttgtgaactctatcaatttgaagatatgcacctgtgtttttgttgtgtttctgaaagaaaaatcactgaagcaagtcgtatatgtcaatcccaaagtcagtactaaaatttagttgcttctgtacaactggaagatatgatgaacccatgaaagacgttgaaggcagcaggtaattgttgcgatagcgctttttggtttaactattctctacatacatccaatggcgcaaaccaggtaagtcaatgtttcgtggtgaaaaacacgattacctgagaaacttacagatcatgtttacctagagctatggatgtttgtagaatcaacgatttatgtaaacaccaccaccaacctctttttctcacatgatgatgcgtctcagactgagcaacatctggtaatgttacaacttaaaatatacatcatccccaatccccatcttccaaagcaggagtgaaatagcttatgtaacgtccatcatatgtgcattgctcacatttgagaccaaacagtgcaaagttccgtagcctgataatgatgccatgttaaaattctcacttctcatgtggagtttctcttcggagctggagctggaggccctggcgggcgagccaaatctaagttctgcatctcacttgcaagaatcgcccttctttctttcaagaaattgagtcgatttgtcagcttggctaatgcagatggtgccccggaatcctgaaatataatagcaaagcacatacttttagcataaacttcaatccacccaagtggcactaacaaccacatttctatagaaggacgcgaaaaaggaggttcatgttggccaaagaaacataccatctggccgactagctagaactgatatcagttaaggagtcagtgagatttacctctgttctagatccaagcctgcctaatagtggattatttgagtattgtttctgtgcaaggttccactttgatgccaatggatcttggccatccttgacaatctcacccttagaaatcaacattctttgagcctgaaatgtgatatgaaaataacttaagctgtgttcaggagtattagttggcaacttcttcccctcgcacgcaaaacgaagcgactcattaacgtatgtttaattaagtattagctaaataaacttgaaaaaaatatcgatatgatttttttaaagcaactttctaatgtagaacattttataaaaaaaaatacaccatctagcagtttgggaagcgtgtgcacagaaaacgatggagtagaagttgggaagaggatgtatagaacacacccttaatgatagaattgagaccattaataacttaaaacacacccagaactgattgcatgctcattgttaacttcgttgagctggatctttgctacgtaatctcgttttattcccttggttgtctacagaaatgaaatatgagagattgtgatgtaacaaagatatttagtttttttcctgcacatttgctactgggcacctcagacactttaggtctttatgcatattcaggcagacataactaatgtgactatcttggttacacagtttcaaaaacatctgttatgatttccatttccaaatgttgggattatcatagagcactcagagacatgcacatgcaatagtaatcccagactaaagagtgtttggctctcatagtcttaccatgtgtgtagccgataccatgtcagatatagaattgggcccaacatttgatgatgtggtactctgttcacctctggagaaagatagtccacaagtaccctttcacattactcaacgttctaattgaacaacaaaaaagaaaacgacatacagtgctaaaatatcacagaatgctctggacagaaatccttactcggttagcttgtctgtatttagcagtcgtttgttgcatgagtcacataatgaggcggagctcatctggacctggttgttgagttgtccacggagatcagaacccttttgtttcaagttcaaaatatcagcttcagcagtagcaacttcctcaagatcagccttagtcttttattagcagaacaatttttttttcaaatggtgaaaaaacacttgcactttaactcaataataaaattttaaaaagaaaaccttgttgtcaattgttgatgggaaggacgcctgccctcttcgcaaattcatcagccctgactccaatgagaccctcaaatttctctccttctgtagctgatctcgcaaattttccacctgttgagtgcagaaacagcaaaaacattttcttgtttaacagtgaacagagaatgcatgtttcaggcagatattgaagatgtataaaatttctggtgtgcttgacatagatttaaggatttcttatggatgtagagactaaatcataaaatctacctgggcgttctctttctagaaaaaaatataatacttttcccatagtttgagctcttacttctttttcgagtgctaatcggcgtttatgcaattctactttccttctttcgagacttgcttgtaggattgaattttctttcgcctgaaatagacagcacatcacctcatgtgtaagtatttaatgctacagaatctctcattgattccagggaaaagtctgtacctccttagtaattttagattggagatctgtcttgctgttctcaagcttctcaataagagtcctagttgaaaatttcgaattaaaagaaatatctcaaaatttaacaacagtgtaaaagctgtttgatatcttctcttaaagtttccaactgttcttgatttgatatttttaaatatgttaaccaaagataagagacaaactctaaacagtacaatacagaagcaactggaaaattcaccaatcatgcaatggaagaaccaaaaaattccaggaatgattatggaagtgtgcttttattttaacttcacaagcacttctatccactactaatcctaatgggagtggaagggaagttcaagaaaatgttggggcaggagaaaatgggaaaaaccttctatagcttttgataccatattagcataacagaagatatatatatttaattgttgcaatgaagacaagcgggatgacaagtaaaagctaaaagagtaagcaatatcacttatttgcattattaccctaacaaaactcaatttcccattgttggtccaccatcaaaggagtagttagttattgagacaaaaaggagagcaaagagataaggtagaatcacaaagggaaaaataattcagtgcttctaaaggatatgtctggaactcttccaacagcacaatacaataatatatagctggatacttactcgtcatcactgcaatagtcaatctcctctgctgacaggtcttttcttgcctgtaaagaatgtatttacccaaaattatgagattgccctagtctcactaatgtgtaagagtatgcaaataacaattgcacgcactgaagtacggccccataaggtctttttgctcttatttcttgagctgcttgatttctccataaattttgctcttgctgatgatgagcgaacatttaacttttctatttggtctgtggatccatttgattcgtataattcttgttttcgattggatggatcattgctttcaatttggcaggtgtcttcccttaccgcaccatgtcctgttcttgctgctttcttaggaggttgtaaaccctgatcgttgccattagatgctgtgccagagttattgcttttaacctacagagtgtggatcaaggcattgtaagggtggcgtagaaattgcatttgcattaagtcagagacacaaagatgtaattctgggtaatcagtatacttaaccacgtcagttacttattcaaggtttctacaaagttgtggagatgtagtcgatggtcgtgttcattttcacatctcacatcattgagctactgtgaacagatcgttcttttcatgtcagaacaaagttacaagcatccctatgaaagatttgcacttcaattctaagttagcttgaaatactgattcaactttgggcatatagcttgaaatactgattcaactttgggcatactttttcagaggtaacctaagaattgctcatatcggtgatctaaaagcataaaaaactgtagcagacagtggggtagcagctactgcagttctttgtacaattgcagcagcataacagtctcgtgctggctttcagtatattctagtttgcatacatttcaggttcaccattagcatggtcaaacatttaagcctattattggtttaaaattataaactaacatgttctactatcaatgttatattacgttatcaaaagtggaaaaatgatcaaactcgtaaaaacttctatttaggagtggagatagtatataagaagttaatccaagtatgctaaccatttagaaggacaattacaacacaaattcagcagttaaccactgaaatcaacaaaaaaacgcatcggcggatcataaaaggcaacacaagggaagctccctcgttactggacctttagacacaacacatctgtaatgcttgaaatcaaaacgatgactagttttttgccagaatgaccgaaggaggtcattcaatgtaattaagattggaaaaacgatgactagttgaagtaccttgtcatcagagacactggtcttaatgttgttgtcacattcactgccaccagatgagtgctcagtatcatcatccatgtcttcttcaatgttatcttcaccagaatcataagagtcatcctcttcagggccatcgttgtctgtggaatattccttgtcaaaatcaccgtcttcggactcagtatatgcatctgaagagtaggaaccgtcttccaagtcctatacaggtaactgctaaattagaatccatcaagagtcaatgcagtataacttcaaatggaacttgactgtgtagaaaggaacatgtaaaggaaaaagaggatacatcaaatatctgatcgtattcttcgagcataatgatgacgattgcttgagcatggttggcagcagctgcagcttgaagcagctggaatgaaccatccccagccatactaaagtcgctatcaatttcacattcaccgagaagaagaggtcggagaaggagtggtgccatgcaagccgccaaagcagattgagacatcctattcacagctttgtgtgattcaacaatctgcatcatcttaagagtcctaaaagaaaactagtgagttttggaatccataggtggaacatgaagctactccatccgtttcacattataagtcgtttgttttttttcttagtcaaagttttttaggtttgactaagtttatagaaaaaactagcaacatctacaacactaaattagtttcattaaatttaacattaaatatattttaataatatgtttcttttatattgaaaataatactacatttttctacaaacttggtcaaacttaatgaagtttgactaagaaaaaaaatcaaacgacttataatatgaaacggagggagtattattgtactacagtctaatctaaagctaactcatacattcataataaaatgattgagaactacaaaaaatgagaactggttcttcacaaatgaaaacctcagacatacacaaagtgtgtaatttcaaaaaaaaaaaaaaaacatccaaggtagatacctctgcaaaagttgtcggtttggttctgggaaaacttcataaattactctattcatagcatcaagccttcttgtcttgtcagttcctgtacaatcacacgtctatatcagtttgtaatcctaggaacatcagcatgttttcaggttaagggcatgcgctgagctgactttagaagatttacttatgcatcagttaaatgcaagactacattgattgattgttgaagtaatatataaagtaatgtggatggtgtttttagccggagttgtggcttagagtgcctgtttttgctgtaaagtaatgtgcatcgttgtaacaatagcggttgtacagctcttagcctccatggcagctgtatctgttgtactagtttgaacctcttctcaatcttaataaacttcggccgcgtatcttacgccggcccggcgaaaaaagaagtaatatataaagaaaaattgaagtcaatcttacggtaagctccaaccagtgcagtgcaacatggtgcaggaactggagatgaaggcatctctcgaagaacatactgtagcaaagaagaactgaagatatgttactgaagaatgtggtaactctatgttgtcactatgtagtcaacgtttggcaaaaaaagattaccttgatgcagtcaccaataacatgtgcatcctcttctggggagaactcatttttccctataagatcacattagtgatttaaatggtattatttatcatgtgaacaggacataggaaattcaaggatctgttatctatgcttaacggcttacaagtgacataaatatcctcaggagtcatgaataaacattttattatttgattagagtacagctcttgttagagagagagagagagagagagggagagagagagagaatcacccttttcatagtcccgaactcttcgtttgacttcttcaacatcagcagactgacgtaggattccttccaccttgacacctacaaacagagtatgtttctgctcgtcactaaactacagattaataaatatacatacaatgagttattgttttttagataaatatcatacttctatttgactgttactgatattcaccaggatagcatgaaattaaaatttgaaaaaaaaaacactcaccataatcttcaatgaactttaaggccttctccaggaaagctggactaccatcagcatctacaagggcaaactctgcaggtctgccaatgatagatttattgtccgctgcaatggaaacgataggatttgcctgttcaagtagaatgtagggtcccaaccccctagctgaatctagtactttagatcgtgggcaactgatgaaagttatcttaacttacactgttcagctggagcttcagcaggctctgctatgtcagtgctgaaaattggattttggccaacagtatttgctacaacaggtgcctgtgccagagcattctctagtgcacttctccattcattgagttcttctgtagtttctgcctgctcaatgaaaatcattccattacagtacgataggcaggtgtgtcaaacatgaatggaacaactccttgtaattgcatgatctaatctcaaccaaacagttggtctgccggagatgatcatcccctctctcttccctcgtctttattgctgcattaatcgctgccacccaatggtagcagtacatactgcagatgaacgccaacagtatattaaaaatgaaacaggtgtgcgaccaaccttgagagtgaaagttcgcccatcgcggccatcaggaaataacactgttaaaagtttcttgtcttctttgaccacaacactgaaatcatagctcaagaatatgtttatcagattacaggaactatagcctttaaacaaacattaatttctcaatgcataccttccggagttattcaagtcaattccacctagtgtaacaatcggttcatttcctctgggaggtgcattctgaaattaaagcagaaatttgggatgagttatcatggttataaataccttaatctttttcattttgaatattatcaaatcaagtaaccaaccctcatgatatttcaataacaatctgaaacgtacattattatgaacgaaaaataatatgcttaagtagttcttttaatcatgtgattcaagtctatccgcttcgacatggctacactgacagccagtagtagcctcagtgtttgttttttcactttcatatacaactaatagtatgtgaaaaaaataagcattccgcttcacattcaggtccgcgtatttcttttttctttttccataaactgtgtaggcataggtgcttaaattatgaccaagccagaatgctattgctggggtgtatgaatgctgatcaggtacggatattttctaaaaaaaaatcctcattcaaaggttcgggtttcctatttctgaatattctacaattataattcgatttctatatttagtgctcaaagaccaaaatgattactgtgtttgtcaggtgttaaaataattttatgatgaccagaaatagcgtatatctatatcaagaggccccaaatacagaacctatcaagaccttgtcagattctacctccagtgataataatgcaatgagtaaatatgtaaaacaacaaaaagactaagagaaagacaggtcaaagccatagagaagacttttttatcccagcagtcagctagcagtttagcattgctaaaactttattaatttacaatgtaaaagtatgaaaccatagagcattctttgttacaattaaaattatcttagcttgaatagcaaaataagtcatccgcatcagctttgtgagtgaacaactgatgcaaaggaacataacaaagtagatatgctataatacagtattacgtcaaaaaaggaaaagcacacaaagaactactgttataatacagtattacgccaaaaaaggcacagcacacaaagaatcactgtgatatatcttacaggatcacttctgaagaacaccaatgatgcccttgtaagaataaaccagcgctttttccatgttgtccaaccaattcctgttacttatcacttttagttgaatatgaagaatactgtagattcaagtattacaaacttttaagaacttttttgtttttttaaaaaagaatcattaggtaaccaagcttctaaatttgccacatgcaaaagatggaactaatcattctcatacacctatgcaaactacaagcagaagttcacaacaaaataagtccaaaatacttttgttggcttgactctgttctatgtggggcttagtatggttaagtgattcttaagcaaatagaaatttggcatttcaaggtattgattgtgttatactatgctgaaacttttcaaggatctgatttttagagaggcgttccctataagttctgcgggtaaataataaacacatggtatattgatgtactttttgtgctcgatacaacatacaaggcagactaaaatgagtcatggttatcaattttataatatacaattcaccatattaataacttaatttattaacttattatggatcagttttgtaatttattatgctacctaaacatccatgacaaatggcaaaactgtcattattcatcaagacattgtcataattgtgtgacttcaggataacatgtattattggttcttgtgtacttgaagtgcatggggacgttatatttgttctatttagcccacttcatggacaatattcatatccatagatatattactgcaatatttctaccacaaacatatgttttcgatgtaaggatgtactccctccgtcccacaatataagggattttgagtttttgcttgcaacgtttga

SEQ ID NO: 8212 - DNA, 31954 bp, Oryza sativa
  unsure (1)..(31954): unsure at all n locations
aaaacaaagagtaaggattgaaaagggaattgctatacacacccttcctgcagcctccagcttccctccgccaatccaccatcgccgttggattcgtaatcgtcggacacctcgaatcgccgcaaaaataaaggcgagcacccaaccgcaccgcaacctcctttcgatcggctctcccctctcttctccttccccccttcccctcctgcaagtaaaacaagcgagagactccccccctcaatggcgtcccggatcgcgaggctgctacagcaccagaaccgccgcctcctctccaccgccgcggaggcctcctcccgccgtccgccgcgcgctcccctcagcggcgccatccccaaggtaaccccgcggcaaccggggaggttgtaaccctaaacccgcttaaacccctgcgcgcctccgaggtgttcggcggaatgccgacaccggctcgcatgcctctgtcgctgtttcattgatagcttcgtgtttaagtgagctttccggtaatgtgatgccctagttaggtccctgagccggacctaacgcatgccaggcgcaggtttcactgaagtattaattgttgcttagggcaatgggttatgcggtgagctcatctggagtcttatcgccattgtagcatgtggttcctgttgaatctatatacttagagcctaaagcaatgcttgatttgttactctaatagtggtaatgaatagtgcctttttatttttctatatagacacaccattatctccgacctttttattttctatatagatacaccattatcctgaccttgtttcaacttttaactgttcctaatccgagactgaatagatccttaagaagattgttgaatctgttcattgtgtgataaactaatagttttttttgtgtgttttctgctctaggtgacatatatgtctttttttacctttcgtcttttttttttcagcatgaagttgcaaaggctgaaggtctaagctcatcttcaatcctgaagctctctactttgttcatcaagtgtctatttatgcaagtttcaaattttcttatatggttgcatccatgtttctaaagatgttctgggtattattgcatctaagaaatgaccgctgtttcttgtgctgagtggcacaacatctcctacactacatgttataaatgttgttacttactttgctttaatttaactgcaaataagcatagaagctaaattgatagtgcaaataagaataacatgttagatgtatctgaatgctcactaaactcacagtgtggtggcaaatgtactcgcatccctataaatttcatctgctacctcaattttggttccttcctgatcatacttttagggacaatctacatataattattttatctgcctacctgctgcttgtcacaattttttattcaaattcttgcaatattttttcagctacatcaaaagaattgctagttgctgacatataatatgctttctttatgaaacatatattatctgctgatcaaagattttattttttgtttttttaatgttttaagcatagtatgacagagagttgcatattctaatttcaaatattgtacgtactctttcatatactggtttagagagcattactgaatgcactgcccttgtaatactaagtcaagcatactcttcatacatcaaacctactagactgaaatgatttaagttgttgcaaaatgatagtatgctatttactcaaaaatgaaagacattagtgaatcttgtgttgttggcttctctaacgaaattgtgctgaatactcaataggcattaaacctcagatcaatactcaatagacattcaatgaagttcatatttacagaaaattgtttctcatctgtatggtctcatcaagtcatcataactttattaattttcagacatttaatagtctcacgttcatgttcttttttgttggatcttgaccaacaatgctttgcaagttgcaacatcttatctatatttatttagtgctgagtgaattttcttttgggaaactttgcagcctcatctttaaaaaaatcaaggtggtacatgatcaagtcaaacccttcaagtcctctcacaacacagcgtgaaagccacaaagtatctactcatttagttaggccttctgcatcctactccacacaagcttcagagcagaacccaaaagaggtaagcaacagcttgtctgttttgctatttaaattgttcaatattttgttcctgcttttttttatcctctgtgagtacaattttcatcaatgttgttggccatgttactgcggattatcaagtacaatacatgacactattaagcatgccacctcagtgagcatttgtatgcatacatgtgtaatcttgagtaggcttcttttcatgtcatacaatcaaaactgtcaggaatcttgcctcagggaactgctggatcaattgttgactaatgtatgggcatcatctcagtaatgtggtggtgaataatcttgttagaaaaaaaagttaagagttattcaattgctatgagataggggtgattccgtatatgtcggaaatataatgttttttcgttatatcaacatagttaactgctaggtgctctggtgttcataatctcagtctacccaaatatgctccgtaattttacttaagccagaagagtagactatagtactacctcatacaaaaagggaattccaaagaagatgaccacaaagcctaggtgtcacctaagaaactcagtagcacctagtcaccctgagcggcccatgctcagcaatctaagctgggaggctgcataattagccaaaggcagtccaagtcagagcaaggcatggcagtctgggtaggcttcttgttaggctgggcaaccaactggatggcaagacgttcactgctcctctcacctccaccctcctggcattggctactgaatgtggtcctcaatctttgctggctggagttataagagagaggaagggcagctcccaggcagagaggaagggaatagaggtagaagagacaggtttgctctatgccccatacctccttactggcagggcagtcttgtctatggtcttaggttttcagttggcaacgtattgctggagaataattaaatcataattcccatcaacaaactaatcacctgacacatatttgtcgccttgtaatctcaacatatacattgctccgaactgtaatttttatcagacattcccccctgatttgttgttttctatttcttattttattgcttataaaagactgatgtcttcatcctcagggtacaaaagacctgaaaactgttgaagatccatttgattcccctacctacaacatacctgagaagccagtgacatttgctgaaggggcttcctacagtcttgtaatagttgcgggacttggaattgcagcagtggctggatatgctgttttcaaagaacttatatttgaaccaaaagagtaagttttctgcattaattgttaattcttttgacttaggcacttagctcaacaacaagtactacaatctttagtcccaggaagctgggtggactagaggtgaaacccaagtatagccaggagaaccaaaatgttggatctctaacttccacatattcctaatactactaggaatgataccggtgaaagaattatgtaaattcttatgtagttctggcacttggatgttggatcgccaacttcctcgtactcctatccaaacccaaatctttggatgcactccatgccttcagtggtctttttaccactttcttccatttcagtttttatccaacccctgcctctcctatttttcacatggcttaagattccacgatgaaccagttcctcaggaagcctccattttgaatgaaatcaaaggtactttaataatatagttgctcgcataattgtatggcttatgacagtaaaatacattcaagtctaaccagttatgataatttggtaagtcctacaaatatgcactgtgcaatggtctttcttcacattgtagcgttaatattttgtataatatggaaatagttcctttttatttattttttaaaaaactaatatcacacacacatttattaatccagatgtttctaggtttgtttatgaccctcacatgtagccacttacggtgccaaactttaaagaaacaatcagtaagctatggattttttttcttgtatgctgcagcagagtgccatggcacatttctgatttgatcctatgcaagtcacttagcaagttggcatgggtgttcttgttacttcctagtgaaagttctttttgtgcttcgaatctttttcttatgttaaatgcatatattattatatgcaatttgaaagagcttgcactgctgttaccattctacaggtacaagatttttggaaaagcgctagcaagagtacagaatgacagtcaggtttgtggacattagtgctattccacttccttcatacatatcatattttccccttggtacaacttcatgttttcacacgttttgtcaggttacagcaaaaattgggtatcctgttactggatatggcaatgaaagtagaaatcgtgcagctcggcagcgcattcctaacaaggtttggacagatgaggacggtgttgaacatgtggaggtagcatatattcttgcctctgttgttctgtctcttttaagtatgttgatttatttgccactcaagtttagtgtggactgtaacgccccgattttcgttcgggattaaaaaaaaaacatttaataatgcattttctagaaattaaataaaagataaatcaatttaatcaagtggaataatgggagaattaaatgtttttctgggcgtgacatggacacatgctccttgacattttattatatttatatggcatgggctaatggcttcatttaactgaggggagattgtgaatgataacatagcaagaggaaatgagaaatgagcacacaagcttcttgactagaaagactgtttgagtcaatgccaataataatacttagaagtagatatcatcgtgtaatggccttctcgatgatactttgctctttgtgtaatagtcttcgtatgctcttgcacttgactgttgtttggttacaactagatcgtcgggtgtaatctttatggtctatccttgcttaatgcaaacatgttctcagttgtcccatgtattctgtgaagatacaattctttgtttattgggaaagggggcattaggacgggttttgatattaagacatatagtttgcatggttatgcacacggttgaatttgattgatcactcgaaacacactcatcttatttaggtaaacttctatatccgaggaccacatggagctggaaaggtgtattcagagatgttcaaagataacaatgacaggagttggaagttcacataccttattgttgagattgtgtctccgcatcgtgtacaactaatgttagaatcttacgtaccagcataaggatgcaagaaacaagcagttagcagtggcagaattgttgtaaggttcatgcctccacacttacctatccaatgtgtacatctctcatatttagaaatcatcctttgattacagaagttttgagttttgatcttccccagtagcacaactatctgagtctgatcatttctggtatcttaaatatggtgtagcatggaaggacctaatgttactttgttcagctgaaggccattaagatacatgcatacatcacaatttttataacactgcttaaacaatggtagaaacaagagcaagattaccagagttcggttcctgttttatttgaaatcttcttttatatggatcgtccgatgttctctggatatcttgaaaaaatgtattcgataacctttcataattcttttacttatttcaagccagagccagaggtaaaaaggccatacacgggctgacgggaagcaatctccaagttcttgaaaaacaagtagtacaatttttagttgaccattcattcccctgaccagcgatttgtgttttaccgtggtttagatgcattcatcttaaccactcaaatatttttagaagttaacgtcccagaaaaggtgagtttggcaaatttagggagatttggtagttctctctaattacgtattacctgttaaatatatcatgcatatttaaaaatcatacagttgacgtatgtgcacttgcaactattgggttagcgggttagttgtaggtttaatttaatttttaaaaagtttcaaggcgtgttcctaaatttatgtgcagtttcttcgtttgctaagttctttttctgtggaaattttattcggaagaacctgaccattttatgatgaaaaataagcttaatgatagcggcccgtacggatttttaaatacgttctctatatatataaaagcttgggctccgtttattgaacaactctaccgttacctatatttcagaattaagagtaatctgtgaatttcttttgggattattattattttaatggtacatcgtatgaatggtggtcgcgcggattttttttttctaaaatagggcggccctattttggcaaaaaaaaaaaaaacaggcggccaccatttttacaattttcaattaaaataataatattagaaaaaaattgcaatatgttctctgtaccgataagatgtacttcaatttcttcaaacacgtcgccccaccaacatttcaaaagtgaaacgacacttcgcagtttgcaggtaaaatgtcaacttttgcatgatcatgtttgtaactcgtccccaatgatcaggccacttccggacccctggtcatcttttatccacaatgagatcagaaatcccagtgcagattctcacttgctttgcaaaggtcgtgcaaattcagaggttcggtcacctcattactttatcattcatagaccagagccattctcacattgcacatactcctccgtagtacctgtatatgctggacacatattcttctttttttgcccttttgtctctcatctgcaattgcaagagccaggttcagagcttagcatggctactactactaatccatccatctgatcactatcaagcctctatttggttcagcctttaccagggttgctttcatctgttagatcagcatgcctgattggagccaagctacgactactggtatagcttagcttttagattttaatctacctgctcccacaatgcaaggagtgggtgtatctttcagggggctcaattctttcctgtggatgcatcgtgttgtcgattccattttgtccaaagatctcattcactctcgatttctatcggtgaagcggtcatggctcgcaaagaaaattgtatggtatggggctaagaacatgaaagcttatgttcgttgtcaggaccaaatgatctcaggattaggtgattcgtcgaatcaaaaagatagttgatttgtgatctctgtcgaatcagcaggtcaacgtaacaaacacgcacagagagacagagggttactgtccatagactacagctactcacattcttttcagattattcaccgaactactacggtgttatttctttcacgttttcaaaaatacatttttctcaaaagactttattctactacgagcactttgctgtatgttattcgttaagttttttttttcaaaatattttaattcatccctataactaagtagataaaacccatcaacaatccagtgaatagttatatcattcttttttcttttgctgaactctaaacgaccaattgacacaagcaattatgtcactctttttaatctcataggcccattgtttcttctagacggtgacgacctacggctgttgatgaggcacacatcgtaatctgttagtagttagtactcctaacgaagaagtttggcgcgtaccagtgacttctgatgggttaataatatctctcagcattggtctggaaaggtgttttgatattgacttatgaaggtttcaactgcatagtaaacacactgacgtatgcatattagcttggaataattggcagtcactgctgcatgatgcaggcaaggcctgctcaaattaatgatagaactagaagaaactaaccttcgtactacgttcttggccgacgcttcggatgttgaaacattcttcacggtcttcgcaagcaaagcatatgcttcacaataattttatacggtcattttcgatgacatgtttcttcttatttagcttgccacatgccactaatttcaacatcaaaatgttattaaagttgcttgaagttttctcaaatcaatccagagggccaggaagtacctgaaacagatcggttgcttgtgtttctcaccaaaatgtctccctaaagcatgcccaatatcttgatcagttgccaattctccactattatttcctatccatttcctctgtgtctgtcatcacatgttcagcagagaagacaagcagaacaacatcacagcttagggggtgacattaaagaagtaatactactctccccacatgatgcatgcccatatccatttcatatgatatcaaatcatattacagcttcttccaagtgggcagctggggtcacctatgcaaatatcaaggaaatccctaggaccatacaaaatttggctagtttatgtaaaaacacagaggtgtggttttgtgctactagcaacagcatctcataagagacatgaacagcacaacacatcagggactgggataccataaactcccctccttcctcctacctccaggatcatggcctacctggctttcagctaatcagccacctaccaaataattccctagagaccaagtcataacaaaagggaacccttaattagtactaccactcaatcactcatggtgaataaaagacttacctagatgatgcctcagaatccaaatgatagcaccatcattctctgtcagtgtggacctttttgggaagatgaaataatcagaagatgaacatatagcttagctagatgttaatcatgcaggtccaatcaacatgaataacaaaacaaaggaaatggattaattagttcctcctcaccaaatcctcaacaaactttaactaacagcttggtactagtactgcaacacaaatgttcccttctctcctctacttccctgctggcctaccaatctaatccagtactacaaacaaagtcaaacaatccttcagtcttctcttcacctccaaccaccatgacagcaaaccatgaaacacaatctgaccaaaacacccctgcaccaccccaaattaattaaccaggctaatcatccattaagagactaagcaccaccactgaatcttcttccaagggtggtaatgcacactgtttcagagtttatcagagtttcagaagattcagagcaagggcaatcatggcaatatcagcttgagttgagagctccagttaaaccttccctatccaattccaactccctccctccctacacaagcaacaagagcagcacaccaacatccaagaacaagaagagcaagaagaggagaggagaggagttggaaggtagagagagacaagccatcattagccaccaaatgcaggcatgcatcatatagctgacaggacaagaatcagaggaagaagaagaggaggaggaggaggaggaggagacagctgctgccatgtcgtcgtatgaccagatgctcgcgccgcttcttggcgccggccggtcggcgtggacggcgcacgacggcggcggcggcggcggagaagccgtggtgaggcagatactcaagtgcacgaggtggcagctggaggagacgacggacttcgtcacctgcccgtaccactactactgcgacagctcgtacccgggcgactaccacgccgccgtcggcgtgctcgtcgccgccttcgccgcgtactgcttcctctcgacgctcgcgttcacggtgctcgacctggcgaggagcggcggcggcggcggcggcgcgggcggggtgagggggatcaggaggaagtacctgctcccgtcggggccgttcctgctgccgctggtgctgctcgtgctcgccaaggggcagcggatcaacgccgtgttcccgctcgcgcagctcggcccggcattgctgctgctgctgcaggcgtcggcgctggcgttccggaacgaggccgacggcgacatccggtacgcggtgctggaggcgtccaccgtctccggcgtgctgcacgccagcctgtacctcgacgccgtcgtgctcccctactacacggggctggaggcgctccggtggtcgcagttttccggcgagtgcgcgacctgcctctgccgcatggagcccctcgtcgtcggcggcacggcggtgcggtaccgcggcctctccaagacggcgctggcgatcatcttcgcgctgtgctcgcggatggtgtgccggatttacggcgaggagcggctcagcgcgtggacgcggtcggcgctggaggcccccggctgggtgttcgtggcggccgacgccgtctacctcgtcggctgggtcgccatcgagggcggcgccgtcgccgtgctggcgtacagcctcgtcgccggcctcgtcttcctcagcgtcttcggcaaggtctacagattcttggcatggttggagacgagacaatctcaatggaaatcaagcctctgccatagcgctgtatgatactactactcgtcagaaaaaaaaaatctgtaaaaagaaaaaggaaaccatttcttagctcaccttttgttcatttgtacaatgattcacacaatgagaaaccacagttgtatttttttttcatgcttatatataagttctctgaaacaaatttgtcaattcttggacaagttttctgaagccattctgaactttttctgatgaatcttcagagtttcttttccatttttcgatagggtgtttgagagcagcttcctgattatagcacacattagatattcagcttcgaattaggcacgtgtactacacttttggggtataattagtttgaacctccgatttggcataagcatgtccgggttagtacccttaggttaggtcagagtgccaccattttggcagatgagaatggtgccatgagaagtgaatgggacaaccggcaatgatgcagtgacaatgtggtggttcaggacatgtcaagtttgatcaagcaaggacatcacaactgatggcttctgcgagccagttcttggaggcttcctctctgagaattgtttccttatgctctttctcgttgtcagcttgtcatcaatcaatccttcaccagtttgagccgaagtggttggagcgtggttggagctttcacctgatgtctcacctggttgcgatttgagccaatgcaagaacagcacataagtacatactcactgcagtaaactgatgcaaggactgcagagaatctgattctgatgaaatgaaattgaagggtggcgacaatgagttttagaagtgatagtaaatgtacttttgtcgcatagtatttggccctacaattcgatctgcaatgaacaaagtgtttgacttggctatatggaatcccagcttttttagcctcgtgcattgtctgaatttcgaaagaaaaggtcgttgctttttataagaaaggtctgaaggaaagagtcatctgcataacgccttcagacttcccctcgagcatgattaggtaccggtgatcaggccaacgaactggaatgggtctctggtcaagattattgtacaaaatcaatgagttcatcgtgcattggaagcaagcttaaggatatagttgattgacactagcatcttgtcactttcagaagctagtggctgtggctacaattgtgcaggagcaggacggctcatgcttgtagcatccttgtcttccaactctttcccttggctttacaaccatgtgcatataaagttctgatggtgccatgcgctttgggagtaactgaaggtgcatcggatgtacactaatcaaactccaacttttggggctcctttgaaacacaacaattctgtaggattttttttttaaaaaaatagttcattcttgcaaaaattcctccaaaatttttcaatgatactaatacaaaatgatttcattcactggtgtgaaacattatctttcatcctctcttgggacatggtaatagcaaggttactaaaatcgcgatcctgaatcggaatcagaagttcttagtagtatcacaatcttggaatcatacataaaaaaatcgtaaaatcgtagattctacctatatagaatcgtagaatcaagcaccttaattagaattgtaaagtcgtaaaatcgtaagagagagtcgagattttgacaactttgggtagtagttaccattgggctgaatcatgtggtttaattaaagtttaaactagagtttattatttcagtatgattcagctactttccattgcgtgttgaggcaagattatctaagtgtggacctggtcgctgttgtggcagttttattaggtggtcactgttctgacttgagtgtacgctatagtttagtttatgaaaaatcatgtagcgatctcggctcctgtagcggcgtctgattgcgtacacatgacatgagtattgatttacaattgttttgggggaaggctaattaagcacacgctttgactgcctctttactaccaatgaccatatgtcgatggctgccttccttgtcactgctacgaacgtttgccgtcagttcatcataagcaatttgaatttgaattattaaagtttgattcaatgccgactagtagtctcctttggaatatggaatgcaggaatttcaaaacaacttttccccccgggcaatttggaaagatttttacataactgaactaaaatttttaaaatgtctgcagaattcatgcggtccagagaaacccgtacaattctacaagcccacaatccatttcctgattatctcaaaccagcagataactcacatttttccaaaaaatgaaaatcataacaatttttgtctaagtcacacattttcactcagcgaatagttttcaaactgcgaagtacaatatgcaaattatgtgtcaaactatctatatcttaatatctatactgctttaaatgatgctagtggtaatatctgagtttgtttctaacgccacaaactgatatgtaggaccataaggtctcacgtgaattttttttctttgcatatgacattatatgcttaatcaactaactatgatgtgaacttgtactttttgcttttaattgtatcttttcctagaaaaaaatacccgtgcattgcaacgggtgaaggctatcttaattttattattattatactgtttagttaatgtgacattcactgtagaaatttgattggatactgtttttacaagatcataatctataattaggagtccgatcgtttcaagttagcatgcgagttttctttaagagatttcttatatgactccttctatatttctaaaagcaaatggatttaacaacttactcaaataaaactatgtaattccaaaagcgaataaacttaaaacccgactcaaacgcagatgacttacgaaagtactagtaaaaacatttttaatttttataataagcatagaagagatagagatataatatccgttgtagcgacctttaggtcgtgtacaaaaaattctcttaaatccggatagctgataaagagaaaaaagaaggaaaaaaatacaccagaggtcccttaacttgtcatcaagctacaaaatcatcccccaaccacaaaactggatatatggcatcacttaactcacgaaaccgttcagtttaggtccttcggtggttttgaccccagggttgtccgacgtggcggctaagtcagcgtggatcccacatgtcaggaaggccacatcatcgccctctctcctctttctttctcctcatctctcccttcctcggttcctcctctttctcactcttctccatggcggtggtggctgcgaggcgggaggagggcggcgccgcggcagtggatgatgccgggggggaggggggcgatgacgggggagaagggagggcgttggtgtcgatggcggcagcgacgcgggagaagggtagggcattgccgcgtgggcaaggtcgaggatggagaccccggcggcggcgaggtgaacgacctcatggcatcgcacaagcatggcggcggcccgacggagctctgctgctgccaaagatgggcccgacaggcatgcatcggccgtcgtgggcgagcgctgggtggcggagctcaaggaagatgagggcgccgctgccaccgcctcctcgcccgccgctgcatcgtcgggcaccagatgtcctctctcgcctcgtagccgccgccgccgccttgtcgcccactgccgcttcgctgggtgccggatgtcctctcccgatttgcagccgccaccgcgtcgctgggcctcggatctcctctcccgcctcgcagccaccgccgccgccgcctcgtcgccaggcaccgcgtcgcccactaccggctctcctctcctgccttggcacgacgacctcctccccacccgccagcagccgtgcagagagaagcaaagtgacaaaagagaggggatgaagggagaggaggggaaagagagatggtgatgatagacatgtgggtcccacgctgactcagtcgccatgtcggacaaacctgggttcaaaaccaccaaaggacctaaagtgaacgattttgtgagttaagggatgtcatatatccggttttgcggttagagtacgattttgtaactcgatgacaagttgagggaccttcggtgtactttttccaaaaaaagaataagcccgcccaagaggttaatgggcccggcccaacttgatccgatgcgggctgcggccaccgactccgaataagacaacaagtccacgggagacttctcttcgccgtcgtgcacacgcgctcgatttcctcgtgtcccttctctctctcgatctccccctcgctttgctttccccaaatcgcgcagccgccatggaggagaagaagctgtccttctccatcccctccaaggcccggccggccaggccggccttccgccccgccgacaccgacggcgccgccggcgcattcgacgacggcgagtactccgcgcgcgccccggccccgcagttcgtcaccgagttcgaccccacccaaaccctagccaccggggccgcgccgtccgtcatcgcgccgctacagaactccggccacttccttaaccaccgctcccgcaagcccttctcgctccccaccccggaggaggaggcncgcctcgncgcgtncgccgccggcggcccctccttcgtgctcgacacgtnncaccgccccgacaacccctcctcccacatcgcctatggcctcaccgttcgcaacgccgcggcggagttggagaaggcggcggagccggaaaagacgcccccgcctcctcctgcagctggtgcccccagcggcgaccttatgctgcggaggtacaaggaggacatggccagtctccccgatcaccgcggcctagatgagttccgcgatgtgcccgtcgagggatttggtgctgcgctgcttgctggatacggctggtcggaaggtaaaggtattggcaggaacaataagggggataccaaggttgttgaatatgaccgccgtgccggtacacaagggttaggctacaatccctctgaggccgaccctaagaagactcgcgctggcgaatgggttgttggtgggaacaaggagacccagaatggaaatgcgaagaagagagaccgtgacagtagaggtagaacagaggatagagactcaagctcccgccagaagagatccggtgagcggagggcagagagagaggtccaagaaaaggatagaaattctcgacatactaaacaagttaagattggtggtggtggaggtgacaagatgcggtggttacacagcgatatcaaggttagggtggttagtgagaggttgagcaagaagctgtacttgaagaaggggagagttctcgatgttgtgggacctacaacatgtgacataattatggatgatcagtctgagctggtgcaaggggtagagcaggatatgctcgaaacagtcctgccacggatgaatgggctggtgcttttgcttgctggggagcacaaaggattatgtgggcaccttgttgagaagaattcagaggaggagaccggagtggtggagctgtccaatacaaaggacatgatacgagtgaaatacgaccagatcgcagaatatattggagacccagagtctcttgagtactagttcttcttattcttgaggagccagcattgtctaccaagagttcttctacgtgctaggtaattccaatttcttcttaatggtaaactataaagttgctgcttggacgtgaagttttgaacaaatttatagttttgctttgcagtaacatatttatgtaagtctgctacatagtgattgaagtctctctgagaccccgagtaatgggtcatcttgttttcatgtctcctttgcgtttgtttctttctaaagccttaagtaaactgtcattggcattctagtaattagcaacttgcaataattgatgattctgatagccctgcaatgaagggttatatatcaatgttggaagcttcctgaacatcctagcttctttaaatcttttacattgctatgcgtgtgaggacaatccttatggttattactgagttgcataggctgtaggcatggcctgatctcactgttaaacttcaatatctgcaaactaagcttgtgaaaaacatttttgtatgcatcacattatattatacatttactgtacatttataattaggaattttgttgaatatcagcatacacaactcgcttgggactaaagtataatgttctgttgttgattttcctggacatcataatgtgtaaatccttggaagggaattcttctttcaaatatttgtagagcctttatggagcatactaaaatttgtggagttttcattaaggggtttttgatgatttgccactctttagattggagatttgatgatttaccatcttgacccacatgtcatgaactcagagggtcccaaatgtcattgtcatagggtgacaagtggcaaatctgattattaataggtattgcagcacttatatgagttaatataaaaacttgctcttattttgtgattatcttgtatgttagctattgattgccattggaacaccgtgggatccaaactttgtagatcataataccccatgtcggtcgcatacacatgtggagtgcttcacagccataccattatggtactaatttcacttcaaggacacgcatgaccacaatagttgggccacagtattatactcacctgcctattaggctgactctctttacacttattttaaaatgagcttctatcatgtgtgcatattatgaacaatggttgcttgtatcgatttgatgatgataaacatccacagacattaccctgtgatgccataatcccataaccacatcaacgggatctaattattgcaacacaacattaaactggtaaatgtggattatgtttatcatttctgatgatacagtgcattttgttgcacccatcatacagttcccatttgtggtgctcatcatacagttccctctttttattttgcgcccatcaaacaatctaaaaaaacattgtcctgtgattttcctcactaatccattaacacttcttacaccttctggttcttcatttgcatgctgacaagtaatggggttatttgtagaatcaacaatgagaaggtcaataaccttccatcaaatatgtcatgacccgaggccatgactagataaacaccgttgggaagatagtcgggcggtgtcggctcctgtagaagggatacagattttgtctagggagaagaacattgttgggagggatagattagactaattgatattcattgcttaattcataataaacacaaccccatccttatatagatggtaccaacttgacccctaagtaaggacttaatttatcttatctctaactaactaataataatatctctaacttaattgatctgggctgcctatgggcctctgccttccggcccaatgcccatgacaaatatgcataaacttttgactaagttcctttggaatatcttgaatgcaccctttcggtcagcagcttccagttatgttggcacatattactccatagtgcaaattggtttaagcccattatttcttattcactgatgcataaatgcctggattttactgtattactgctctagtaatatagaatataattggtgggcctaatttatgtttttaaaatggaggaatgcacatttccccgaagatgtccttgatggattgtaactttaaggtgttaatgagggttacataaacctgaaaacagagaagccaattgcttatggatgttgcaaaaaaggcaagtcttactccacatgtatgtttcatcttgcatttaacatgtgatgatgtccgcctgtttttctcttcttttggcatcagtaacttctgcttaaccataatcagcaacagctccatcaaacttaatctttttttctttggcaataatatcaatcttgatttttgcgaactatctcgtaaatgcatgcagttaaacctcctaactaatactccctctgtttcatattataagtcgttttgcctttttttttctagtcaaacttttttaggtttgaccaagtttatagaaaaaaaatagcaacatctacaagaccaaattagttttattataacattgaatatattttgataatatgtttgttttgtggtgaaaatgttgccatatttttctatacactcggtcaaacttaaaaagtttgactaggaaaaaaaagtcaaaatgacttataatatgaaacagaggaagttctcttctttttttttctttttttttttgggtgaggaactaatagttcaaatttggtttccattgttatcatcctgaactcatacagatctatccaaaattccttaccacaaatagcaacaatttcataaaattttttttgttttggtaataccatcaaatcttgaatttgttaagtatctcataaatgcacagattaaacctttcaacagtccaaccattatctatacaaaactaaggccctctttgtttaggcttataagccaacttataagtcgaaaagtctaagccaaaacaaacaagcagctttttcatttggcttttttaagccataagccactctaacactattaagccaaaagctaggttggagaagcttttttttggcttatatgagatagatgtatgactctaccattaaacttaggacattaaatccactggcttataaatcatataagccaataagctgacttaaaagtctaggccaataagcctaagcctaaacaaagagggcctaagtatctcataaatcctcggattaaaatcttctaataattcatgtcttcacctttatctatctaaaactaagtatctcgtaaattcacgaattaaaaccttctaatagtccatgttttcactgttatctatccaaaactaagtaccttgcaaattcacggattaaaaccttctaactgtgttttcactgttatatatccaaaactaagtatattgtaaattcatggattaaaaccttataacaattcattttttcaatgttatctatcacaaaggctcattaatatgtaccaattgaaccccatgcttcactttctctctatataaccttccatgtaacctcagctcactgctcatcatgtacaatcgctgcacaccattctttcgctgatacataggcaagctgtgctagttaccagctaggagatggtgaagtgtagggcacgcacgactaggaaaaagattgagatcaagcgcggggacaagaaggtacgagatgcatgcttttccaagcgccacactaccatcttcaacaaggccaatgagctcgctatcctctgtggcgtgatggttgctgttgtttttgtctctcccaatgccaatggcgggattttctcatttggctacccatctgtcagctctgtggcaaatcgcttcctcgccaatgctccaaacaacaccagtgtgagtagctcaacccaaagcgggagggatgtggaaatccgtgaactagaacgtgaagaaagagagttgaaagagcatctacaagcttccacagatcagaataagcttctgcgggaggcaatagcagcaagggatggagggcaattgatgcttctcctgcagagtgattgtagtgagttgggaccaaaaggtctggtgagaggaggaacaaaatattgaaggataatgccatgcgtgtccatgttttagcaaaaccataatttctatctggttgttagtgtgcacccttggcttggctctccctgtaatgttgcttgtagggtttgctccatgggaattctctatgattattttgccaaatgatgagaacaaatttatcataataatgttgtggttgtcatatttgcaaggactgagtgcgtagatctatatattaatattggtggtgttgtgtattttattttacttctagtgctcagttctctttagaccttgtttcttttaattccagctgctctaatctcttgtaattggtgaatttatattatttgtcctgcttgtgatgttatatctatctacttgtttgtatgtttgttgcatcaaatatagttttcatttcgtgggaacttataccattatctcattgtgatcattaaccatcagtttaatctttaaacgtcttgtctgtgcaacatttttgcttcagtctctcgtaatctattatgttcatggtgaacttacctatccaatctttaaacccatgatgcatatgcaggtgaagctgaaagtagaagtgaacttaacatcatagcctacgcaaagcggtgaaaactgacatgctttcagatgacacatgtaccattctgtcccatgggtttattgacaatcaactggattttatgtatttgaagtatgatgccctttctctgattcgcatatcaatggaaaaactcaaaaccgtctctagattttgcagatgacagttacgaagttctctgaattgcctcaatcatgtcttcatttctaatttgtagctcttcttcgttccacaaactcactgcttgtgcatgatatatgcaggtggcagttgtgcggttgtggttccgcaattctcttgttggcattgggcttgatcggttgtgctggctgctgcagcaaatactctttggtttggattggggctgactgactacagctgcgctgctgcagccagcacttccgatcaggctgattactttctgctaatatactgtgagataatttcctgtgcagaaatattactattttctacattgtactaaacaacacacggagacatacaaatcgtgctattttccagtttcgtaattccgtatgacaatggaacgatacagttaatgcacatgcccccttgacgagataaaattccacggaggtcgcgcaaggagaggtgcgtgtttgatctgctaatacgttggaggtcgagcaaggagaggttggaggtctaatgtgttggaggtcgagcaaggagaggtacgtgtttgatctgctaatgccttaccgtaaaactgtcgtagcacttctattttgatctaacgtgcgccatctttattttaacatgtagaacgttatctaattgaatgaatattctattttattccttgtgtttgtgagccatattttatttattttgatctaacgtgcgccacctttattttaacatgtagaacgttatctaattgactgcatattttattttggaatgtcagctgcatgtttgattgatgtacgatgatgtgaaattgttcatacgcatgtgtcgagatggataattagggggtgtaggtggtgttcgtaagaccaaggctgtggccacacagccttttagaatgcctatggcactgttgccgttggattgagatcccctgactagtattttcagctgtttgatttatagcgaacgaaagatcaatcgctacagtactgaaaaacagtagtatggtattaatgctattttcaaccttactaaattttggtaaagttgcaaaaaaagtggctatatttaatttgccgccaaattttggtaactatataagaaatcctgtcaaaattttggcaagttaccaaaattttatgccaaaattgctaaaatttggtaaggtttttcttttagcatcaaagtgaacataccataatttactgtttcaaactattgtcacaggaaacaactacaacatcactgtttttgcactgtggcgttagactcattttattgtgtctctggctttaacgcctaaagtcggaggatctggatctgttgtcgttgactatcgtaaccacaactcaagctgacgaagatagccttaatgggaaaatgtaatgtacagacctagtaagccccgtttggtagggctccaaactttaattctcaactctaaactctgaatccaatgagaaagaagtgggcatgaaaatgtttggctagattggttagctccacgccaccacgtcctttgttggcattttgtcgaacacttggtgttgtcgccggcgctactcagcctgcgcgtcgccgccgcccgccccgtagccaccacgtcctttgtagccacccgctcgccgtcggtcgccggtgtctaccgaggaagatggaggagagagaacgtgaggagatggggtaggaagggatagttcagtggcattttggtgtaaatatactaaaaagttaaagggtagtcggtcttttagggtggagtggagctatggagcaacaaaaacccagctccgtccctgtagtacaaatctgtggagcagctctactaacttcgctcaaaaaatgaacaatatataccgtttggcataactctagctctaggtaaattggaattgggagctgcagctatgtcaaacggggtcttgattccacattgattatgggtttacttatatatatgtagctgtggtcttttcatagggttgggaactaatcccgctaaccgtaaaaaaaaaagcgattcattagcgcataattaattaagtattactatttttttaaaaaatggattaatatgattttttataacaactttaatatagaaagtttttgcaacaaacacattatttaacaatttggaaaacgtgcacgcgaaaaaacagagtgggttgggaaaggaggggggagaacacagccgtagtattggcattatctgatagaaatccggcccctgtactgtacccatgaatacgattacatctttgctcaacagtcaacatcttcctaaacttgaaacttagggtgtgtttagtttaaaaaagaaaatttttttgtgtcacatcggatgtttgaccggatgttagaaggagttttcggacacgaatgaaaaaactaatttcttaactcgcctggaaaccgcgagacgaatttattaagcctaattagtccatcatcggttcctccacgaccttggctagcgagcggtgccctcttcccaaacttaggccggtgcgcgcacgaccttgcctgaggtgtgcttgctaagttgctatcgccgcatcgcgcggtacttaccccacaggtcagcgccctcatcatcacggcattacacatcgaggggagtagccatccatccggcactgcactgcagccactgccagtgttgggggaggagaagccgtggctcgagatctctctcccagcgccgcgccggcgctggccgtcgcacggctacacgctgccccctgcccccggtctcgcgtggcgcgtggcggcgtccgctctcccccgcgggccgtccgccgtcgcacccgcgcttcgtcacgcgaaacacaaggattctcccgtacgcgcgcggctcgtcgccggtggagtcgcggacggcaagaggcgcgacccgttcagtgcttcgcgtttccatatgccggaccggaccggcctgtggcccatatcttagcctgggctgaaaccgttgccgctgcattgcgcattagctcctagtacgtattttccactgatttattactacttccaattttttagagcgtttcaaggaatcgtttcctagagagccagttaaatgtacgtacgatcctggcgtccaaaaatacaatttatttttttatcagggaatcgatagatgtcaacgtcgattctatctgtgcagcataatagtacacttgtggttgggttgcagcatgcagactaatcattttgctatagctcactcaacgcacttatataaatataaatatacttgagtgaaaactaataatgttggcgatcagttagcatgcacttgctgattatcaactaatcgtccaattctgagagggccaaactgctggttgttaatgagggacaagcaaaccagctgcaactgaaaacttcagctcatacaagtttcagtaagagccaaagcctcccacaactacagtattaaaaattgatgcgtatagtttctgtatgaccaaactgatgatagctagtcataggttcattgcacatttcattgtatttgcactcaggctatacaaaattaccctgtctgttgttgaaaacaaaaactacataatatttgattgctccatgtgtgttcaaattacaacagtggatatcaaccaaatacatataatgcaagtgctataattgtataagaaatgcaattcagtcatatatatatagctgatttaccaaactgcagtaaattaattaacagcccagcgagctagatagaacatccaaccaacccacacaacgcagcacgtcctgctgctgttctatgcaaagacaagccccgttttctttataccaacttgcaacagtcccatgagaaatgattagtccaatgtcaattaggggaatctcttctcagatcatagtgtcctcatgcttaatgacaacagcagcgttagttaacctgcatgtagcgcttccctgagaggggagccgataaactacaatatcataatgcactctgaattatacggtagcgccccggccggcctcgtgcctaacggttcagaattagtttaactgattaatgctttgtattactgtgctcttgaacaaccagcatatacatggacggcggctccagcactgaattccagtgaccctctgaaacaatattttgccatttcccaaaaagtatgtactgcataatacagtaatttcagagaaccaaaagagtattcatatatgcagtcagttctgttacttcttatccatgtgaatcgtgatatctcatgtggttaagacgatttaataaagttataattaagtcatgtggtttttaagctagaagggagggtatgtatcaagcatcggcatcaggctaaaaaaggccaagcgaatatgctgctgctgccggcaaagacatttttggggttcagagaaaggggatgcaagaaaagtaagagggaaaaaaggggcagaatgagaatgttcatcctgtgcgttttttgttgctgaaacaaagtgcacgtcgtcacgccgagcaggccagtcccttcttgagcccggaataaagcttagtgtgttcctctttttgatcacccaaattcgcctttaaattcaaagtcttttaattccttatctctcccttgccgaacaatgcacagtgatctcggagtactgaactactgatgatcagatctaggctggccctaactattccccggatcgccaacatggtcacgttttggagcatctcgatcgatcgatcgatcgttctctctcccatgccattgccatccattcactcatgcaatgcatccgtggctagcttacgcacgcattaattcaccacgcacctgcagatggtgagctagctgctagctgactgctgatctgcctcgtccaagctgagataccacgaggaggacgagggcatacgttctcgcaataacctatatatatatatattaggtgagagataaatcaatgaatgatcatacattgattagtctctggtaaagaaacaaataataatagtctgtgttgctccatctttctctgctcgatgctatagaaaaaaaagaattatttgattaattaattacaaaataaatatttgattaattaaggcgacgtcaatgagagggtcgtatgattagcagcacgccgtagggaagacttgagaaaaatagtactaacgaaaaccggggaggtggtgtggtgtgaggggtttcgcatcggcgcatgtgacgcgtcgccggccgtgtctcgtgcctgccgatccatcgatccatccatgggagctagcgatcgatccgctgcccgaagctggcctggccggcacggcggttgaatctgccccgctctcgattattgcgtttgagggtgtgggtgatgcatcgtgctcggcaggcaggctgcagcatcctcctgcattggtggaattcgatgtgtgtgtgaatggatgtacctgttgaagtgtaggcgtatgcatgcatgcatgcatgcaccagcaattcttcagagtttgcatgtattcgtgctacatatgcatgggaggtatatacctgcaggctgcaggctgtattttaagtgttccaatgagcagagatttccaaacaagtgtgaacagttgtgattggtttgttattacatcttccccttgttcacattggtgcaccgacgacgactgttctctgaacatggtcagccgtggcgcatctggcgcagttcttgtcagtcccggctccaacagaccaacaggacgattcacagcccttcaacaacgtactgttaaacagtactactacttgtttttcttttccccgccggatcggttaacagtagtacgagtgcaaaatccctttctcttcagggattgcgaataatttgcgatgccaagttgacaactcgtcgcctcctctgatacgacgatgcactcagcctgacgacgtttccactgaccattgcgatcgagctcaactgactcgcatgaaccttcttcagctagccgagcatggcatgcctctcttcaggcgaggcgagcgaaaaggaaagaggaggagtgcatcgtcgcatggaagtgcgggaaagcgcatcagcggacggaacaacgcccagctgctgcaaaggcgcgcgcctcccctgcagtaaacaatccccttttgagccttttcctctgccttttctgaaccctccctttgttactatctgcctctccacttaattgctttggctaaaatcagtacatatgcagctgcctttgcaaaaagctcactagtattgcttgctctcgcactcgcatcgcacccagcacacagcagcaagcaaatcggcatggcaagtggcacggcggcgctgcatgccaaacgagcgcactgtgcgctgatgcacacagcggcatctctcaaatctcacggcggcgtggcgcgcggcctggctccgcgatccgtgtgcgtccggggcgcacgctacgtgttcgatctacctgctaccgactcgcaatggcaaagctcgatcgatcggtggatctctctgatgatcggtggatctcgctgctatgtattcgttttttacttttgcagttttttcgtttctttcttttcttccctgtcgccagacaatgatcgtttggtcaattgtgttgtctaagaactcacagctttcttttagtatattgacgtgcaattattttacgtggaaaaaatctgatcacctcgagaggctgaaaattaaaagggcgcggcacgagcatggcgctgtgggatatggcggatataaatgcgggacttgtggatgcaggcatacgttcatgcacgagcagttgccgtccccaatgattggataagaatatgtaagatcgatgcatcatgcatgcacatcatgtaacaggagaggagccagcgattggaggagtttgatgaagtgtgtgtattatatgtagcttctgggttcggaccagcatcggtattcatcagtatggggtgttgtttcatctcgatcggtcgaggtgaggatttgtcagttgtcagttgtcacacacgtaaatattgctacattcgtctcaaaatataacaatatatagtatgagatgtgatgcatcgattttaatatgacgaattaaacataagatctatctagatttatagcactaacatgcgtattattccataccatattgttatattttagaatgagtagcttcagagttactggctccggcgttttctgcctcgaatgctccctgctacggccattgtgagcaggtgacaggagatgggcaacatgctacatatcagaagtcctgctattaatttgtgaaattctggccaatgatctactgtgtttgtaaatttatgtttagacttctgagtgcaagaagggatttacttaggagttaataatataatttgaacataattaatgcagaactctttcaattgaggtgataatgtagcctagccagctaagcaagaccaaatgttcgattgggaaatgttggagaaagaaattaatggttgaatcccacgtttctgttcattgcattgttcaagagaaaataataattctctttcaaaatcaaaaacaaaagagaaaagaatcataagattctaaaggaacgtaacaacgcacagagctaatctgtcagaactggaactagtactctaatttaatttccacatagaatcttatgtttataagatgaaagggcaaagcattgtgtgcccctgttttctgaagtctccgataaaaatctgaaacgaaatcaagctcaaccactcattcagcagagttcattacaaataagctaattgagaccattagaaggaatcgagtagttgactgaaacaagggatgaagtttctccatatatgaacatggatcaaaccatgtcaacgcagtgacatacatcgcctcgatctttgtacaaagcgcctcctcacaactcataatccacaccacacactatacaaaagtaacaaattaatcctagctaattaaacaaaaaccttgcaaacgaaacccaaaagggaagcaaatctcacaaaaagggtgcaaatttatagcttgactttgttcgtctttgccttcttggatcggctgtcttgactccagctcatcagtttgcggaaaaccccctgcctttcctcgtaattcgatttcctcccgaagctgctgcgcttcttgcctcccatgctgttccagctccccagcttcgccttcttgtcgccggcgccggcggccgccgagtccttgtcgggcaccaccggcggcgccacgcaccgtatgagcgcccagtccacgccggcgaagaacgggtgcctcttgatctcggcggcgccgcgcgcggagcccatgcgccgccgcgggtccctctcgagcagcctgccgatgaggtcgcgcagctgcgcggcgtcggcctcgccgtcgagctgcgggtacgtgacctgcttggcgaggatgttcttgagcgtggcgtccttggcgtgccccttgaacggcgtgcgaccgtacacgagctcgtagaggaagacgccgaaggcccaccagtcgacgccgttgccgtggccgctcccgctcacgagctccggcgcgaggtactcgtgcgtgcccacacagtcctttgagttcgccgtcgtcggctcggcgacgaactcgaactgttccttcgcgttaacctcgtcgccgtcgtcgccgctgccgccattggcggagaagcaggacggcacgattctattcttgcgccggctcagtttccgaacctggcggcggcggacggcgggctccacggacgccgggagcgcgaggtcgaagtcagagagcacgacgtggccgtcgccgcggagcaggacgttctccggcttgaggtcgcggtacacgaagccgagcgcgtgcaggtactcgagcgcgaggagcacctctgcggcgtagaacctcgccgcggcgacgggcaggcgtcccccggggcggcgccggagcaccgcgtggaggtcgccaccggagcagtagtccatgaggaagcacgcgtagcggccggcgtcgaggcgcgcgtagagggtgggcacgaaggggtggtcgagcgaggagaggacgcgggactccgccagcacgtgggtgacacgtgacgggtcgtcgtcgcggaggtcgacgaccttgagcgcgaagagcggggaggcgggcggcgagctcttgaggcggcacaggaacacccgcgcgaggtggccgtggcccagctcgcggatgaggtggaggtgcgcgaggcggaggacgccgtcgggcgtggcggcccgcgcggccgcgaggagcgcccagtgcggggacgaggaggacgagtgcggccgcggggagagcgaggtggaggacgagaaggatcggcagggagatgcgagcttccgcgcgctgaaggtggtggcggtggtgaaggaggaggtggaggcggaggcggtggaggtgaaggacaggtccagcgcgccggcgccggcgtcggcgagggagggagggaagtggggcaaaatgtcggaggagagcggggacggcggggcgtggtcgagtacgtccattggcggcggcggcggcggcgctgcttgcatggcacggcgagagggaagatgaaggaaggagaggaatggaaagcctgggtgggacgcggggtgggggtggggttataaagacgtcgtggagagagatgcgggcggaagcggagaaggaagcgggagatcaacggtcgcgactagggtcagattccatatggtttctgtaatcaatggactgatcagatttgctacaggtgattttctgaaatctcagccacctgatcagggcaatccaacggtcagatttccttcgtcagactcaccttgggtgggtgaagagggagaaaggcagtggggacacatcgggtgtgtggttcgcagccaaacattggcacgtctaacacagaaaaggagattagtacatgattaattaattattagtttaaaaatttaaaaatagattaatatgatttttaaagtaacttttctatagaaaatttttacaaatcacacaccgttttgcagtttaggaagtatgtagtaaacgagagattgggggttaggaacttgaaatgaagaatgcagcccctaaaacacttgaaattgttatctttactaaggaaccatacacaccgtagcgcccgttccgtcgtggcgcctagtgggaaaactatctcttaaaaatcctaaatgcaaaaattgtttctttatttgttgtccagtgtccgcgccattccagatctcaaatccccaatccatcgtcgaatccaaaccctaatctcaaatctgtcccaaatcaaatcctctcgaaaagtctattttgcctccctcgagtttgtgggccgatctcttctccccggcccatttcctctcagcccatcttttctctcccctccatcctcgcccgcacgtgcgaggcacgtgcgccgctcgggcactgagcgagagagagagctcgctctatctttttttcctccatctctctctgctctcgctccctctcgttgtctctcctgccgacgccgcccaaatcgccgtgccgttgcttcccgcacgcgcgtgcgcaccgtggtggccgaccggccaatcgccgacgccgtcagcacctgccgcgcctgagcccgcgtctgccgccctgtagccgcgcccttccaaaccgccccgccgtcatcgccgtcgtcatcgacctggccccgccactccgcgtgcatgcttccaaggaatggaggcagagctcctccttcatctgcctcatcgccctctctccctctttcttttcccaaagaggcaaggggcaagccccttttcttccttcc

SEQ ID NO: 8213 - DNA, 16772 bp, Oryza sativa
cgcgtgggcgcgtaaataggagggagggggggaagagagccatgggggagggttcggagaggcctcgctcctcccgcgccgcgcgtgcgcgaaaccctagctttgaggtggaggtggtggtggaggaggaggaggaggatgaggaggaagcggctgtggctgcggctaggcgtgtcaagagggaggtcgcggatgacctgaacggggagcccgcggaggaggaggatgacgacgaggaggaggtggtggtggaggaggacgaggaggtggttgtcgcctccgacgaggagggcggcgacggggaggcggacggcggcggcgaagtggctgtggccttcgagccgcgcacgctggaggaggccctcgttccgcgcgtgggtgcggtgttcgactctgtggacgaggccttctcgctctacaagacctacgcctaccgcacaggcttccacgcggtgcgccggacctgccacaactacgaggggctccgctaccgctctacctttacctgcactcatggtggcaaggcccgggctgacgccagcccgtctgatggctcaggcgcccgctacccactccgcagcagcaagcgtgcggccaacgcccaggagaagagggctcgtcgcggtgcggctgagaagacaggatgcaaggcgatgttgatcatccgtgacaggcgggcggatgataagtggaaggtggagttcgttgagttggagcataaccatccgtgtacacctgacatggtgaggttcttgaaggcttacagggaaatgcctgactcagctaagaagaaggccaagatttctgatgagatggatgatagggtggagaaatcgctgagcgagattgctgagaccaggaagttcccaactcggcccaagcggagtgttggtggtggagcctctgttggtgggttcaggtttagtagaagcgacagttttgtgcagcggtttggggatgatgaccttattgcactgaagaagtttattgaggcgatgcagcgcaagaagccaaactttatccactactgggatcttgatcaggaaactcatgtgaagaattttttctggactgactcgaggtcccaggcacaataccgttattttggtgacgtcattacacttgacgtgatgtatttacagcattcgcgtgctagccttccattggccacaatccttggggtgaacaaccatggtcaccttgttctgcttggttgtggtctgctttgcagtgacaagaaggaaaactatgtttggctgttgaagaggtggttgggctgtatgaatggcaagccaccagaggcgatcacaaccacctattcagatgccgttgcagaagctgtggctgaggtgttgccaaatgcgaggcaccgtttctgtttttggcatatcttgaaaaaactccaagagaatgtcggacgcacaaatgagaaagaggcaatttccttgagattcaaggaggttgtttatgacacagtcacacttacagactttgagagagagtgggggcccatggttgagcagtacaagctcaaagacaatgactggttctctgctttgtacagctgccggaaacaatgggcacctggttatgtcaaccattcattttgggctggcacttctgctattaggaaggtcgagaaaccagatccatactttgatggcgtggtgacaactaaaactaccctaccagttttccttgagcaatacgagactactctgagagggaagctggaaagggaggcatatgatgatttgcgctcctattactctaggctcacttcgctgtcgggattaccctttgaggaacaactcatggagctctacacagtacctatgttccaagcattccaagacgagatcaaacaattaatacacgtgatttgtaaagaggtagacaggagtggaaattcaattacctacatggctagtgagttgatacagggaaagaaggtcaactatacagttgtctacaacagtgctgacaaggatgtctggtgcatttgtcgctcctttccgtcacgaggcatcctttgcagccatgctctctccgttcttaagcaagagaatgtgttaatgctgccatcaaagtatatcctcaatcgttggagaaaggattttagagtacttcatgcaactgcaagttccagttctatatcatctgatagagatttgagcattttcaatgatctctatgtccgtggccacgagtatttagaagatgtcattgacattggagccagagaacctgagctcaaagagtttgtgttgacagttatgaaggaagcgaaggacaaactagttaggcctgaccatattcatcaagctgatcagcgggttgatgtaaatatgtcagtgactggccaagtgtccgcagatagaggagtagatgtgaacatttcatcaaatagcacatccctgattcagggagacagaagggttgatacaaatgtgacctcaaacaccacagccatggttcatggtcatggggattccatgacatcaaacaccacagctatgattcgtggggatagaagagttgagatgaagatcccaacgccccaccttattcatggagacggaagaattgacatgaacatggcatcccctctcttgatgcagagggacagaagagttgacatgaacatggcctccccacacatgatacagggggacagaagagttgatatgaacttggcatcaccacactttatacaaagcgacagaagggttgatatgaacctggcatcttcgcatctgatacaaggggacagaagagttgatatgaatatgacatcccctcacttgatacaaggtgacaccagagtggatatgaatatggtatctactgctcagaatggaatgcactcttttgatttggtgaatgtgaacctagaaagtggtcctttgccaatggctgcaactgatttcatgcaaatgcatcagcacccacccgtttaccatccaaaacaactcctcaatatgagagatcaggtgatggacacaaataagaggcccaatatggaaacaaacacatactttatgggaggtggaatgcatgtgggatagtttcttgtctagagacccactatgtaatcttttctgtttggaaaggagatgcctttccttattttatattgatatgtatgttcctacagcaggcagcaactaatcaattaggttgtagtaattgcagattaatcttgcagtgctggtagctttgttgttgtatccttctctgttcggcagctgtagcaattacttgctattgtcttgtacataagatagtagaatgcaacaaccttttcttgtcacccggtacatcaaaagtgtgatatctctagcttcacaggttagctgatgcatgttcatgagtgttgactgatgtttggtttacacctgtcgtacatctttgtgtcttgtcatatggtttagatgcactagtactttagtgtgaagggcgctttttttagcggctcacttattggtaggtcaaatgccgtttcatgtttaaaactcattttgatgatgacgcaacttggtcatatgtgtttgcaaggtagaagtatattataagttagcagaggcaccttgcttttgttcggtcaacaaagggtattggttgtaggactcctagctgatgctaaagggaacaagttaatttattgtttatagacaatgttagatgtatcttttttgtagatatatgcttcacatcctcacctttcagtgaacacaggtcttgttattgcttgtgcagttgtgctggctgctagcttcctattttacacatgcctaaaagctaacattgcagatcaatggtcattgaacactaacgttatccttggcttctccgtagctactattattagcaacttctgtgtccaaaccaaccagttcttagaacattgcaatctggaaagtgatgaaagatggatcattctggtcctgcagggaaccaaagaaagtcacctttacaggctgaagcaagtgtttcacaataaacaataatgctgcaaacatcacggggtacgaaagttttcgactttcagcaaagtgcattcttcagctgttcacacaaggggtcaaggggtatatctattcaatgagtaaaaacttttgcattttgttatttatgcagcaacagaacagcaatcttatggacttccttaaggtggcgctgcgtgcaagatacctctgttcagacttcaagagtttcagatgcttttcttcacacaagtgcatcagagtttcaggtgcatttctagatagcaaacttacaattcaacagatgaaggtgtgctttatatttgattgaaatacaaagtatatctcaaaagaattacaaaagattcattgccttgtacaattgtagagattcaccatgttaacaagtacaactcaatctaaacgtacgatctaacagcttgcaaggctccaaagcaatttggtattatttattccttttccacctgcatttgggaacatttattccttgttggttgttgcctgctttctacacagaaggttttcttgcttcaccccctcaaactacttttgtttcctactaacgagcactatcaaacctgtcaggagcatgcagcttccaccactagactttttgtgaccccactgcatggatctccaaagttattcgatgacactggaacactgcaattggtcattccaacacaggcctgcagagttcaacgagtaagaaaaacaccactggcattgaagcatgacaagtatggaagaggataagctcagattacctcttgaacaactgcaagagcctgagagctgctgcattcaccatggttgtagttcccacaggtgccactcggtgtcccaaagcttgcaaacttgatgttgctgatgacctgaccttctctagggcactccaggcgaagtgctggtccctgcgtctgagacgtctgttggggagagatccagctatcgatttgggctggatgcatctctgaaacatgtgcacatatactacttgtctgccttgttgtgaaggatatcatgcttggatcaccaccaaactgctcaaagaggactagatcattgctaccaggttggagaaatgacctgggcacgtggtacctgtttaacaaggtaaggcattcaatcagtcagcataatggatttcatggtgaccatagatacaattttgagagtgtgccttcatattttgtagtatattaaatacatcaatgcttagtaagtgctgaaatataagtgaattttcatgcacagctaaatgatattatcactaaaaagttttcatattggaacatgagaataaattggagctggctctgcattaggaaacagattgtagatatgaaaaaaaactgaagatcatattctcgtgccactgagctttagcagaactcttacagagtttgtgatggctgcccacatttctttaggcacttgttcgaactataagctcctctgtagttgcatgagtttacacagccactttgtggagccaaatttgttggccagtagcgaccaatgctctggccattcacccatgcctcccctttccccattcctgtgaagtctatggcaacagggtcatcacctgcaggagccgtaaacttggtctgcaattggagcatttcatttagcaactttgcacattatcccaaggtaataattgaacaaaaaggattgatcaaacaatggagtgtatagatatagcttattgagcccaaagccattttacatgtacacaaacgtcaaacacagcttaattactgggtcagaggatcatactgaccttgtaccatatcaatggttggttggtcgggtatgcgttgtctgaaacccattctggtgaggcttctgaaggattatacagatgcaagtcttctcctctgagtccaatctgaagcggtgaaaattatgatgagggaaaacaaaccatgttatgtttacggttgacctactgtaccgaaggcattctcaaaacagcattagccaatagtttccttacaaaaaaaatctgaaacagtatatgaatagatagtagaatacctggtatgtccaatctgtagaagatagattaagggcaccatttggtccactcaactttactggaccagtgactccagcgccaaccaggtcaaagaatgcaccataattctgatgttacagaatacatagttgtttattaaatagaaagaagtaaaataggatattagttttggtgcatctcttctagagtaagtgaagaataaattaccgatagcccaactgttgtgctcagaagatctattttgttcttcccaggtacaagtgtaactggtgtctgcaatgagatgagcgagctgctagcactgcccttagcacttcctggcatgtgtcaacaattacatttcagcacacaaatactacttgtgcgtgtaagaccaatgttcataattaacatcacaattcgaatgtcatttgaaaggtctttgcattgtgacctcaagctttacctgctagtttgccattgatgtagatctgaagaacatgtccaagtgagttgacaagcagattggactggctgccgtttagatatggttcatcacctttgacaacgatgctgcagaaagcacgattaattgaaactggtgagtaaccttgtgactgccagttttcttatatatatatataggagtatatggacaattacacctgaggcgtgtgagtgcgaaccctgtaccttgttgagtaccacaggaaatcactggcatcggctgtggtgtttatctgctccatcagtccaggtttcgtcaaggcgttctcctttgtaataccaacaggctctatggcataactccagccagctgtagcaagttccggtgtgattaatgaatcatcagtatcttggatacttgatcccaggcttctcatttctgaagttgttacctgagaattgatctgcaagggggcaaccacatccacatgcatcagaatcagttctcaccaatgttctttctcaaatgcagatcattgtctagcaaagtgagggcaaggaatgcacatacctgggctgtgttcaataccacatttttgcagtcaggaaggatgcttacagaccaggcagggagcttatacgtgtttccgttgaatttgacagttttatcagactgagcatccacgttggcaaggaatgctgcgcatattgaattgtcagcagtctgatatacggttgcctgaagccagaagagtacaaacacccatcatcatgtgtaccggaacagatcatcaaggtaaacaaatattttatctctgaacaagattagctatacatctctagctgctccagcaattttgattgactcatctttctttttcgttaattaatacacgggttagtcacttttcgaaagagaggatcacatacctcagtattttgacccaaagaactatatgatggctcagctgctatgagtgctggttcgcacagctttattgccttgtgcacatcccttaagtggccccactttggctgcctgaccatccctgaaccacaatattgcaaaagatagtgattcggttagtgagatgtgtggttgtaccggtacacccccaacacataggggagccgtttgggctcaatttttttggttcatatctttcttataaaagacacacggttcctcatggatattcatgttctttttttaactgtgactagtcaatactagtattcccagacggcaaacatacttcaatttaacatagctgccattgacaggcatacatgtggcagtaaataagtacagctagctgctgacagtacactcaccatactcatcaataggagcatcgtagtcgtagctcgtggcgatgaatggccctcccgtgcttcgtccgaagttggtccccccgtggtactgcaagccaacaaaaaaccagtgttagaatcgcagagcgcctctgtttacccaagcgaattggcaaaacggcggtaaaaaaggaaaacaaaaaagaaaacgtctcgtcttcgcgcgcgagctgcttaccatgtaatagttctggaacgtgccgccgcgctggtagaatcgcgcgacggcgaaggcgaggtcctcggccggccggtacggcacggcgccgccgaaggagaggaaccacccgctccagttctccgtccacatcttgggcttgctcttggagttcggcgtgaactggtcgcagtagaacccgttgcacgtgttgatctgcatgcgcaagcacggagaaacggtgccacgtcacttcagtgtcgccgtgtcggtggttcgttcacggcaccggtgatcgatggcgattggcgaagcagggggaagaaagacttacgagggggtcgggggcgtcggactgctggcacatgacccacggcacgccggtgtcgagggagacggccatcccggcggcccaccgcatgtaggccttcccggcggcgccgtacgccgagtcgatgttgccgtactcgttctcgatctgcgacaggatgatcggcccgccctgcgacgcgtacagccccgcgcccttcatcgtgtccaccaccttctccgtgaaccgctgcatctccgccttgaacgcctcgttgtccgtccggaacttgatccccggcacgaagtgcagccataccggaaaccctctgcagtaatacttgcgtttcttaccaatctatcgatcaattcgcccagcgatagccagtgcgagagcatgagagagatgtgaatgcgaacccgtagttccactcggcgcagacgtacggcccgatcctgaggtgcacgtagaggccggcgtcggcgacggccttcacgaacctgacgaggtccttcctgccctcgaagtcgtactgttctttttttttcgttgcaaattcatttgagtcagtcagttagttgatcgttaaacgtccgtgtagcagaagcggagtagtgtgataatgccgctttagaatttccagataatgatattactaatactagtagcagtagcagttcacggggagaaaatggggagaaaattgtaatattgggattgcaaacatagaggcttcgctgttttgacactctgagtgaatgacaaatgggtccatctgtatctataaaatgtggatccaatgtcattatagtaaaggttaatgtttacaccgttgtaattgtaaatcaccagttcacgggaggcagaaagcctagaagtgagtgagagaataaagcatagggtgcagaggaagcaaacaccgccctttgacacatgacggccaggagggagaggagatgatgacggaaaaaaaaaggagagaaaagatatacacaggtcattaatttgataatttcattgtggtacactattaatggagaatactactactactagtagtggtactaagtagcagttgagagaggagtacgtgcctgtccccggacggcctcgtgaatgtcccagaagacgtacgtctcgatgacgtccaggccgccgtccttggacttctggatcagccccggccacatctgcaaccggcgaccgccaccgccgccgccgccatggcaacataatgtcagcttttgtaactagcaatctgtctgctcatcaagaacagaggaggccgaacgagcggtgcatggggcaaaagagagaaaggcaagagacggcgacgtacgtcgggggtgctccgcgggtagtggatggacccggagacgagcacgcgtcgcacgccgtcgatgaccaccgcgcggtggtcgtacgtcacgttcgccgcccgcgacgcgccgacgaggaggcttaccaccaccaccacggggaggagcagcagccgcagcagcacacccaccgtggctgccgccattactgccgccgccgccccgttcggtgtcgttctattatcaccggcgctagtgcggacgatgacgaggagcagcaggaggaaggaagaacagagttgctcggtgggagaggcaaaagaaaagaagaagaagaagaagaagaagaagaagaagaagaagaggagttgctggttggagtggcgcggcgggacggaaataaatggcacgcactcagcggcagcgacgaggctcgctagcggagcagcgggagcgaaagcggctgtgtctctttcccgcggatgcgggtggtggtgcatctgctgtgctgtgctgcctccctccgcggctaataaaaaagcgctgatcgttcgcccgcgcggcgagcgatggggtgggtgggtgtggagttgagttcgcggctgcttgcaagcaacggcaaaagccccggcgccgtgcgtctagcggtaggatcgaattgatggatggatcgagcaaaacataattactgctcggcttggctagttaatggaggcgtactacgtgatggttcggtggcgcacacggcgtgggtggggggggggggggggtgagcaaacgccacggccacgccatgccgcatctgatctctctcccgtccacccttttgcttccgctgctgcatgtgcccttggcattggccgcacgggctcacagctaggacggaccagtaaacaaaaggtgccggtgtgaccgaccgacagacacggcatggcaggggtcgtgcccgacccgacccgccgttcattgccgctcgatttctttatcagtgatgctagtactactagcactgcgtctgctcgggccaagagctaagcggcccttgtcgcttccggtctcgctcgcctatagtacctccgtcccaaaataagtgcagctgtggatatctgtgttcaatgtttgaccgtccgtcttatttgaaaattttatgaaaaaaataaaaatatttagtcacacataaagtactattcatattttatcatctaatagcaatagaaatgctaatcataagaaaatttcaaataagaagaacggtcaaacgttaaacgtgaatagtgtaaaactacacttattttagtacggagggaatagctacttcgaccgtgatggcgtatgatatgctgcactagcacacggttgccactaccaatctagcagtagatagtggtagtgtcatggactgtactccctccatcctataaaaaagtaaaacctgagttttcgtttccaattttgactgtacgttttatatgaaatttttttataattcgtattttcattgttgttaattgataaaacatgattaatattttatgtgtgacttgtctttttaatttttttcataatttttttaaataagacggacggtcaaacgttggacacggaaaccaaggtttatctttttttttttgaacggagggagtacgtctgtactgctcgtcttctttttgtttgggggaggtttgaaaaaaacggtggcggtggtcagaccgtgaaaaaaaggctaagcatttctccctctttctttcatcctttggggcggtggaaaatgatggtgcgcggcgacgacaaaaatcgtgcgaaagcgggagagcgagttgtctctgcagtctgcactgacctgtggcgtcggttcatggggaggggaaaggggctcgggtcggactcgtccacaggggagcaagtgaaaggacatggaaaattgtatgcaaagctttactgctgatgcaagagagtgacttttatatattgtgtttgtttgccatttttcgtgttacaagcttacaaggcttgtactacgaaagcttacaagctttcgtgtttgccattttatcttatcaagattcaataaggtaggggtaacaaactaaacggcctccgtatccaaccaaaatttagcatggttaaatttgatatcaaaccaaactgctctacatatggaatttgtaccaaagcattacgctcaactctacaaaatctaccaaagatacacgcgccctttttgtttgaagaaaaagctaatagagctaaccaagtttttgtggcatgagaaccacgtgaggcaactgctacactcaagtacttggatttctaagaggtagatatttcttttttggctactgaagaaactgactgcataatctttctctggatgctcgaatataatgtagttcaatgtgaaatcgacatggcacacgccattgttaacctagttgggtgacccacctgattgcattcacagcatatttgcccgggctatgcaattagtactcttcacaagtcacaagcatatataaagacctatggtagtgcagaagcctattgtttggactgtcataagctgggatgtttggaacgctgtaaaattcccgtacgaagaacggttttctagtaaaaacttttgctgaagataagccaaattaactgaagataagcaagcagtcactagcttgatattgtagagtcaaacctcaccatttatcgatcagtggcgcgtctaattgccgtctatcacattgactagcgtctgaaattagaacacatagtaaccacaaaaccgagaatggcgatgccgaatcctgaacctaacccactacagaggctcctgaatcgaattgaacatctggttcttctccagagcaggtgctcggcttaggtgtggctcagctcaagtcaatcgtatttggtgctgatttgctacttacagtgggcaaaccacacatcttgcacgtcaatgtagaaggcgaccatttctcgattcacttttagtagtaacgaaattacctacgccaccttgacaatctttaaaccctttttttttgacacagatgtaccatagtgtcctgtcatctgttaacacaaggaaaatccagaagtgtcatccgaatgctgtgcaagaaaggaggcacatggattcaaaagaacaaatccatattttctgaaaattgttgactaccaaaaacaaaatcttgtgctgctccattcgccacctcaaccattccaatacataaaaaaccggataagaggggagcgaaaatgagaagtgaaacgggtgaagcagagcgtccagggcttcttcatcatcatcatcatcagagcgtccaggcctttaattgaactcgcagtcgggaggctgcaggtgcggcgtcactgttgccgcggttcgttgcggcatccttgtagcaatagcagcacatcggcgcgagatcgctctacgtctcgacgtgcgaatctgatgtaactctcctcgtcctttgcggcggattcgtccgggctctccgtgcgtaggtgtgctaccggcgcgcgcgtgcggcaccaccggcactgccactgccaccaatgcgcgagaacgtaacaaaacgggcaaacggcgccttccttctccactcgattccttgtcgtcatctcgcgtcggggtttttggagcagcgtgcgggagagccggccgggccggtcacgccgatgtggatgtgggcgatgtgcacgctgcgtttgtgtgccgaaacgagagaatttttcgccgatcgatgtgtccaagacttcccagtgtaatgggaactcatcggattattctttttgattcttggttaccttaactttccttttctttgctcggtggtgttcctctctcgttaataagatatatacttttcaaactataaaacggcgtgtttcttaaaaaacaatttatataaaagttgcattaaaatattaaataaacctatttttcaaatttatattaattaaaaaaataattaatcacatgttaataactttttcgttttgcgtaccctaccttcgtcttcatcttcactatattctaagatgtttttttttaaatctatctggtatggggtttggggcgtacaaggtgagccaagtgatgccattgatgaggagagttttgcttggaagagtcagcaaagaactgggagagttcaccggcttgaagcctccattttctgcacggatgcgattgcagcgtagatgatgccgcggcaagcaaggagaaagatgagctcggcgagggggagagtgacacgctgacagggatactacggagcagataagatgcacggagcaccgctgccgtgcaacacggcagcgtcgtcgaagagcggcacggcacggcacgtctcaggatactactagtaataacttcgaggcagcgcgacaggagcagactacgtgaaacgatcgccagcgcagcttctggcacgagagagtttctcagcgagatcgacaaggacaatgatgaattaatcgatgaaatctaccgtacaacacaaggcaaaaaaatgggagaggcaggcagccaggcagggcctgatccaaggtgcactggcactaaaaatctgaaacatgttctggaaatggaatgccgaaaggcgaaagggccaaaggctattatcgctggatgtcgtaacattatcttgtcaagatccatctgataggagaatggtcatagcagcaaaggacggggccaaatcattgaacgcgacagctttgatgaccatgtaatgtagcagaagggatcagtacggtatctgaagccaaaagaaacggagagaaataaaggagaaaaaaggattagatctgacgtcctgcgttttgcacgttcacgtactagctccccttgcgcaattatgcaagttacctgcagttatggagtgcacacaaccgcgcttcagatgtacagctagtataataacatcaagcatcaccagagaatcaatcaacctgatacaggtgaacaataataatatcacgcggttgcaggataagatttgtgtaagatgctaatctgtcatcgacgaagtgatggagatttgagaggacaatggcggcaacccacctagcggcgagtcaacccagaacaaaggactaaaacagaaaggaaaaaggaaccaacaattttgctaatttcatggaaaataaattagccaatggtttaaaacaaggcagacgagagttgagagttgtccatactctttgtacttttctaattacataaagagttgttcatacaccctttttttttaagatagtgaatagaaatcccgtctctatatctatcaacggatagatatataaccaaatatgtatcacgtacttttgtgtccgttttaacacacgcttaaggttacacccaccaagatttaaacaccattaattacactgccacaccaaatatcctttccaatcctcttctcttcttttcttttggataccttagtttgaccataattagtgggtaggtgagaaaagttgctgataactgataagcgtagccactatgcattagctactctatcctctagggtgctctcaaaagatatgtgaaggtttgaggccatccttccgtgtcagttgacgccttgccaaatccaccacaaaaggctagtgcatcaacatcatcaccattcatcacatgaggacatactacacatgcaacaagcctgcccgacacaggaaccctttagattattagcaattgtgaagcaatgtggagatcggatcaagtgatttactaatctactagcaaggcccccccaccaacaggaatgtcactaacctatcaatgtgatgactgttcctctgaattcttcctgccaatgcattgctggcttttgggtcacggattcacagctctggagtctggagctgcaacagctgacgacgaaacgacaaagcaggcacaacaactcagagctgccaagatctgatcagagcaggcataacaacctaagatactccttcagttccggtcttgcaagctcaatcattactgttgagaagccgcactccaggaaaatgattgaaataaaatccaaaaagacgattactggattgaacttagtctcacattttaatccacataaatgttacttcctccgtttcatattataagattttctagcattgcccacattcatatatatgtaaatgaatctagacagcatttatatgaatgtgggtaatgctagaaagtcttataacatgaaacggaggtagtatctcatattatctatctcaaaaccaactgtatttaatacagcattgagaatatctagaggaggtatcaaactctctcaagggccagggcaaaaaaatgttctacacctcacactacaaccttatattaactattagcaacccagcaaaggactacatttccacttctgaaaaaaactctgaaaaaaggaagatgccgatggattgtacaagctattataagtgggaatcattttgattgttgaaagactagtggctaacaagaaaatgacaacatggagatttcctacttcaggaaggccgatgatacaaaaaggagtgcataagtaacacatgcagtgctcacttccaagtttcttggaccaggcagtataggcggaattacagaaaccatcaagaatgtggcaaggaaccaggaagcaaagaaggatccgaacctgaaaaatcagacaaacttagcatcaggaattgaccacacctatgcatagccagagactatatccttttgcctattacacaaattatacatgaaaggttgacaacacattaaagtcacctaaatgataaacttcaaatcatccaatccttaataaatgaatcctatgaaagcaagtttaaagtgttactagtattgacatgtctattacacacaactgcagtatgccatcacaaaacaactactctctgatccatcacgaattcatgatagttgcctcaaaatatagaacttttgtagaataaacaagattcacacattttgcaccattcccattgaagaaaagttctaaaaaagcaatgagattgacatgccataataggtggcgcctaggttgcacttgcacataataagaacaatgagattgatagaagaatgaataggcatagagtgaaatacgtg

SEQ ID NO: 8214 - DNA, 6897 bp, Oryza sativa
tcgtgttctcgcgcgccgacgccctggagagcgagagctactgacttccgcctctgcgaggtcggcgcgcgcggcgtggatcggaggccggccgattcgagcccgccgaggtcgcgtcggtcgacggcgccacgtactgcgccgccgtggacggcgggccgatcatgggcagccccgccgccgccgcaatcacgcacgtgcttcacaacaagcacgagttcccgttcgtgcgcggcgtcgaggacctcctcgtgctctccatcgggggatgctccgccggtggcacgggggccgcggccgacgccgacctccgacgcttgcgccgctggggtcccaaggattgggcgcgccccatcgcgcgcatcgccgccgacggcgccgccgacctcgtcgaccacgccgtggcgcgcgccttcgggcagtgccgctcgtccaactacctgcgcattcaggtgagcaaattctcccactgcattgcgcatttcgaacgaacgttccctcggattaaccctggtacaaattctccgccatgatcaggcgaaacgggagagcatgccgccgtgcgggccggacggggagtacgacccaaccccggcgaacgtgcacgcgctgctcgcggcggcggacgagatgctgaagcaccggaacgtggagtcggtgctgttcgaagggaggcgtgtcggcgagcagacgaacgcggagaggctggactgcttcgccgccgagctcgtcgccgagcatcgcagcaggggctcccgtattggccccaccgtggcgttcaagcaggcgccgcggaagcagccgccggcggcggcggtggcggcgatgggctgagccggtggccgcgtgcactgtggagtaaggacatgtaggccctctctttcttcttgctttcgctggaatcctgctgcattttttacgtggcagagtggcattgctccaagaagcattttgccaatgggaaattcgacttggagaaaatatgaaagaacatctgtgatatataatttcagcttcatttcaatttagcatagaattgtactagtatcatctttcttcagaatcatatgcttctttgttttctcttcacatactttgatgttggtgttcagtattaatcttctttggtaagtggatgcaacggcgatatctgatggtgatcttcagaagatcaattttcatgggtctacctaccaagtggtcagtggtgtggtgtactgaatatctgaatgcatttccagttcaaagtacttctcatttccagtactgaatatctgaatatctttgtcatttccactacctttgcttgatgactagatgacccatcaaccatgtcaactcttgcttctgctacttgcatatacttccatttgagcattcatcagttcctacagacatctggatgaacctacctaatacctgcaattatgtctgggaacctcttcttcttgttcatgaaaaaactaaacacggtcatgaacattaacgttcagcatttcagccatgttgctgcactgtattttcttcagaagcaaccctatgcaaacaaaaaagggaagacatatttcagatctttgtctgcgataagaaaaaggagagaactgtacatgcatgtcccatcgccatcctgatcctgatcacaacgtacaccgtgttgtttaaagcgtctaaagattcctccaagtacactaaatcaagtaacctttgtttttacagcaacaaacacacacaactcttcactcttcagctcttctcaaaccgtcggcagccacatagaaacaattaagcaaacctttcatgacaataatgagctttgtcactttgagctgtttcttcggcttagctcagttgcatagtcgcgctactgtttgtgcaacgccccattagctgacacgcgtggtcgctgtcactaagctctcgcagcacttgttgattgcaacgcccatgatctgattggaggccacatctcggctgttcttggatgttgtaatcatctttcttgtcgaagcaggtttggttctggttttggttttggttttgggtttggtttggtttggttttggtttggagatgaacacgtcgtgtttggagaccgtgatgggaatcgggcggtggctgccccatgattgctggttgttgggtttgggagtttgcagcatatttcgctgtccgaagagaggatcacatcaaacgccaagatgccggaatagggcgcccgtccgtaactttgtcaaccgacagagatcattagtgccactcggttgttagttgttacagcaccctgctactaaccctgaacctttgcccctccttttttttcagtcttcttatctcctcgttctgaattcatgtcaaaaacagataaaagaagagtgattcatcacagccgttaatacttaataggtatatatactcctactagaatttgcgttcgacgtactgtctggaatgcaaggattggtcgtcaaaaactgcaacccggaaacgtcgtaccggtgcagatttgaggttgtggagacggaacagtggaggtttagtggtacaccgatcagtggcagtagtaattgaggttttgcacggtgtttggtgcaccgcctttgttggatcaggtcgtattttttggtgttatcgcccggaggcggcagcgggaggagcacggcatgcaacgcacggagctactaccgctcgcgaccgagcggggcatggcatcgctgttgctgtcgctgaacaccacgtcgcgatcacatctcctccctccgttgctcgtcccgaggggcggatctaacatgaagacgaaaaggctcaaaccctcattaccgcggaattatgaaaacagactctcctttaaaattctttttgccaaactaaaaggggttaaagttctactatttctttctgtatgcgtcagtgctcaccatcactttcgcgtcggcgtcaaggtgttacagcttgggtgaaatgcccgacacaacacaaccaacaaccacttcatgatccttcactatatagcgtctctgttattagctggatctgaaaaaatgctgaacttttttcggtttcgataacttttatttttaagaactagggctgggaagcaggtttcgataacttttgtcatattatatcattcttgttatgaaatgagggtttttattaggtgcgtttagttagtagcagccacatttttatcacggttgattcggacatcattcaccttttgagcttgtttagttccaaattttgattcggacatcattcaccttttgagcttgtttagttccaaatttttttttcaaacttttaactttttcatcacatcaaaactttactatacacataaattttcaacttttccatcacatcgttttaatttcaatcaaattttcaattttggcgtgaactaagggtgtgtttagttggggaaaatgaaattttttgtgtcacatcggacgtttgaccggatgtcggaaggggttttcagacacgaatgaaaaaactaatttcagaactcgcctgaaaaccgcgagactaatcttttgagactaattaagccgtcattagcacatgtgggttactgtagcacttatggctaatcacggactaattaggcttaaaagattcgtctcgcgatttcccccataactatgcaattagtttttctttttatctatatttaatgcttcatgcatgtgtctaaagatttgatgtgatgtttttgggaaaaaaatttggggaactaaacgggccctaaacacacccttcggctgtgtttagttcctgaaaaaagttagaagtttgaaaaaagttgaaagtttatatgtgtagaaaagttttagatgtgatgtaatgtgatgaaaagttggaagttgggggtagttagggtgaattaaacacggtctttgtagacttgtttgactgtacctctgtggctaaactttgaaatgatctgcagagttgtaccgatacggatatagtactagttttttttttcctactaaatataggcctgattctactccatatccaaatgccatagagtagcagtttagcacgttgtgccgcgtgggttccatttcgctatgctccatatatccataatatggttgtgtttggatccaaacttcagttcttttctatcacattaatctgttatacacacaactttgcagtcacatcatatccaatttcaaccaaaatttaaactttacgctgaactaaacgcagcctatatccacagaggcattctctccctcacggttaaacatgaactccaccgggtaaattcacctttgcttgagatttgacaggtcaaagtgcacgtttcagaaccgaccgtttggtcgttagtactggcacggataggttatctggttccccttaatctgcgccctgcttttcccaaatttttgtgctctctttgcatcgaaagacgagaaatgctgtcccagcaaacaatgacaattctttcccgcgacgtgcagagcacataacaaggggttctgtgggtttgtagccagtaggttagaaaaaggctcgtggcaatatattgtctagcttgatgcataatgtcgtcttaacggactaatgtttgggctccgtaaaacacagtataaattttacagaattttcatagaattttgtttaattcctccaagagcccttcaaaattgcacctagtatgttgtatgctgaaactttttttttcatggctcctggggcaattcaatttcaatccaatcaaattgctacaaaacttttaccacgtttatggggtcaatcaatccaaacttcaacatcttcatatatatgtaaaccatggggcctgaaaaaaaatgcaaaatgctcgtctggcttgtcatgcagaacagagaccaaaatttgcacaaggagctttccggtatttcactgggagcaaaagaagagcccataacttttttttttagataatagatttccattaatctagcctctatatccacgaaggatatatacagccaaaatgatacaaaagtacttaggctcacacctcaacaagaagaagaacacaaccaaaaaagaaaacaaaaccaaatgacctcggcacatcctgcttctctgcatcctgccatagtctcttgaaacggccagatttgactagtggaagtctaccagtcgccttcgcccctagtgcaccgtcgatgcaaacctccattggtgcaatcttcatcaatttcaggtgagctgacgtcacacgcagcttgttagcccactctcaatcgtcgtcatttgtcgtatagtcggaactagccaaccagacacaaaccgacgggatcgactttgacctcaccgaattcctagacatccactattcaaagtgctgccgctatgctccgccgcagcccctagggccgctggtgccgataggaaccgccgctgtcctggacgaccgcagcccctagggccaccggcgccgacgatagccgccgcagcccctagggctgctagcgccaatgggagacgccgctgtcctccgccgcaacctctaaggttgttggtgccgatgggagccaccagcacagcccctagggccgccaacgccatcgggagccacccccgtcctccatcgcaacctctagtccgccgccaccacctggaaccgccgtcgccacaacccctagggccgctagtgtcgacgagagccatcaccgtcctccgcagcagcccctaaggccgcctccgccgacgggagcagtcgggccgccgccaacctccgcagtcctctgccgcccccaccgccactactacaaaagtgtattttctgtacgaggccccttgatttttgcaaacggaccataactagtggcgtctgcaaaaatcgagggtcatttttgcatgcggcccctttagtggcccgtatggaacaatcgattttcccatacgggcctcttaagacggccgcatgcaaaaatgagctcatttttgcatgcggctcacttaagcgcccgtatgggaaaatcgatttttccatacgggccacttaaggaggcatatacaaaaataaaatttaaaaaatttgaaactagtgtatctcactcatatgcactccaaattagatgattcttttttctaaatgtttctaaaatcatcctctatcatgttattgtgttcttactgctattattttggccattttttcttgtgactttattttatcaattaaaactttgaatttcaaaacttcaaataatattttgaagcagtaattgatttcagctgaaaaagtcatcaacaacaaagttgtataacacatcaagatatataacttttattttggtcatttttttcatccgacaaagatttttgtaagattgatcacaaaatgtacatctctcttatagttttataaactatatagtattttaaaatgttgtttgaagttgttataattttaaattcaaattcaaattgttcaaacaaagtcatatagaaaaatgaccaaaacaaaagttatagatcttgataagttatacaactttgttgatcacaacttttcaatttgaaatcatttattgattcaaaatattatttgaatttcttatattttaaaattcaaattttatatagctcaatcaaacttggatggagaaatgaccaaaagaaaattggtagatctcaatgatctctacaactttgtttttgacaaccttttcacattagttcatttaataccacaaaattagatttaatgttcatttttatctagaagtctgatttgcctcctctccctctccaccacttcaaaatttcagcaaccttatctccaaccttatcttctcttatctcctctccaccattacttctcctcaactccctctccccctctctttctctccccctcacacacagcaagacgggcgg

SEQ ID NO: 8215 - DNA, 29465 bp, Oryza sativa
gagagagagagagagagagagagagagtacagcgtgggtattctaaaaatgatggaaggactccaaaatggctacaacagggagacttttacgagagaaaaatgagtggaaatgagagcaatagactcagaacaaagggtggatgtaatatcatcaaaggacaggaccaccacccatctcacactagctaattaatgggcaccttaaacatatgcaatagcaaacgagcctatgagacaagatgtcacaaagtaccaattttgttgacctttggtccattctcatcatccacaccactaaggccccctttgattcaaagaaaattggccataggaatttatttaggggaaaaaccttgcgggttagctcatcttccgttaacacgatgctaccgcatagtgccatgccttcggaaattggaatgatcaaagttttcattttttttccccgattacattgaaaacgtgcgcgcgcatcaccacacacaccatactcacacttatgcgagtgtgctcaataacacacgctcaaaaacaaaaacaaaaaccaattacatattgttggcccccactatatctttttttttgttgaccggaacccactatatcttttaaaagcacaattttacgtgaacaatattcgtaggcggcatgatttaaatcttagtggatggtcatgcatctacgagaccacgaccccaccatcacaacagtacacgtgctttctccgaagttttaaagtttgctaggtgaaatgccacattactgatctggatgttgatatttgagttgaattttatgaaattcttaactgaaaagtggaaaattcttaaggaccaagtcaagttggcaactgaagtatcaatattttctatatacacttgtcctcacaaaagattaaaaactatgcgcacttcttttctagaaggttctcctagtagttcctagcttggtgtgacgtaatttctccttcaaccaatctaaccaattgaaagaaaaaacactttctccaacaccatgttttttcctctttatttatttatcacatgcccaaacaaatcatcataagaaacacactaccttaatgagaccctccctaacgacggtcctcccaccctgttgataaactaagctgtacccatctcaacccatgtacttttaaattctcctaggttaaactattctcaaggcctcaaggggtggtaggaactaggaaccggcctaactctgagttgacgcccctccaaagtccaatcaagtttccttgatcttcgccgtagccctttccatttacccttccttcatccccaagctcatctcgaaaaggaacgtacacgacggcacgggaacggatgatcatttgccgccggcacatccatcgatcgacggcgacatacaccggccccgcacactgcacacacgcgcgggggtcacacgcacaccatacacgagagctaatcttagcttagctcgctttcttctcctgtgtgtgtatctcgccgtcctcgcctttaaaagctctttagttccccgtcgcgtcagaaaggcgaggagctaagcataggtgacacgaaaaggcttttgtggttagatgtgtcatcgggacggacggacgggcgggcgggcggcttctcttgatctgatgagtgatgggctgatggcctcgtggttgggttcaccaaccgggagccaaagcggcttggggacagccggacaggcagctttcatcggacccccttgagctacagcgtactacagtgctaactgccttttggcccaggccgtggttatctgctttctgtggctgagtcacagacacccagaatttgttgtagacttgcagttccagccatgagaaatctgtcgaccagagtagtatagtacctgactggccatcgatgatagactccgaatttgtcgcagttccatcccaaaaggaacttgtgggtagtagtgtaataactgactgagtgactggtcacaaactctctgaatttccttcatttccagccaaaaaaactgttgagggctactggtaactgtctgtctgattggtcacgaccactccttttcttttgcagtttcctggcatagtgtgccatgctaaatctgttgggagagtgaaaaggattaggcaactctcactaagataagaggaggatgaggcacaaaagaagcaacgacaaaagaagcaattaaagcctacgctatggtcgactagcttcgtcgctgggcgggcaaaagaaaaaaatcctgatttgagtgtgtcgacctcgaccttccacttgcggcaattaacaattttggaaaatcattggcgccattgatgttgtccacgggagtcaccaaccctgcctgcccggcttgtcgcccgacgacgacgagaaccatctccctactcaactactctaccctatatgcctcccactgctcggcacttcggctagcccgtatcaaaatctccaaagaacatggagccaagcggcatgttaggttgtctttgccggctgtggagccgcattccccggcgagcgatacggattgagatcctctgacgtaacttcatactgacttggtgactgatatgtgggttcgagagtggtggggaactatatgccagtcacggtgaacagtaacgtcagatgatcctcttccatacggtagacatgggccatcagtggccagagtgtagactagagactgtgcaggtcggtgacctgaatatagttcactttaggtctctgtatttgtcgtgaagtctgatttttgtccctgaaccgcaaaaccaggtacgacccatcccccaacttacgaaaaccgggcaaacgagtccctacgtggctaatttgactcggtcttcatctgacgtggtgcttacgtggcaatttgatcaaagaaaaataataaaccctgtgggacccacatgtcagtttcacacataaattaataaagaaaatggtgggacccacgtgggccccacatgtcatcctcacaccttcccttcttcctcctctctcccctttcttcatctctctcccctttcctctctcaggcgcgatggagagaggcggcacgcggcggcgccgacaggagagggagaggcgcacgcccttcgccgcaaccagcctccaccaccgtcgcctccttacgctcgtcgacactgccggcagcagcggagcggtgcgcggatctggagaaagagggaggggagagaggagaatatacctcgctgtcgcccctctcttcttcactgtcaccaagctcgtcagcggccgcccgccggagcgaggagcttccccttcttccacccggacggcaccatcacgcgcccctttgtccccgacgcgtcgccgtgctctggctccccgatgcgctgccgtgctctggctccccgacacaccgccgtgctctggctccccgacgcgccgccgtgctctggctccgtcgtgctctggctctgcgacgcggcggcgggggacccatggatcgccgtgccggcgaggaaggtcgcgggtgcgggggccgtcgccgccgggtgcccggcccgctcctccccgccccactctggcggcctccgctccttgcccgccacaattaggccgccgccgctccttccccgccccactccggtcgccgccactcctccccgtcgctccgctggagagaagagggagagagatgggataaagagaagggatagtgaggatgataggtggggtccacgtgggccccaccattttttctattattgtgtgtgtgaactgatatgtgggccccatatgttttaatatttttcggatcgaatttccacgtcaatgccacgtcagatgaagaccgagtcaaattagccacgtaagcgccacctcagccaaaaacggggtcaaatactgccgatggaccttatttaaacggtttcgtaagttgggggacctgttgtacccggttttgctatcaagggacgaaaatcaaactgggcgacaaatagagagacccaaagtgaacttattcccctgaatattacacggttgctcctttgcttgctcggggcatagggctatgtgggccttccaataggccgttatatgccttaacatctcgaattgcattcgacccaggtaagatctggcctggcctggcctggtcaacaaagaactggagtaacaagggtcttgttcgtgtgcaacggcagtagttccaatcaaaaaacaacaacggcagaaacggtttcttgcgaattctgattcttggaggcttttatctgcacttctcattccgcataataaatttgacaggatatactttcctattagctcgttgggtcactccaacgtctatgttctgatcaagcagggtggtatatcatctttactataaaaacccaactcctgacattgaagtataaaaacccaacttctgacattgaagtactgaagtactccctccgttccataataaatgcaattgtgggttttagtgtctaactttaaccatccgttttatttgaaatatttttatgattggtatttttattgttattagatgataaaatatgaataatactttatacgtgacttaacttttcaaatattttcataaattttttaaataagacaaacggtcaaacgttatacatggaattatagctgcagctataatgggatggatggagtatacctatgtcccaatataaatgcagttgtgggtttccgtgtctaacgtttaaccgtccgtcttatttgaaaagaatattattagcatttttattgtaattacatgacaaaatataaatagtactttatgtgtggcttttttaaaaaaaatataattttttcaaataagatggacgatcaaatattggacacggaataccataactgcatggacgtagtatatgtctaaaggaaataattggtgcaatatctgcggctgatcaatgatagtcctcttgatcttactgaagccgataaattcaatctctcacgtcgcgtaaaaatacagtgtactcccaccatagaaaattataggacgtattttatttttaaaaaatgaagtctttaagacaagactttgattactgactgtgcataaaatttattcataatatctacaaaaccaatgtttcatgaaagctctttgaaggatgaatctattggtgtaacttttttatgcactaaatatacttataatctggctaattcttggtcaaaatttacaaagtgtaactatttcgaaatagtactagtgtgtgtccagcaacagattggaaatctacaacaaccgattggaaatgatgaccttctagccaaggaatgttactatccgtcgcttgaagggaatcatccaaatcaccatccctgggcacgaagactagacgagttggtggaagctgcagaagtaatacgccagtgcagatgtgtcgctcctgtgcctggtctggtgaagactgaagagtaggagactgcacaagtagagcggcgagcaatatattcaccatcaatctgaactctctgaaatctcccatccatttctgaacatcaatctcaagccatgcgtctgaattctgcaagctcacttctgctgcttctcaaactcagtcacctagccatcgtggccgccttggccgacggcgcggggttcaccttcaatggcttctccgccgcgaacctctccctcgacggcatggccgcggtcgcgccgggcggcctgctcatgctgaccaacggctccatggtgatgaaagggcacgcgtcctacccgactcctctgcgcttccacggctcgcgtgacgggaggagcgccgccgtgatgtccttctccacggcgttcgtcttcgccatcgttggccagtacgccgacgtgagcagccagggcatggcgttcttcatctccccgagcaagaacttatccacggccctgcctggtcacttcctgggcctcgtcaacgccggagacaatggcaacgcgagcaaccacctcttcgccgtcgagctcgacaccgtactgaacggggagttccaggacatcgacgacaaccatgtcggtgtcgacatcaacagccttacctccatcgaagccgcaaccgccggttactacgacgacgaggacatgggattgttccgcaacctgagcttgattagtcgcaaggcgatgcaagtgtggatagactacgatggcctgaccatggagctcaacgtgaccatggctcccgttgagataaccaagcccaagaaacctctgatctccaccattgtcaatctctcagcagtggtcactgaaccggcatatgttggtttctcgtcgtcgacagggataatcttctcacaccattatgtgcttggatggagcttcaagatgaatggcacagccccacctctcaacatttccattctgccggctttgccacttatgatcagcgagcgccgatcacaggtcctagtgattgttctgcccattgtatctctggtgcttgttctagcatcagccgcaatggctattgccgtagcaaaacagcgggctaagtttgctgagttgcgtgaggattgggatgttcccttcgggacacatcgcttttcatacaaggatttgttctatgctaccgagggttttaaagagagccagttgcttgggatgggaggatttgggaaggtgtacatgggcatgcttccaaagtctaagatgatggttgcggtgaagcggatttcacatgagtcaaggcaagggatgaaagagtttgttgctgaggttgtgagccttggtcgcctaaggcatcgcaatgtcgtgcaattgctcgattattgtcgaagaaagggagagctccttctggtttatgattacatgccgatgggtagtctcgacaagtatttatatgatcaagacaaacctactctagaatgggctcgaaggcttcagataatcaaaggcgtcgcatcaggtttgttgtacctccacgaagattgggagaaagtagtcatccaccgagacatcaaagccagcaacgtactgctcgatgctgagatgaacggtcggttgggcgattttggacttgcaagattatatgaccatggtactgaaccaaacaccactcatgtagttggcacaatgggttacctagctcctgagcttggacaccgcgccaaagctacaccatatacagatgtattcgcatttggcgcattccttctcgaggttacatgtgggcgtaggcctgttgagcaggaagctcctatggtgcttgtcgattgggtgctcgactattggcgcagcggttcaatcatggaaacagttgatccaaggctcagaaatggctatgccgaggaggaggttgagcttgtgctcaagcttggcctgctttgctcgcatccactggctagtgcaaggccgagcatgcgtcaggttgtgcagtacctcaacggcgacagcgatttcccggaactgagggcagcgcaaatgggcttcagcatggcgactctgctgaagaacaaggggcttaacccagatgctatgtcatacgcaatgacatcgtcatcaagcatcggtactatgtctagtactctctcgggaggaaggtgataatatggttttgtgttgacagatgatatttactacaaatgatgtaggagtatgattgtagtagtactagtggcgctaatggaaaattgtactgtaaatctgtaatggacagcaaaattcctggtagactggattcgtggtagacatggaagttttataggagtacaaatcaagactttgctttcgcatgggaaacatccggagtctgattcttagtgtacagtgtatatctctatgaatgacaagcataatatacaatgtgttttgagttgaaaccaaggaacttgagtgaccacagatgcacagactagtaaacaaacacctccttctcaccacgcaaggttgtcgaacgagtcaaatgttgacggatcgtggccggccggcaaagcaattagaccactactccactagtaaacctatcccctagaaatttggtacccagtagtctgactatctcactactacggcatccttgtttctccctctgtcctttctagcagggtactgtttctgatgatgatgcattagtattgaattgacttggatgaagaccaagccacaaagctgcttgttcagaaacttcacccaaccactgaagacggaagtgacaaaatttgagagctctgccctggctcatgcgtcacggtagccatggtgatcatcaggcccatctccagcttccttgtactcactgtcttccactgcatcaagctggtggcgccatctgctagcgaaaaccagttcgccttcgaaggcttcgccggagcaaacctcagcctcgatggcgccgccgccgtgacgccgagtggcctgctcaagctcaccaacgacaagcacatcaaaggccacgccttctatcctactcctgtcagtttccacttgacgccgaacagcagcgctactgcatccttctctgccaccttcgtgttcgccatcgtctccgagcatgcggagctaagcgaccacggcctcgcgttcctggtcgcgcccagcaagaacctctcggccaccacaggggcgcagcacttgggtctcatgaacatcagcgacaatggcaaggcgagcaaccacgtctttgccgtcgagctcgacaccgtcctcagcccggagctccacgacatagacagcaaccatgtcggcattgacgtgaacagcctgcaattcatacagtcccacaccgccggctactatgatgacagcaccggcgcgttcatgaacttgacactgataagccgcaaggccatgcaggtgtgggtggactacaatgggcaggccatggttctgaatgtgacgctagctccattgggtgtgtccaagcccaagaaacctctgctcccaaccggcctcgacctatcgagggtagtggaggatattgcctacatcggattctcgtcggcgacaggcctctccattgcctaccattatgttcttggctggagtttcagcttgaatggagctgcccctgctctcaacccatctaagctgcctgtgttgccaaaactagagcagaggcaccatcgatctgaaattttggtggttgtgctgccgatagccacggctgctcttgtcattggattgcttcttgtggggttcatgattgtcaagagatggtttaggcatgccgagctgagagaagattggaaggttgagtttggaccacaaaggttttcttacaaagatctgttcgatgccacacaagggtttgggagcaagcgtttgcttggaattggaggattcgggagagtgtacagaggagttctctctgtatccaactctaactcagagattgcggtgaagagagtgtcacatgactctaggcaaggggtgaaggaattcattgcagaggttgtcagcatggggcgccttcggcacaagaatctagttcagctacttggctattgccgacgcaagggtgaacttctcttggtctatgaatacatgtcaaatggtagcctcgacaagcacttacatgacaagaacaatcctgttctagactggaacctaaggtttcacatcatcaaagggattgcatctggcttattgtacctccatgaggaatgggaacaagtcgttgtacatcgagacatcaaggcaaataacgtgcttctcaacaatgagatgaatggatgcttgggcgacttcggccttgcaaggttgtacgaccatggcaccaacccaaggactacacatattgtaggcacaatgggttacctatccccttagcttctccgcacagggaaggcatcaccagctactgatgtttttgcctttgggatgtttcttttggaggtggcctgtggccgaaggcctctggaacatgacctccaggacaaccaggtcgtgctactggattgggtgcttgagaactggaacagaggacaaattcttgacgtggtggatcccaggctcagcagtgagtatgttgccgaggaggcgaacttggtgctgaagctggggctcctctgcttgcagccgttgcctagtgcacggccgagcatgcggcaagtcctgcagtaccctaatggcactgtgctggcaccagagatgttgccgacagacttggactatgatacactaatgtttctgcagaatgaaagggttgagtcatacgccatgctggaagcatcctcattggcaacaacagttggccctgggtctgatctttcaggaggaagatgatgaggacttgtggtttaccattgcttgttagttttctgtatgtttatctaacaagtttgtacttataagtcttaatgcctttaatataataacaagctgaccactctatgggctatggcatgataatatactatcatggcaaacatgactaaccctaaagaacatgatataggaaggcttaccacattctctgcattcatatgctatctatttgggcgaatattacaacatatggtagctagaacgggaacacaaggttattcgcatagggaccttgatgttataccagattatgcatgtggaacaaaatcaatgttttcaagtctccaggaactcggcatcaaatcaattaagatgactaataagcaactaacaaattccaaaaggagcaatgtacgtacaagcatggagaaacccattggccattggccattgcataatgcttattggttcttttccttgctctcttgctcaaccatgtaagccttcttcatttcttccaggactgcatcatttgtgctgcaagcatacacacatatagcatggttattacatctaaaagaaccgcggtgtatttatcatgcactggccaataccagtctacaagcaaagcatcaggaaatcttcagaaaaaaaaatgtaacagtaaatgcttgacagagagatttcccaaatgcattgaaagaaataactttcagcactacgctcctaaaggatgatgctagtacagttacaggtagctttagactgggattctaaaacaaagaattcactgaacttgactccatcaaatccctaacaatgtactacatagcaaaataaagactgaccaaataaaaatcaaaataagcctggttcctactgtcagtgtaatattgcaggaaatactgatgtattcattggtcaataagttagatcctaacttgaaataacagccagactacagcatacaatgattaaacatatagtggaagatatttttgatagcaatggaaatcctcgcccctcatatatgtacagattagagagtaaagatgttgacaaatatcttgcagacttccctgctcatattagtgcgtggatgtttttaacaataagtatctactgaatgaacagtacaaagtagctaatcagtttctgtgattaggctccatgcacaattttccttatatattcttatagcatgttatggaactctctggagctctggtttgtacaaaaatcaacaatgttcaaacacgaaccggaataccgcttgaattactattaggatactggcatataatgatcaacttacaattgatgaaggcaatcattcaactcttttgcttgtttgcggcattgccataccaccgaaaaagttctacctcgagcacactcagcatattttgagcagtagaaatcacactccttaagggccttctgcttcattttgctccgcaaagctgaaaagtgaaatagaatgggctaaattaactctctgatgtgaagtacaagaaacttggatattgtcaagcaaagcacaaaatttccccttaagtacaatattctaacctaacactagagaacaactaattgagaaaactcttttgaaatacaaaaggcacatgttcaaattttctgaatgttcttcctttattattctgtacagcagtcttcagcagctcctaacattataaggaaagttcgttcagtcaatcagtctgtgcatatagtttgtctttcacaagaaagttctcctaaagattcaaaaaaatcaaaggactgatgctcagtgcaacaaattctttacagggctgtctcacaagtttgaatgtacttgagtgctcataatataatatttagtaaaccgagctatataatgatacacgaataaataacatcacacaagatccaacattctgtaaacaaattaactacagcatataccggttaccatcatcagatagtgttaaccagttgggagagatgtacatgaactatgaaatctgaatggcatgcttaatcaactaatgattcagcttccataccggcaagcactagatcacataacttctcaactaaagtctacaaggttcggccagccaaacggcagccaacctccttaacctcctcgtttgacgactcatttcacacaggattgtgttcccatttcaacaagcaacaccagcggagcgcaatttttcgtcagtacctcacccgttacgcaactatcaggcgattttgcagacctcaagaccccccaaatcaacgaattcggaagcttgaacaggcaaaggatgcgggggctcaccttcctcgaccttcttcttgacgtgattctccctggcctcctgcaggtaccccatggtgcagcgaccaggcgcacgccgtatcggatcgacgccggcgagggcggtggccggcgggggggatcgttcagtcggagttaaaccctaactccctccttggaaggggacgcggacattgacggggaaggtctcgctgtgttttcccctgttcgttggtgggcgagggagaggaagtggcaaatgggctaaacttggtcggcccaaaaaggcccaattcatttggcccaacaggccgtgtaccatcagcctatatgggttttctcccctctcctcttcaccaagcaagttttgctgaactgttgaaaatggccaaagttctcatgaagcagcatagatgagagttgagaccagtagacaggtacagagtcgctgccaggatcaccactgaatcagaaaagatgtttctctgaattgttcaggttagagataggagttttttggagtgaatgctcggcgtagttagacctacacagattaatataactcatatatctgacacgtagccattcatgaattatggtagtataatgattatgtacctcctgatgaaataaggaatgtttcttcgtgtcactgtagtggttttcggttcttcacatgggacctgatgattggagattctggaattgctcgtagcttcaccaaatcgcacgagatccttacagctcttttgtaaggcggataattccaattcgttcaccatcaacgaccaaaccaggacaaaatcaaactagtactactactaatcaagttggtaaggagaccaactgacgatagcatccagccaagctcgacgcttttggcaccaacctacccttgtaaaatgccggatggcatcgccgtaggaggccgcgtgtttccgtactacactcaatgtgtttggtgaaaaaagaaaagcgtttcttgatgcatggttatttgacttaacactaacttaccaaggttaaaagcagatactactgtctgctactaaaatgactgcaggtgcatgtgttttcttacggatcaaggttgcagcagagccaagtcagaggtgtccactgcactagacatcccgccgaattcgatatgatactgaacatcagttgcgtttgaacacgtacgcgcatcggattctgatggttttgcggtagctgacgcctggctggagctagcctgcacgtagtgccgagacgtcctgcctgatcatgtcaaaaacaggtcagaatcaggatagtttccacaagaaacgaacccaaatcccatcggcgacagaatcacggacacaagcacacaactcgagctgattgctcactccacgacgggataagatcataagaagaaactgcaaattaaaccctgtcccgatcgcctccgcccaccactctggatgaggatcagaatgggcgcgtgtgggctcgacgccatcgctatcttccacatagaagaaccttcagaaaccgcaagagggaaaaaaattcagtaaagaactggcatatggcttttcaattattatgccgtttctgtctgtgttcgtcagtggactccagtgacaggttattcacaggtattcgttgcgttggagaatactactcccgctgcgttgcttttcgtctcgccatcaaaagcaaccatttcctaatcctaccggctcatccgtgcttcttttcttctgtgcaaataataatgattggttgagatcacgcttaatttgttctgtttgctaaccttgctcccacgaatgatagcgtgcatccggccgtcctggattcgttttgtgttgatgcgtgtgtcatcttctggatggatggagcggtctgattaaccgccggtttatttgacgcttatttatgtgtttcttgtctgatttggatcggtttattggcgatttggacttgcgagaacgatctgccatgttttatacggattaccgtctgcctgtaatagttttctacagttattatcttggtctatatggacttttgtggtgtgtgatgtaaaaactaaggtgcaataattcattatcaatactttgctgcatcgacctaaccacgaccatgccgtaaagacgttccactttcagtattttctacacctttttctagagtactagaattcatgagttcatgatacatacttattttctgcacctgttttttttctagagtcccattgacacggttgagtgctgaacttctggttttagtgattaccatgagagggaccggttccaaagtccaaacgcaggattcctgaaaatcaacttcagtacaacttttgcaacgccccctgtccttgctttgctgcagtacactccatgaccacagcaacaacacgtcaaacagccaaaactaatcacaattacgtcgtggatgatcgaacgatcggtcgagccaagtaggcgcttgtgagaagcaacggtgaaaggaacggcaaaggactaaactaagtggactaatgactgttaacgcccatggccgcccttcatgggccatgatgcttcacttttgcctagctaactgccacccatcagaatccctcgaatcatcgaagagcacctcagatttttaggccccatttgaattggaggataaatggaggaaaaacaaaggaattgaaatcctacactattcatacctttgatttgtaggaatgagaaaaggaaaaacgtaggaaactttccttttcctacgattctagaggaaaaacgtaggaaatttaacatccactccaatttcttggaaaacttctcttgagtctatctctctcatctgaatcctgcgtttttcctgtggtccaatcaaacggccattcctgtgtttttcctgtgttttgcaatcctctgttttatacttgcattcttatcagaatcctatatttttcctattcctccgttttttcaatcctacgattcaaaggggcccttatatcctctaatatatattaccatgtgtggatattgtgggtaccccatacccatacggcatggttatccgactagtcataggggataacttatatctatggaatatgtaatagatcatgactcgggtattacgtttccttgtatattacggaacggcctaaagtcctggtttgataatattgtaaagtagatttaggaaaccgataccgtattggttaaggtttctatcttgtaatcatgccccccatcctatataaggtgggcaggaggccctctagggggcagatgacataacctgatcatcagatcaatacacacccggcggattcaaatccccaaacaggagtagggtattacctctcattgagagggcctgaacctgtctaaatcctttgtctccgcatccatccacttttaggtctcgtgcgctacccccttttattattgccgaatccatgtttcgacaccatgcagctgcctagtcaccggtcactgattaaaatttctagctgtaaaggggctctcccttcttcctttctggaggtataaaatggtattgtatcactagggattaacttgagtctcaagctgactagagctgcgtcggatgaacgccagcctgaatcgatccatgctcaaagtggtcgagaacaaccaaatattctgcactgaatatggtagccttttattttgggaggaatatcatggaagacgattcgaacgactttaatctcacaaagttttaactggtcaatgtagcacaactgtaactactaccaaccatttctttttttttttcaccttgcaattgcatcgagtggagtggccattgatcagccggtgcttctgctccgtgtttttttttcgaggggacaggcagggagctcctgcaattcactatagaagaagagagttgattcaatttataagggaaaccggacccaaaaactttacaacagcacggttaattaaaggaaaaccggcaaaaaccccgacattgacaaactgaacctaagtacagccgtccaacatgagataaactcctaaaacgaagccttcaagaaggttatgccgacaacggcgacatcgtccgatcctaacgaatctaggttttcacccggagaaaactcttgaagtgaagttgaacgagggctccagtagcaacgccttcaagaaggtgaacggcgcccaaggacgtcgccgttgctagcaccgagagcggagcaagactttcgccttggagcacccatcaaccatagcatccacgacgggagccaccaaatgtcacctgcacaccgaggatacttgcgatattcacaccacctgcacgacgaccagactcggttcccacccgaggacgcgccggatctgggcaaggagccagatccggccgtcttcctctccaccaacgccggccgacgcctagaggggcgccggaggacgccagtggcagccacggggtgcctgcgtgctctggccaccaccggccgccgccggatccgggtgcaccaccgccggatccgcggcctccaccattgctaccccaacgccgtcgccattcccgccgccatcacccacaacaccacccggcgcaactcacctcaaccgccaccgtcgcccgtccccgccgccagcccatcccgccagatccggccggaacggcgcggatctggcggacaccgccgtcgccactccgggcggctccccaggccacccgagcgcgaggagacaaggagcgccccaccgccaccgtccttgcggccgcgcggcttcaccggcggccgctcgggtgacggcgaggcggagaagggggtgggggtgggggagagggacggccgggtccgcccctcgggagagcgacgcgagagggtttttcttacagcagtcgcttctgctccgtgtcgatcgatctagcaagccggctgacccgcctctgcaaatgcaaagcttccgtgagcagcccggagtgatttgccccgggatcgcgtggtttgtgtcgtgtctttgcatacggcgacatgctatgaatccccgctttacacctgtcagatggaccaaatcaccaaacgtgattggcggtccaactgcagagcagtagacaaagatttgaggaacaacaggcaagacatcggcacggcacctgcagactgcggatgaaggcgttcgccgtagaatttgagctttcgtttactgtaacagggctagttggttgtacttgtaccttacggttgaaagataatgacacctagtagatgatttgccggagaaatattataggacaggaacttaatactcattttcttcgaaaagtcatacggaataaatacatgtgctaaagtgttctcctttaagcaggaacatcagagctttcaattgagtagaacaatgcaggtacacattgccgggtttcaaaccgctgctatttttctccttgggatcatggcaagcatttttcgtcaacaagactgttagctgcctgtttagcacgcgtcaccaacaaatgtacagagtatgttaccaagatataatcgaagcaaaccgcctggggtagtgtttttttctctctttttgttcgttatagcctttataagatgtagaattgtaattttttaactgatccattaatacgaaacatcgcactaactcgtagtggttgcttaaagaaaaaatcatagcaaacaaaacaacggccaattccatccttaccaatttatcttgatgtgttggcacggtaaaaagaccaaaatcggcccaacgtttttccatcgaatggacggagaccaaaacaagcaagcaacttggccttcaatcttcttctccttcgcgctctcgccacgcgccgctgctcgccacagagcaccaatccaagattccagagcgggcggtataagagaggggtaggaggctacacccccgccgcctccacactcaccacccgatcgaacaccgccgtcacagcgcgtcgcggcgggggcgatgggcctcttcggcggcaagagcgcctcttcgaagcagaccgccaagctcaagtccctgatcaagctcgctgccgcgcgcgtcgccgtcgcccgccggccccgcctcgggcgccgctccattgcccgcggcgatgtcgcgcagctcctctccatcggccacctcgaccgcgctctcctccgtgtatgtccatgccatgcttttgccttgcctgacacgcgcagagactcctccgctaacagtagccgccgtgttctgtttctgcaggcagagcaagtcatcgacgaggacaacatgctggaggtgctggacatcgtagagctctactgcaaaatcctcatcgagcaggccacgcagctagataagcccaagtatgtatgcaagagcacacagccgtgttcttgactcctcggttgattaattccttgccttgtttcttcgttttcatcgcctctcatcagcaagcttttgtcatctttgggttggtgtatacagagagtgcggcgaggagatcaaggaggcggcggcggggctcatgttcgcgtcggcgcggtgcggcgacctgccggagctgctcgacgcgcgggccatcctggcggacaagttcggccgggacttcgccgcggcggccaaggacggcgcccacggcgtcgtcgatcccacggtaggtttagattgatcattgatccctccaactaaacccatctactaccacccaacacatgccgtgtcatgtcgctcgccaactgcgcgagacatggaccggaacgaactggagttaatgaggacacggttgctctgccgctgcagttggtgcggaagttgtccggcgcgccggcgagcacggagcagaagcagaggctgactaaggtgatcgccgccgagaacgatatcttactggaatttcccgagaacaccggagataccgatcaggttggttgcaatctgcgctacctcgcgatgtaatatccctgtttgttgagatttttcgttggttttatcttacgaagttacggaatcgtatggttgctgtactgtgcaatgcagggcaagcagaatgaacaagccaggaacgtccgagctgaacaatttgtcgaacagaatgaggtcaagagggagcatcacgaggtactagcacttgtacaagatcatagcagttttttctttttctgtagtatctaatggctaatgtcgaggattcaaattgtaacaggttcaggggaggcagaggtttgttgacgaagaagtgaacccgatacttgctcggctgagcgtgcaagaacagtacgccgacgccaggatggcggcggaggcggccttcaagtcggcatcgttcgccgcgatggccgcgagggcggccgtcgagctctcgcggtcggagtcgcaggggaagggatcgagaggcggcggcggcggcggctacgagaaggtgcatccggtgcagaattcggttgcgggcgagaaggaggcgccgccctcctggaagccgcacaagcctccgtcgccatcgacgtcgccgtcgtggagcgacaggagcacggcgacgtcggtatggtcggaggggacgcagaaggggaagggcgtcgtgttcgacgggagcgacgaggaagtggacgacgtcgcctggactccgcagctgcgccggcctccctacaggagggcctccactatgggcatcggcggcggcgcgtggaacggggaggccggcagggtcggcgccgacccgcagccgttccaggacggcgtgtacaacaactcgcaacacccgcgcccgccgcacaggaggcacgcctccgagctcggcgccggcgccggcgcgccccgcgagcccctggtgtccctggcgccccaacgcggccagtacagggacccgccctacaggagggaccccgcggcctacagagacatcaacgccggcgcggcgcaacggcggcagccggacggcgccggcgcgagaccgtacgagagctcggaccacgtccacccgccgtacgctcggatcgtgtcggcgctggaacgcagcaacgagcacatcgcgcggcacgaggaggtgcgcaggatcggcaccggcgagcgggtgctccaggagagggtgtacggcgccggcggcgcgccggggcgcgcgccgctgaaccaggagcaggggaggctcaactcggtgcgcacccgaagatgaggtggtgtcttccggtcgttggttttggcgcggcgcagcgcattggtcagtcagctcagctgttgaattccggtgcaggagaactgggggccgttgcttttttgctggcaaaccggaggttcgtcgcgcgggatccctggagatacagggaaagggatcccctggcttaacagctgtgcagttgagtcatgtcagtgactcaactgcatgtgcagttaaattagaggatctgctttcgagatacagatatgatattctgcctctgggaaatcaaatgtgtataattaaaatggattgcgctagaaacgaaagagaatgtacaaattacagaggtgatatattcccttttttttttgttgtcctgtacaaaggagttgtaatcaccgttttgcgaaaggagacgggttaactgagtctttacggggtgatcgatgaattgcacaactctgcacgctatttgcacaaagtttggatcgatgcacggctgctgctgctgctgcgctacacctgaaaaatggcactctgcataagtgcctagatgtgtaatggctttgttatctgcgagtaaaactactgaactagttgctatctcagccgtgcatgcggtgctcgtcttcactgtaccatcttaaaataaaattcaccacgcacaaattgtgcttcctttcgtaactgcttgaagcagagcagcacattaccctggctttggtgtttctgcatgttgtttgcgttttacatccggtaaatttctttgcacgtaagcacgtttggctcgctgtcttctcattgcattctgcatgctttgctcattgtcattctctaggtgatgctcaattgctcccccacccaatattttccatatgcaagaaaggagtacgacagttcatgtacaccaaagtgaagcaacaaacacaaaagttaaactacccagaacagaagcaacatggccctacaaaacccttgccccttcatgcagacttcctccatcagctcacacaagcaactcgcattctcctcctccttcctttcccccacgcaaaggaactgaccatacaactgataaggtcggagttcatataaccaacagcctaggacaggaacgccgccgagaaccgataacttaacaatggggttcctccatcggaagacctccaagcagacgagcaagctcaagaccctcctggggctcgccgtcttgcgcatcgccaccgctcgccggccccacctcgctcgcaaatccattgccaccgatgatgttcgccagcttctcaccctcgaccacctcgatcgcgccatccaccgggtaagtgtctacgaccttctctgatgaagagagggatccacattgctccaaggcgaggcgtgctaatgccagcaatgtcttgattttctcctcacaggcagagcaggtcatagcggaggacaacatgttggaggcgttcgaaatgatagagatgtattgcaagcgactcatcgagcatgctgcgaagctggacaagcctgggtacatacatttcatttcttcacacttgacttgatcgcgtccttgtctcttttccggtcacatgacaattctatttggtgtgtccagggagtgcaccgatgagatacgagaggctgccgcgtcggtcatgttcgccgccggttggtgcagcgaattgccggagttgctgttcgcgcgcaccatccttgcggataagtttggcagcgacttcaccgaggcggccaaggacggcaccggaatcgtcgatcccatggtactagatagcatatactatccattcatttcacgagtcaatgatttgtatttggaaagatggaggaatggagagttaacaaagttgggtcttgcagttggtgtggaagttgtccagtgatgcgaaaagcatggagctaaagaggaaggtgacgaaagagatagccatggagaacaacatcatagtggacttctctgagctccaagatgcgatcaaggatgaagaagactgataccatcgggagcttgagcacaacacatcatgctagaacaactatgggagctcagagtactcaagacgacaaccctgtttctaactctgatggatcttattagtgtatatcacaagtcaggtggggaagcaccggtgctcacaggaagctatacttcctttgataccagctcaaaaatgtaaaaaaaaactaggtgctgtgtgtgcactccaagattaccaagctgtgaatatacatgtggatgtccacccgttttttacatgtcatctgaatggttatgatattttttttaaaaaaaataacatgataggttaatatgtaatatatcatctcacaaacatgcaagttcaaattcgatttccacaagttgtaacaaaaacaacaaatttgactgtaaatatacatatactagttaaagtttaatttgttatttttgttatagcttgtaggagtcaaatttgaacttgcatgtttgtgaaatgatatattacatattaacctatgttacaattttttttttgaaattttttcataatcatttaggtgacatgcaagaaacgggtggacgtccacccgagagattagaatccatctccctgtgtaaattgcaaatacagatcagacaaagtacacacgtatttatcgttgcagttacagtgcctcttttttacccttcaaattgtgcaaacttttagtttgtgcagagtatatactgaagatttaaatgatgtctgctataatatatgtatgatgaacatttaaacgatacttgtaacaattacatatggtgttccttagctccaattagtggaggatgaatgtgctctacagtttagccagaggttccgacgtttggtcgtcaaaataatgtggatttctttatgaattactccttccatttaatattataagtagcttttgattttttaaatcaaacgctttaaaagtttgaccaagtttatagaaaaatataacaacacttatagcaccaaattagtttcattatatccaacattgaacatattctggtagtttttttgttttgtgttgaatatattgctatttttttataaacttagtcaaaattagagaattttgacttaaaaaaaataaaacgaattaaagtatgaaaaagaggtagtgcagtatcgcagctggctttctacaaaggcacagaagcatagggataaaaaccacataagaaggttaagcaaagatgtggaaatatggtgctacgagaataacatggtttctctgcataaagaaggggccacccactattctacactcatatctatggtactaaacaagcatgattctgtagtacttggtgtcatgcattttgacagaatatgaaaaagtctgaattacacccctaaattattgcatcggtccgatttacacccgcgaactacaaaccagacattttgtgtaccgaattcttcaaaccggacaaatactaaaaactattttgagttgttttctgcacaaactagtacacacgtggcattccaactgaaaaaataaagaaagcaacagtgggcccacatgtcatatctctccctctatctctctctcgacctcagatgtagcgatgaaggaagggaagtaactcgacgacaacttttcgatctaaacctcaccagcgccgcttccatgcgttgagtccaagcgccgctgcggcaaaatcgcccaattcactatcttttgcaatgtactagcatgtcaacaaagagcaagaagcagtagcaatgtactagcatgtcaaccaatcttttggtttccgcggagccaattcctcttcttcgtatctgaaaacggcaaggaggacaccgcctggtgtcctgaaacagaagcagcaagagcaaggcaacaaagccaacaaggcaggagtagaaggccttggcaacaagtatataagcagcgggtgcaaccatgtcacttgcagctacggccaacatcgtctctgcctctccggtgagccaactaattaataagcttcttcctccttcacgattgagtatttgagcttagctagctcactagatggcaatgctggatgcagctacacgtgcggcagcacaatgacgggaacgatgtacctgcacatctgcaaccagaaggcactgacgacccgtggtcagatctagttgtgtacctgccttcctggccagtgagcacgacggcgcccccttctctagctctgtccgctaggcgcccctcctcgagcctcggtgttagactcctgctaccgcgccgctgctcgctagcgtcgtcactcgcgggacttcgccgtggacacccatgacccactacctccctgccctcccattttctctcttgggctgtgaagaaaaaaatagagaagatagagctatcaaggaattttttttgaactttttaattttaaaaataaaccctttcaaaacttatttataagatatgaacctttcagccaagccagccagactggcgtggtaaaacaacattgtcatgccggtctagatggcgtggcagtgttatttggtcacgacggtacaaaactgtcacgcttgttgcgtgtggcatgtcagtgttgttttgccactctaagcgggctggcatggccaaaagattcagattttgaaaataatattttgaagggtttattttaaaattaaaaaataaaaatgttcaaaaaaataaaaaaaaatcgatgtcaagtgggccaactgtcatgtagattaaaaaaaaaattaatcgccgcgtctgatgccacataagatcaaatccaatttgtattgggatagggggttattggtccgatttgaagagttgagtgggtagaatttttggttttatagtttagaggtgtaaattgaaccgtcgcaataattcaacaaggtaattaattcggagtttttctcaacaaaatactactatctcaggggatctttcttcagctcctagacaattcaccatgctagagtaatgtcaaggggtttttatttccaaaagttgcacttagtatatagtacatacacgatctattctagcctccttgcaaggaaagtagcaagttgctcaagctctacacggcttggttacacaaggggagatgggtgtcgtgttcgatgagagcgacgaggaagtgtagggcgtcgcctggactccgcagttgtgtcggcctccttacatgagggcctccatgatgggcataaaatacttaacaaccctggttaatcgctaagaagaatgcacttgtctgagctcccgaagactacaatggcttgcttatttgccaagagctggatactaagcccgccgtttagcagccgaggttgtgagcatgcatgacagcatgactgcgttcgtcttcgctatgccatctcaaaaatcgttctcatccagcacaagttctgcatcctccaatatcaggcatcgtgttttccctgggtaatgcatgttcttcgtgtttatctctggtgaaattttttgcacgtttggcttgcagttttctcatagcattgtgcatgctttgctcattgtcattatctaggaatgccgcacgtgatgcccaccccccattttccatatgcaagaaaggagttcagcagttcatgtacaccgaagtgaagcaacgagcacaaaaattagactccccaaaatagaagcagaatggccctacaaaatctttgcccctcaacgcagacttcctcatcagctcacacaagcaactcgcatactcctcctccttcctttccatcacgcaaaggaactgcccatacacagttgccaaggttggagttcgtagccaaacgtcgaagccaacaacctactaacctagtacaagaacaccgacgagaaccgacttaacaatggggttcctccatcggaagacctccaagcagacgggcaagctcaagaccctcctagggctcgccatctcacgcatcgctgctgtgcgccggcctcgcctagctcgcaagtccattgccaccgatgacgttcgccagcttctcaccctcggccacctcgatcgcgccatccaccgggtaagtatctacgacctgttctgatgaagagaggttgctccaatgcaagccatgctaatgccagcaatgtcttgctctctcctcacaggcagaacaagtcataggggagggcaacatgttagaggcgttcgaaatgatagagatgtactacaagcgactcatcgagaatgctgcaaagctggacaagcctgggtacatacatttcatttcctcacaccagactttatcgcgtcctctatctcttttccggtcacatgacaattgtatttggtgtgtacagtgagtgcaccgaggagatacgtgaggcggcagcggcagtcatgcttgtcgccggttggtgcggcgaattgccggagttgccgttcgcgcgcaccatcctcgcggacaagtttggcagtgacttcgctgaggcggcaaaggacggcaccggcattgttgatccaatggtactagatagcatatattgtccagtcatttcacaagtcaattttgcagttgtaaagatggaagaatagagagctaacaaagttggatcttgcagttggtgtggaggttttctggcaattgaacagcatggagctgaagaagaaggtgaccaaagagatcgccatggagaacaacattgtagtggacttctctgaactccaagatgcggtcaaggatggagaagactgatgccatggggagcttgagcacaacacatcatgcaagaacagcttggacggaagatcatagtactcaagacgacgaccgtgtttctgtctctgattaatatcttattactggtcattgaaacttagggtggggaagcaacggtgctcacgagaagataaacttgctctgagaccatctcaaattgtaacaactaactatgattgtacatgtgaaaaagtgtaaattactaacaaatcaaacagtgcacacgcagatttcttgtggcagttgtacaatgcctcttttattttcccttcaaattgtgcaaacttttattcttgaaaaagagaaattggtccaaagtgacttagtgacttatcaagtttgcaccacagtatatattgaagatttaaacgatctctgaaaaatatctgtaggatgaacctctgaacttttttttttttgactaagaacctttgaactatctttgtagaaattttatatggtgctcgcctagttcccattaatggggggatgaaattgccctaatagtctaatttagctagaggttccgacttatcataagatgtttggtagtcaaactaaatgcggatttttttatgaattttcactggtggcaacctacaaaggcacaatagcataggactaaaagccacagaagaaggcgaagcaaatatttggagatgtgatgctacaagaataacatggtttctttcaatcaagggcaacccactattctgtactcatatctattgtaccaaggaagcatgatttttgcagtagtgcaattacttggtggcatacatgctgacaaaatactactatcttaggggatatttctttagccccttgacaattcaccgtgctaagaccaatttgctagagttatggtctaggggttttgatctccagaactcacgcttagtacatatgcaatctattctagcccctcacaagtaaagtatcaaggagttctacacaaccgcagcttgtttgggttttaaagttcaagatttgggaaaccatggggcatggcatgttgaacacaagagaccagaatcgtggaattgactaatttattgaactcaaagtaacatgtcattggaaattatccagcaaacataataccatttcagttttaatcgcaccaatttccctcgaacctatcacatgatgatataaacaatgcagaaagaaatccttagtaagaggagagcaagcaagggcacgaaacctctctcgtcgatcactgtagcttcatctccatgatgctcttggcctttggggcgtacagagagtacaccaccgcatgccgttttgccacatccagctgcttcttcccgtccgcgaacgccgtcgccaagggcacggttctcgcagaaggcatccgctgcacacggcagcgcgtgtactcgtggatgttgtagttggataactgccatgccatgcggaggaagggtcagagcctccgatctcgtcggtgttgccaccaccgccgctaccatggatgcgcttcctcgcggatgctttttgtacgctagagaacggagtagagaagagctctcctgaatccagaaagatgcttgggctaatgcctaatgggctaggcgcctaagcgcggagacgagctaaaacaatgcttttttgtcaatttaacacatccaccctcatggagaatcctattatgaattggacccttagagtgtctaatgtcaatgtgcatgtccattgtcaaagtgtcagtgccaaatcaaatcaagagtcattaatcagttcaaaatgccgttgtgatttgaccttttgtccgtagtaggtcagttcaaacgataatacttttctacacataagaaaatagtgaaaccatgaattggaagattatttactttgctccatataaagttaaatgatggacaacacagataaagataattaaaagttgtataaacacatatcaacatagatattataatcttccaaacacatatattattttttttgcttattaactacaacaaaaatttaaagtttgaaacttaaatttagaattgaaacttaaaccgaattacctctctaaactcaaaaaccagacatcgttcaccttaaactttcaat

SEQ ID NO: 8216 - DNA, 13826 bp, Oryza sativa
gtcaggggagatccacgcgagctgatctcttccgtggtggtaaagccctaactcgctcggatccatttcgcgctgattcgtgtcgctgaagccctaaccggccttcttgttctccttcttccgcagtgtgcgccgtgcgggacggggtcgggtcgttttctgtgacctgtagaatagggtagggtttgaggcttttgagcagaggcgcatccgccgcgtgggtgggtgggtgcggcggtggaggggaggatgtcgtcgctgagccgggagctggtattcctcatcctgcagttcctcgatgaggagaagttcaaggagactgttcacaagtgagtgtttcaatctaggctgaaaaaaagggtgaaattatcacatgtctgtctagcgtttgtttaactcagttggggttccggcgctgttgttcaggcttgagcaggagtctgggttctacttcaacatgaagtacttcgaagacgaggtgatcaatgggaattgggatgaggttgagcgctacctcggtggctttaccaaggttgatgacaaccgctactcgatgaagatattctttgagatccgcaaacagaagtatcttgaggcccttgataagtaagtatgggagggaacatgtccctacaggaattttaggtgctggagtggaaagcgttgctaactgggtttgtttgctgctctgcaggcatgatcgttcgaaggcggttgaaatcttggtcaaggacctgaaggtcttcgcgtcctttaacgaggagttgtttaaggagatcacacagcttttgacgttggaaaactttaggtatgaatgtaatgtaccaaaatggtggtctgacactttatttatgtacattagagcatggccattaattttgtggctgtaactattacttggttgctcagtctatggttttttattttgtcttgatagggaaaatgagcaactctccaaatacggtgatacaaaatctgccagagcaataatgcttgttgaactaaagaagctgattgaagctaatcccttgttccgtgacaagcttcagtttccaaatctgaagagctccagattgcggacacttataaaccagaggtagcacatgatggagaaacacggcttccccttacattcaatcatctggaattttgtttcttgcaatacagctggttacataagtacatctcatgagaggactttaactcatgtcagctcctgacagttccagtgataatgttatagtttataagccaactactttgttccacaggacccacaatttttttctcaagtttatttaaatcactgcttcttgtttagcaaagataacctgctatatttagcttgaactaaatgagcaatacggctcatttatgacactcatcctaatgaagatttctttttatgacatatgtggtataaataccaagttttaaatcttctgttgcattattcattttctgggatattggatagacatatagagcttgaagttgaaaacggaaaattatctaatgatttactcacgtcacacaccattgtgtggtttatctgtactgttttctttatatgttgcgaattacttatcactatttattatctgtaagatttggctgtctacttggtaggttgtcagaactcagaattagtgcttgctgattctaagttctagggataacttcacagcaccatgctgtatacttttgatttatcatatgtttaaaatttttaatgtggaggagggataatgcatggacctttgacttttttataatatgttgcagcttaaactggcagcaccagctttgcaaaaatcctagacctaaccctgatatcaagactctgtttgttgatcattcttgtggacaaccaaatggtgctcgtgctccatcgccagcaaacaatccattacttggatctataccaaaacctggaggtttccccccattgggtgctcacgcggtaagtccttttagcatatttggatgcttcatgtttatgtgaaggacacggttgttttgaaatcggttccattccctttttcagccatttcaacctgcacctacacctgtcccacctctggctggctggatgtcaaaccctccagcagtaacacatcctgctgtgtctggtggagctattggatttggtactcctacaaatcctggtacctgttctaattactgttacaaactattattaagtggtctaaattggaaacagcacacatagtctgttgattcatggcattcttcttttaaatcttgtagctgctatattaaaacatcctagaacaccaacaactgccaatccttctatggattatccatcaggagattctgatcacgtctccaagagaacgagaccagttgggatgtctgaggaggtatttgtcacatctctttgaaatacattttgctatttctagtgtacgctgacactttataataccattgcattttgcctaatcattattgacatatatacttgattgtaactataatgatctaattttgcaggtgaatcttccagtgaatatgttacctgtgacatatccacagagtcatagttacccgcaagatgattttcataaaaatgttgcacggacattgagccaaggatcaactccaatgagcatggacttccatccagttcagcaaactctccttcttggtcagttcttaaattcttgttgctttctcatgataaatcaaattttgccccttccatagcttctcatatacactgcttatattttagttggtaccaatgttggtgacattggattatgggatgtcggtaccaaggaacgacttgttttaagaaacttcaaggtttgggatcttacaaaatgctcaatggccctccaggtttgtccgttatactatgttatttgagtttttgttgctctttattagcctcaatctaactatgaccatgtaaaattgtaaattcttcaataggcatcacttgtcaaagaccctactgtctcagttaaccgcataatatggagtcctgatggaaccttgtttggtaagatgatgtggacttgtgccttttctatcctctacccacagtttctaatgtctctttttaacaggtgttgcttattcaaggcatattgtacagatctattcataccatggcggtgatgatatcaggcagcacttggaggtatgaatgcatattcgttgttcttctttccttttttgttttgacaggaagttcttccttcctaattggtattagtttcttattgtataatcgtctaatctgattcctgaatttgattaatccctcctttcttaactagattgatgcgcatgtcggtggtgtaaatgacattgcatttgcccatccaaataagcagctatgtataataacctgcggagatgacaagacaattaaggtgagtttctgtgattgcatgagttctgggactgaaagtctctttgtttaacccagaagtgctaagttttatgggcaccatattctaggtctgggaggccactagtggagcaaagcaatttacatttgaaggtcatgaagctcctgtttactctgtttgtccacattataaggaaaatattcaggtgcacctgcagtttttatgctataacgatcaatattaactattggaggctacttttccttacctgttgttatttttcttcgtgcagttcatcttctcaactgctttggatggaaagataaaggcttggctatatgataatttgggatccagagttgactatgatgcgccaggacattggtgcacaacaatggcatatagtgcagatggttcaaggttcataattatttctttgttagcatgattcatgtgggtaactgggtttttgtctttgttttcactgattctttttgcccttgtgagtaggttattttcttgtgggactagcaaggatggcgaatcacatctagtggaatggaatgaaagtgaaggagctgtcaagagaacttaccagggatttcgcaagcgatcgatgggtgttgtccaatttgataccacacggaacaggtttttggctgctggagatgaattcttgattaagatatgggacatggacaacacaagtcttctgactaccattgatgccgatggtggtcttcctgtgagtgttttcctttatctgtagatactttggtaaatggtgattggttcaaatgaaatgagtaaggaaatttccatcttaatctaacctagcatgcaattattaggcaagtccacgggtccgattcaacaaggaaggtactctgctggctgtttctacccatgaaaatggtatcaagatcttagcaaatgctgatggagtacggttgctgcgcacattggaaaatcgttcatttgatgcttctcggagtgcgtctgagactgtaacaaaggtaagttcttgtgaccatttaaaattacaactaaatatttttgcaagcttgacccaatagatccatcttggtgcagcccctaatgaatccattgactgctgctgctgctgcggcggcgtcagctgctgctgccgggactagttcaggaaatgctgctccaccggcaataactgcactggtttgaccatattcacaattccttttctattgatctttctctttctatcagaaaaccttctatagtgacccaactaacttgtacattcttggaaaaattctacagaatggggatagccgaagcttggttgatgtaaagcctagaatagctgatgagccattggataaatcaaaagtctggaaacttatggagataaccgagtcaagtcagtgcagatcattgaaattaacagataatatgaggacaagcaaggtgatattttatccctcttgttgcaatctgcagtataactgtctcagtggttctataaaattaatactttgtagtacattattaagtaattttttaggctgagttctttcctctcctttcccaactcatctccctctttttccgtgcacacgcttttcaaactattaaacggtgcattttttttacaaaagttttcaataggaaagttgcttcaaaaaatcatattaatccattttttttaaaaagctaatacttaattaatcatacgctaatgagctgctttgttttgcgtgcaccaaggattagttcccaactgtgtctgccgaacacagccttagtgtgtatagaacaaacaccatatgttttgacaagtttccatagctaatattatttgatttattgcagagtaggggtgggcataaaaacaccgaaaaccgtagaccgaaccgaaccgagccgaattggtggtttcttcggtcttcggctgcttgcttgctcggtttgattttttacatcatttggtgtgcggttttttcttcagtcttcatctgccataaaccgaactaccgagaaaaccgatctgtgtgtgtctccctcctggcccaactacacaaggcccattaacttttccccatatccctaatttgtgcgtggggtcgtgtgggattcgtgtggtcgtgctgctcgccgtcgcggccgagtgcagcaggggttggcgactagcgctcctggagcttgtgctggacgattaagcagctttggtgattagtggttggacggtggaagatcagaggcatgtcgtcatcatcgagcgagctccatggctgcgtgtgcgtaggtcctcgttgagcgcggcattcttcggtaaaaaccgaaagctgataaacccgaactgacattaatcagttttggaaagctcagtttttatttttccatagctaccgtcggttagtattttacataaaccgagttatataaaaaacctaaaagaccgaccctattaaaccgaaaaaccgagtgcccacccctattgcagagtatgattgttaattgaactaaagccactgactgtttccgtgaatgatgcttgcccaatagaatgaaatgttttgtcacctcatattttgactagcattcttgagattcttctgatccacatccaagtaccaactgctggtttttatctgtaagggtttccatagatcttatttgttttgaactgcagatttcaagacttatttacacaaattctggtgtcgctatcttggctttagcttcaaatgctgttcatctgctctggaaatggcctcgcaatgaccgaaactcaagtggaaaggttaaatctggattatttacgcacataaatatgctcagttttacctacctgctctgtataccaggtccaggggcaagcaatttgtgcatatgattgttactaactttttatgtttgctattgactcttctaggctactgcaagtgtttctcctcaattatggcaacctccaagcggcatcctcatgactaatgacataactgacaaccctgaagaagctgtccattgctttgctttgtcaaagaatgattcatatgtcatgtctgcatctggagggaaaatatctctgttcaacatgatgacttttaaggttagttacaagtttatttctattgtttgtctcttatgtagaaattgaactttaatcatatggtgactgcagacgatgacaacttttatgcctccgccgccggcggcaacgtttcttgctttccatcctcaagataacaacattatagcaattggaatggatgactcaaccatccaaatctacaatgttcgaattgatgaggtattagcacatctaatggcattgctctgcgttattcttataaaaaatggaacaagattcaatcaattttttttttgattctttgcacaggtcaaaagcaaacttcgagggcactctaagaaaattactggacttgctttttcaaatgtattaaatgtgttagtctcttctggagctgatgcgcaggttatttactgaactatcaactcacaccatagagcaagccacttctgtttgtctttactgtttatacttttcctccttgtagatatgtgtgtggagcacagatgggtgggataaattaaagagcagaatgttacagataccatcaagtcgtccatcatctataatcttagacacacgtgttcagttccatcaggatcaattgcactttcttgttgtgcatgagacccagattgccatatatgaaactacaaaattagaacccgtgaagcaggtaaattctctcttcacgtgcagttcaagttaactacaaaggctatttcattactcaccttaactttactttcagtggcctgtccgggagaactcttctccaataacgcatgccatgttctcctgcgatagtcaattgatttatgcaagctttctggatgccactgtttgcatatttaatgcatcgagtttgagactccaatgtcgaattcttccagcatcctatcttcctcagaatatcaggtattctacaaaaactcaacaggacacaatatatcctttatatattctaacttactggattaaattggtactcttgcttctgaaaacattttgtcttgctgttctcaatcaatctcattagtttagtcagtgcactagcatattatgctaagaaactaagaaaatatagagtcgaggtaattgaaaacagtacttggggtatcaactacgaacacacatagacagaatagctgcaataaatcactaagactaattggactttgatgaaatttaccttaagcaaccagatctttacaataaatagttgtgtcaaccaatcctaggggatgagagatgtcgtaattatctttcaatttttttggcttatttttcacatttgattggctaatatatttattgagtgcattaatacatgtccaatgggactgctgaactgaaaaagaagtttttggaggaaaagtgcatattatctttgtttgctcagccaatgtttcttttgttcaaacttatttttaacagacaagttattaaccattatatgttccttgtttcctagctcaaatgtttatcctgtcgttgtggcggcacatccttcggaagcaaatcagtttgctctaggcctgactgatggtggtgtttatgtattggaacccttggaatctgagagaaaatggggaaatcctccaccagcagagaatggatcaaccagcgctttgtccacacctcctaatggagcatcaagttctgatcaaccagaaagataatgatgaggagtttgaagtgttacattttttgtacttgcacggtacaaattcactaaccaaggtatccttcttacaagttaattcaccgggccttcttacaaagttaacaaaagcaacaaaagtcacatattcgctgctctgttgagacatgatatatagaacaatcataatgcatcacttgcaatgattagtgtgataaatttaccactccatgattagtttgattaatttaccacaaaaatatctactggattcctgagaagtgtttttgcacgcatgaagaataatatatgttctccttttctttagttgaggatgcacacattttggttgacattagctgatatccaaacctcacctttttcagcctgacccctcttttattatgcagacgatgcacttcactcttacagcttcccttccgtagagctggttccaaggggtagtcgatgaacggacggaataaaaagacaagcttaacagcagttcatttgttgcttatatgtctcactgttatctgtattaagtgagggaagagttagtcctagtatttaattttgctgtctgtcgtgctgtgaaaaaagatgtttgcaagtagcttaagctgtagcaacaatttgtctgaacttattatcaccttttattcacaactagaaagtaaattgctgctcctatcgtttgtgttcatctctgttctcttgatgcatgtcttgcgctgtttcatccagtcgtgccacccgcgtagcacggtgtcacaatgcagctcgacctttacatatccactttgctagattcaattgctatttgagcctttgccttaaaattgctggggggagattttacgcgcatgggttatggtttctctatgctgcagtacatgttgacatactgccgtgccatgccagcgaaacaacggagcatcagccgcttttgcagcgtgccgtttcatcgccggccaaagcaggaaactctgacaaagctatcactaccatatgtaccttcacgtactactccttgtcacttaggtttgctgcgtgctagctgccgcccttcaattcttgcacagctttcggcagcaaaggataaggccgtggcctgcgtagtacgttcgtaccacgtatgtatcgccggaaatatgtacatcggcgaacaaaaggagaggcgatcgctaggcaggcatggaaagatttgaaagcgatcgagcccactgccgcgtcggcgtcggggtcgtcgttgcacgcacgcacgcactggggcgggcagggcagccagatcagagacgctctcgctggggaaagggatgcaaaggactggatggtgttttggcatgcatggctgaatgccagggagagacatggtcggtggatcgccatagctgggggcagctagcccagctgctgcactgcactgcactggttggatcagtacatgtgaccagtgtggtacagcgtactagtacgtgcagtggtagtactggtacttgggcgtcgcgttctgtttatcgccctcgtacacgcactactacgcagcaaatgcgaagctgcccaggtggtcatgtggccatccgctagatgaccgtacgttcacgggggacagtcctgtgtacggtcgacgcaggagaggtggagttaggctgtgtttagttcagcgtaaaatttgtattttggttgaaattggagatgatgtgatcgaaaagttgtgtgtgtatgacaggttgatatgatggaaaaggactgaatttggatccaaactttagatctaaacacagccttagagaggagttggcgtgagtacggctgagttcagtactttactcctaccatcacataaaaaccaacatagtaaccaatattataacacattataatactgcgaatcttttgtttaaatttatggtattaagatgtgttacatctgatattagattagttttttttatgagacgaaggagtagaatgttagcagctgattagttaagtactactccttccatcccattttgggtgagacggtggtataattgttataaattttcaaaacagttttgtttatttaaaatatatatatatagaaagcatttgcactaaatatagctttagcaatttggaagtatgaagacaaccgggtccatcaactcaatatcttgaaattaatcatccacggctgggagaatcaagataatttgatgcagtacttcaaaaaaaaagttaggtcactttcaaactgaatgatggatagattatggataaaataaaattgaacatatagatggattaaatacatactccctcaacaggagcatgtccagactcgtattattagaatatattatagtattagaatatatcacatccagtattagatttgtttttataggacggagggagtataacctagaaaaggttatctaaactatgctgatgtagcaagttcttaaggaaatcatatttttgaaagtgtgccacggataccatgtagtatgtatctcaatcgactacttagaacaatcctactatacattttgactcactcatccgatcgacgaacgactgaaacagtggaacactgaagtgcggatggcgtgaggctacactatgacttggtccgacgcaatactacttccacatcataggcaagcccatatatacagtaagtttaaacttagagagacaatgtttgacatgaccgcacgccgcttctatttttagggggggggggggggggttatattaatggagttattcatcaggcctagaaattcagaacctaaaatactaggaacaaataaatatgcggctttcttataccttttgttatgtcatgaacgtgtatattatgccatgtgtgtagcatttagaaacaaggggagtatcattttatttctcagtctatttctccatcccacctgtaacaaaatataaggatttcattgaattttaactttaaccttaatttctgctaaaattcttactctagtactagtactttcgaggtggggggagtactccacccattacctacagtaattctcctcattgatgattcgtccatcgtggaggacaaaaattgcagtggcaggatctggctgctctactcccactttggatgaataacaattgcagcagtggctgctgctgctgctgctggagcagcaagttttccgcttttacagtccggcacctggggaagctttcacggctgcctcgcgatcatgacggagaggaacgttgcgtttcaacgaaaacagaggaattgacatgtaaagattcacaaaactggtggccagtgagctggagtacgaattaattttccggtcgcaaacacgctcgcaaggagccttaatcgcaaggcggcgacgtgttaagcaacgagatagtcagaaaaaaataaaaaaaatgaaaaaaaacggaatggttagggtaattatcaactgattatgggcctgttcactttgatgccattttcaaccataccatttttttggcaaagttgctaaaaaaatatctacgtttagttcgtggccaaatcttggtaaatacaaatttgataagatttattttggctacaatctgaacaagtcctatgtgctggaaatggcttgagatctcagggtcatggcccaaacttctatgccggcgttaagttctgtgatgtacttcctccgtcctataaaatacctaattcagtgtgtgtccagattcaaatctagaattgggtttttatgggatggagatagtacggttggtttggtcaaaataggtgggcaattttggcgcgccaagttgtaaaaatgttcatcggaatcgccgtcgttttgttctaaggtgaggtgcttgtatttacttctacaaaaaaattatgcatcgtgttgtttgatcaaacttagaacaatcgtctatgtgaacttgattgctgacaccagcacgtggcactctctcagacgataacgtcacaccattgttgatggattgacaatctcaattggcataagtttacttgttgacgcttgagatccccccccccccccccccctcaatttttggcagcaatcacacatctcagaggaaggaatctgcttcaatttctagcctcctggaattgttgcattggatggaaatttgggcagtcgtctactgtcgagaatctctgcgcatcactgtgctagctaaaatacgtaggagtagaaaacaaacaaggtaatgtaaccactcaggagcagagtgtattttggacatatgaatgcagaaacatatcatgcactatacacatgtgactgtaacaggctatccgatggcatgaaatcaccctccatcaatcgatttccgtggtgtaatgtaacttttgccggacacatcaaccggcaggttgagctttagtcatctcttgtctgtcgccgaaagacgcctcatccactcaaaattagtcttgactttttgccaatgggtctccgtttcatcagttgaaatcgacgtttactaatgcaacgtagtttattatcaattttttttaacgaatcgggcagggtgccaatttcattgagtatagtagaagaaaaatatttctgtactaagtataatggaaaaattgtacaagggtgttcacgctatggtatcatcaatgagaggtgcttactgatcaagttatgggctcttcggcaacttgccggtggtccgtgtcgctcccgtcccaggggcgacccggacgacgaaaaatcctccgccgccgccccctccctcctcctccccttcgtcttgccgccgcccgagcggctcgtcggcaatgccggacggccacaaggacggcggcggcggcggggcgttctccccacaaggatgcccagcggcggggaacaccgggggcttctccacggtggcgggtcacaggaggtggtggctggacggtcggcgcggcggattaggccacgccggttgcgaatccaccttcctcgacgccggatctagcctcgccacggccagatcgggtctaggcgaccccgacgatggcggccggaggaggcgcgacgtctcggctatgctgggggtggtcttcgagcggtggcaggcggcgaggctagccccagctcgtctcttccccctctagctcccagtggctaggacggcggaggaggggaggtggaaaggcgttggcgacggagtcccttcggacggcgcgctagtacaaaaaggctttttccatacgggcaaaaggcatctttgcatgcggttggggcaaccgcatgggagagaaggtctgtaaaaatcacccttttcgcatgcggccggcccaaccgcatgcgaaaatcccattttcgcatgcggctgcttataccagccgcatgcgaaaataaattcagcaaacaaaaaaaaataaaaatccaaaatatcctaaaccctagcccgccgccgcatggtgccggattcatcgcccccgccgcccgccgtcgtcgccggcaccggatccatcgctcacgccgcccgccatcgtcgccggcactagatccgtctcccccaccgcccgccgtcgtcgccggctccggatccgtcgcccccgccgcctgccgtcgtcgccggcaccggatcggccgcccccgccgcccttggcgctggatccgctcgaggcggcagagccgcccccgccgccgcggcggtgaggaggggggaggggcggtgaggaagggattgc

SEQ ID NO: 8217 - DNA, 20933 bp, Oryza sativa
tttgtgctcagccccctccacatataccttcgcacataacttgccttgactagagcatttcaacccaaatcccccaaaatatccctaaatcggctagggtttcaacggtgaggttagcggaaagaggccgagaggtagcggctgtggcggcctcggcggtgcgataagtggcaggaggaagcgcagtgcagcggggttagcggtggcacgtttatgcaacatgttgtgatgtggagggggctgagagcaaaagtgttgcctacgtggcaatgccacgttggcggtcaaacgcagtcaaaggatgtttggaccggggtggtacattaaaccaaattcacggacctaaacatgcaattttcaagttcacggacctaaatgacaccaccacacaagtttagagaccggccatgtatttcactctattatttatttgataggttctcaaaacatttgatgagcacctggcactgaatagacagacactttgtattgtgaaggctgatgaatgagttcataactcgtggggtaaatcggatcatggatccaatgaaaaacaaaatttgaagaatattctggattaaggaaactggttgcattatcagttgacaatataaaatgatagtgatatattctattatatacatcaaatagtggaaacaggctcccaacattattttgataagaaagctggcctaattacagtagatatcataatatgacaagaatgatacattctattatgtatttcagaggcaaacccttttacttttaagtcctaaatatcaaaagctaccatagagtgcagaccggcagatattaaattgtcaagtgaaaaaagtagaaaatatttaggattcaaaaagcaatccaaaattgaatcccaagccaagtactacaatccagtccttgtattacgggcttgaagttctagaactgcccagtgcagcatgatctgcacaacataaaaaaagctcccagaatattttgaacgatgcagcacgaagtttacaacacgccaggtgtggaagacagagagaaataagatgtcctcgctttcatgaggtgagaacatgttcttgtgtgcattttacatatttgtcctcggaaactatgcagagttatgctttgagcagaggagtgatcatgtgctgtgtaaacactatagtgtatggaactaaccatagattactcggatataccattagctaaaggctaaaacacacaaaaaaactgcaaagaggaagaaaacatacccataaaagaatgttcgccatccacttttcagcctctgataaatgaaatagatatttgctgcacaagagatggccacctggagagttggcccttcttcagtagggaaaacaagggtaagcactccaagcaatacaaaagttattgctgtctgccaaatcactttactagaaggtgtttgaaatcttccctgaatagccttgactggacgtgactgagtaagttccctatactttttcttgagatccacttttggtttttttctatcagagaaactctgcatgatgattctgtcatgggcagactcaattgcatcaacacttggcttatgccctgcatacttgtttatcagaaaattcctggcagctcgaatttcttcttcagatgcttccctgctgattccaagtcgctgatagggatccttcacatggattctaggaaagatggctgaagaaattaagcggttaaaaagtgaggtgataattacaaaaaagaactaatccaaacaacaaaaccgacaggacaataaaaagtatatgtgatctcaaataaaacatgagaggaacagattgtgagaaaaagtatatgtgatctcaaataaaacattagaggaacagattgtgagactaaatggcgtgattttgatataatgtccaatgctttggccatggtatagttaggtatttatacttttacaatttaatatcaagcatgccttacagcaaactacacaatttgttacagaggtataccaagtggttcctagtaaaccatactgctcgttactataattcaacatgacaaatttggttggtaaaagtacatatatgtacttactatgttacatttttttcttacatagccctaggaagttaaatacttacgagttgacgagtcagctgtgtcaccaaatgatgcagtagcaagcggtgtgattctggtgtttcgcggtgcataacagaaaggagtactatactttgtgtatctgcatgaaggatcgcaataagatttcccactgcataaactaaagaaatctttggcagagagttgatgaggccagaagaagcacaagatacaatacctatccacattgatgaaaagtttaacactttccttacgtcccctgctgaaggccaacgaagagacaagtcccaagggtgcactcgacgccctcgaagtaaccggacatcgagcagcccttgaaggattgattgctagactatgtgccaacatctcaaggaatagttgaacagcctaaattgaggcctttcccctcctaagcacaacaacagtaaattcatcaatcacctagaacaaatttagcaaaggaaaaccaatgccatgcacaaagatacacaaccgaacgctagcagattacccacacccattaattaaaaaaagtacaatcatcacaatatacaacttaggaacctggataagaaagcaattaattcagacaaggaggaacatatcgagcgattagcagccaaccgaccgtcaccctcagaaatcaaggggtgtgtagcctgaaaaattcacaccattcaccacacagtgccaccggaaccctacatgccattaccaaccctacaacccacggaccctgcacctgcatcagcatccatcccggcgtctaacctaacctgtcctaacctaaccatcggtgcaccggcgccgcaccggaatcgagcggggtcaagaaggcgaagacgaggagccttaccgtgggaggtgacccgcgcgtccggcggaccaagagcggcggcgctgggcggaggaggaggccgcctccgtggataagggggggcggggtggtgtcgcgtcggtgagggtacaggagaacgctgcgcagggtggtggtggtacttccgtaatttccttccgatttcctcctcgtcctagatggccctatactctcagggcctaattgggcccagcccaaccgcgatcccaaaaaaggagtgggccccacctgggaacggaatgcaaatgcaatggccacggtcaaggtcgtcccccttctcctgcaggtgggccctgctctcccacgtcagcatcactccaagtgtactttaatgtgtgtctgaggaggagaatgggattgagtagattgagaagatacgtaaaataagatgagccattagctcatgattaattaagtattaactattttaaatttcaaaaatgaattaatatgattttttaaaacaattttcctatttaatttattttaaaaaaacgcaccgtttagtaatttgaaaagcgtgcgcgcggaaaacaagactcaatctcccctatcaccgaacagagcctaagtttatccacttggacagtgggggtggatacacgcacgcacgcgatcctccgccgtccgcttcaccccgcgcgggcgatcctccgccgtccgctgggctccgcctcggagatccggcctcatccgcctcgtcgtctcctctcctcctcccccactcgcgtcgcgtctcctttctttaattgcttctctctcttctcccaattgcagtcctctcccccccactaatcccacccggtaatccctctcacgatgaacggccgcggcggcgattctccggcgacgaattgctgcaggggcggttcttcttcttcgtcttcgtcttggcgccggtcgatgtgggtctggtcgttgagtttgtatgcgatttgaccgctcccacgcacctgtggcgtagttggttgcggtgcaactgttcgagctattgactgtttggctggctctctcctcggcgttattctgtggccgtttgggggattgggagtattggaatcctactcttccaggtacccatgataataagttcttccctccaaaagaattcttttcttgaccatttcatcttgccttttggagttttgttgacctgggctaaagttcacttctgtctttgcttaatatgcgtgtgggagtagagtgttctgcatgctataaatggaaggtttcttttttgtcatcgtgcatggacagggctaagcgctcgaacagttttggagtgtttgaccgttttatgtgtgtgagaagtggatccctggggattatatgtgttatttctaggcttgcagcggaataaggtttattgttggaaactttctttctaagatcttgttaatttcattgatgggactagtgcacattcaacaatagtaagttttagaaaaggaacaacaaaggtgcactttcaatatgactaggatgtttgctctgcactttagcccctatagtttcctggacacgctaaaaaaacgcccttcacacttatcttaccttatactaaagccattaaacttaagggattttttagacaatttcttgttttatctcctagagctcacaactaggtgctttaacctccgaccagtgcaccgttcatctccatttttagggattaatcagccactttttgtttaatcatccgactaatcgtccgcatattgcacttgattatcatttaaatatcttttatgaacttcatcttcaagatgtttaagaatattcacaccacagagtacttctcttgatgctcataaattagcagttccagtttgatattaaagtttttagtcaccatatacctttaacttcccaatctaactttgttaagatccttaaattatgtactttatggaaaatcaataaataattcaggtaaatacgatctgttttttgtttttgcattatccaaatagttgttccagataccttttcggtatccatatgtccatatttacttactgcctgagtaactgagtactttttctcggtaatttcatatgtttttgctaagctaaggttttgggcttataactgtcgagtcattacagttttcctttacaagatatgatgatttttcccccaatatggcaatatctaatcattaccttcggattttggaccagttctcctaagttcttcacaggaacaagtctgcaatcaggatggtttctgaagtctttgctaactttgagcttagtgacttgatgggtaattgattctcttgggtgttgttgcatttgtgctgtaacgtggataggagtcatggaaggtgtggtaaccagttcagttggtgaaccaaatcaagacaatgagccaagggattcttcaatagaacttcccagagtcattactgacatggagacttcagccatgcatgatcctgaagctcaaaagctaattggacatgaagctgatactgaattaacgccttatgaaggaatggaatttgagtctgaagatgctgcgagggatttctacagcaaatatgcaagacatgcaggttttagaattcgaatcagcaggtacactcgttctagacgtgataattcaataatttctcgtcgtattgtctgctcaaaagaggggtttcatgaaactcgtgattgtgaaaacctccatgtggaccagaaacagcaagcaagggtaggaactagagttggttgcaaggccatgttaatgattaaaaagtttgggcctgacaaatgggttgttaccaaattcataaaaatccataatcatggaccggttccaccaagaaaacctcatgctggagaacatcatgattgtgatctaatggaaaatccacattctattgaggtggaccctattgatgagccagtcgagggtatggaatttgaatctgaagaagctgctaaattattctatattaactatgcgagggttaatggtttccgtgcacgtattagcaggtactgccgttcaagacgtgataattcaatcatttcacgccagatcgtgtgttccaaggaaggcttccgtgaggttcgagccagaaaagatattacagatggaggcaaaacaacgaagcgccctagaatgataacaagagttggatgcaaagctatgattgtagtgaaaaggatgaactctggaaaatggatggtttctaaatttgagaaggagcataaccattctttgttatcttctagagcagtccctattacatcaaatgattcttctagagaagttattgattttgctgcaacgagtaatgatcctaatgaagtaaaggctgaaggatgtagcacaggaattcaatgtaattctacagattcactaactgtcctttacaaccatctatgtcaggaagccataaaatttgcaaaagaagggtcagttacagaagaaatttaccatgtggcaatgaatgccttgaaagaggctgcagagaaggtttctgaagtcaaaaggagtcacccgacaatgtcacagagtaaacatgaagttatgcaaatggaaactatgagtgcttcgcaatgttcaaatgatgacaaacagaaaacaatgacaccacagctcaagtttttgcaagagcccagtcccagtcttgtgctaataccaaccaaccttttgactcattcaagctcgaattgtgctgacaatattccactctcatgtgatttaactataaatggtaactatgttatgataatgataagctaatccattgctttgttagtgctttctccacaccgaatgatgttgggataattgttttatttgtaactgttgcttttgtatcaacagcgggggaagtcaagcatgtatcagaaagttcttgtttggctgcgaacagaaaggaagactcttcgcagaaatcccaggttacaaattacctgcttgcttatatgtcatactgttactaagggcctgtttggcacagctccagctccagcttcaccccttctggagctggagctcagccaaacagtttcggctccaccaaaactgggagtggagctgagtggagctctctcacaaaatgaactagagttgtggagctgggtttaggcagctccacaactccactccagactcaactcctggagttaaatttaggagttggagctataccaaacaggccctaatatacctagacgatttgtgtattctgtattggactagaaagatcttatgcgtagttctgaccgcggattccacttgtaatcaagccttacagggaaaggatgaaaggtttcatgtactttctaaagaaactacggttgctattcctgcgatacctctcacgctgtacatgcctataatgaagaatccaactggagattctgcaggtaatccatttccttctgctgtttacaggaaataagtgtaaaagtaatatttaaaattctagatagaaattacagatgcatcagtttagaaatctattagatatttatgcctgtcaattgttttcttcatcatatgtggcaagataagatagtaagtttacaacactaaaattttagaaatgacccaataattatatgtttagtaatgcctcttgacaccattttcttttgaaggaacaagaatattcgtgtgtggtctgttgtcctcatctgcaaaaatttaccaattgttttgcctactatagtagtttgcctgacaatttagttcgatagatcttgaaactcttcagtttggcatttctttgtttctttggaatgataggtggcttggagcattgtgtttatctgggttactttttttcttttttgcaatccaagaacataagtcatttaggatacttaataaagcttgtatagttgtgcaaatatggttataattcataccattgctggtagctttcaaaaagaggttatatcatttctagtgaatcactgtgagtatttactatcataaagcatttgcactgtacttgttaaaacatttactagtattatttgttttcaattccccagcgatcacatgagtgcttactcatcatcataaagcttttcatcatttagtcgatttccctacttgataactatctaccagtggatcttgattgattgctacctgccgttagaatgctctcctgacatcttcccattttcctggaatgcagatggccaatacaggttgttggccgctcctattgaagcagttccaatttcataccgtcctgcagaacccatccaacaaccacacggaagttttcctaattcagggccactacccggttttctacctaaactgtacaaacgaggaaaaggtccaaactcgctggtgcatgctactgctcttgcttgtggtgctcgtgtcgtgcctcctgaggaggctgcctcgctgatcaaggctattgagtccaagatcagatctggaggagccacaatagcaaaattgccttcaagcagcttgacacctctaattcctgaggtcgcctctatgtcatcttctagtgaagatgatgaggaaaatgaccacagtgagccactgatggcgagtgttgaacacaactgccatgatcagagctctgaggaaatgaagttggaggctgatccaccatcagagttggaaactgaagctgagaattgttctgcgcagccagaaaatgaaaacaacggtcctactcattgctgacaactgagaagtgagaactgaagtattgaagctttctgaaatcaaagccccacaaggtagtgattatatatatactgtaaattttgagcatttacataagattggatttaggattctaacagcttgtctcacttgaattatagattctaattgtgataactcaaataatttacttcaataaaggacttgtaaagagggtcgccttgctgttacaatatttgtggataatgtatacatgcacttttatagaaagaaaactaatgtcacagtatcttatattgaaattgggtccatatgtctggagaaaacatttagccatgttatatgaccacatttcacggtttaagaatttcacagacgaaggtccaattcgtgtgcaataattagggaaaaatcgcttgtttttttttgacaattcctaatatcacttttgctttcatttgaatggtctcaccaaaactcctgcaagctgaaatatagacaatagatatggttgcaaatggttccttccatgctaacatctccattcttgaaagctagaattttctcaaataaattttctcaatttttttctcaagctagtttagtttcttgaagctgaagctcaattttgatactgcaatataaagcgtgcgggatgatgtcgagcaccacaacgtttacctggtgtcgttcatttctttgaaaaacagcccccttcttcattactcttttatgcggttatgcctgaataatcctaatcaaagagaaaatgtcaggaagaagccatggtagtttgccactcgtgcacgatccggcactatgttgaaaaggttatcactcgtttaatcaacattatcgctgacctttcgacaacgaattggcagagcaaatattgcactaatccatggcgtcgccatgaaaaggaaatcacccctatgtcaaacggctgtcgtaccagagcagcagtgctgtaccagtgtacggtgggtgaacaagattctcgtttacttttttctcgggagagaggttcaaaagtcatagttctgactaacaacatttcttggaaatcttttaagtgattcccttaatgctgacacgatcaatttctctgggatatttgtatgccgtgcagttctgatcttctcagtttaacgaagggaacgaacctccttatcgtaagttgtacttgtattatcgtaaaaaaatatgtgtattccttttgtgttgaatgtgtgagaataatttttttgaaggtacaaacaaatgaataattattataaagttagaaaatgaatatagaacagtattgtaagaaattcatatgtaattagttttttttcctataaaaaatcatactgtataacagttcaagaagcatactcattaatccattcatcaaaatggaacaagcagggcagaatggaggtgtctgatggtatagtaacagaggagcaagcactggacatatgatcaaatcaagatgctttcaaattccaattcagaaaatagagatgtgtacaggggaagggggaatggagcatactgcatacacaccgtcaagctagacaaactgacagaacctaacagacacgcatgaaacttataggaagctagctaaactctaccggtagctgcacatcgatccaacattttcgtcatcatcattggcaaacacgcatagacccacttctttattgtaaccaactgactagcttcatcgcgttctttatctgcatattttttattcttcagtaactcaaaagtttggtccagcagcgaggatcttgtctgtcaggctgctgtctcccccgatcttgtagttggcgaacacctcgaagttcttcttgaacaggccagccagcttcaggagcgtctccttgtacgcgcccttgtccgtccactgcacagaggccacatttccgacgaagaacaactcagactctgcattttttacatgtatagcagaaatggcatgaactgatgcgtgatgctacggagcttacggtgttgatcgggtcgaggatttcagacgggatgccgtcgatttcagtggggatctccaggccaaacacctccgtcttcttgtagttggcggtgaggagctcaccggagtggatggcgtcgatgatcttcctggtatacggcagcctgatccgcttgccaactccgtacctgaacagtgaattcagagttagttcatgccacaggtaaatgtgcaatggtgtggacgctgttacagtggacagtagcagataccttccaccggaccaaccggtgttgacgagccacccggtggcgccatacttctgcatcttctcggcgagcatggcggcgtacttggtcgggtggagcatgatgaacgctgcaccgaagcaagcagagaacgtagcctgcggctccttgatgccatcctccgtgccggcaacctgttgaaatggcaatgcaataacgaagattcaggctaaattcctttgttgatcatcaaggtgataggaaggtaaggcaggtgactctgcttctgaacaaaaattgtttaccagagcagtgtagccactgatgaagtggtacatggtctgtggaaggtttagcttgctgacaggagggaggacgccgaaagcgtcgcatgccaggagaatgacgttcttcgggtgtggcccgacgcacggtatcttggcgttggggatgtactcgatagggtaagcagcgcgcgtgttctctgcagaaaagttcagagttgtgagatttccattttttgttttttgctgtaacttttgtgactgactgaaaccggattgcgctttggagataacttaccggtgacagatttgtcggtgtaatcaacttcacgggtgtgctcatcaaagacgacattctccaacactgcagacgccaaacattttcgatcaatgaaatggcaagcgggagaaactagaatgatcgactaaattaaactgaaggttcaggcaactaccggtcccaaacttgatggcattccaaatatcaggctctttctcctgtgacaagtctatgcacttggcatagcaaccaccctcgatgttggacacgccagtgtcactccagcagtgctcatcgtcgccgatcagcagcctgttgtggtcagttgacagagtagtctttccagtacctgccgattaaaataacacatacacaaaatcagccaaaaagatgacagtaaacaacaagggcactaacaacacaaattcttcagtgaaacaggcatcatgcacacagcaacaaagatctcaaacagatatgatgtattcagttattatatatatggtgatcaaggggaacgcgtcagatgagactgagcaggtgacggcaccacgggtgttttttcatttcatccaccgtggagagccatcttattacctgacagtccaaagaagagggcgacgtcgccctgcttgcccatgttgcagccggagtgcagggagaggatgcccctcctgggcatgaggtagtgcatcaccccgaagagccccttcttcatctccccggcgtactgcgtgccgaggatcaccatctccctcctagcgaggttgatgtctacgctcgtcgacgacgtcatgtagtgcgtgtaccggttgcaggggaactgcccggcgttgtatatggtgaagtccggcgtgccgaactcctccagctcctcctccgtcggccggatgcacctgccaagcccatttcccccacatatccattccggttactactgcaattctactacttagtacgccgctgatgtgagatgatcccccatgtcttggtaggcatgcaataggattccagcacacacacacaacatatagtcacatatatctcataatcatggagcagtatacgtcaaggtgaacttatctggtggcgacacgaacgagcgacctaaagatagtgcaaagtgacggcttcacttacatgttgtgcatgaagagcgagtggtacgccctggccgagatgatacggactttgatccggttctccgtgtcccagttcaggaactggtcgttcacaaacacctacagaaatacagaacaaaatatagtttgttatcaactgctgatgtaaaaattactgacacggtcactgaacttgagagtcgtatatcaccttgtcaagggagttgaggtagtcgacggccctctccctgttggtgaggaaagtgtgctcgtccatctcgatgttgggcgaacccctgcagtaggagagacacaggcaaaacagagtgatcagtcagctgcaaatcagcaagcagagcctgcagaaacagagctttgacatgcacaagtagagtaggcggtgaactcacttgccccaccaaagctcctgcgcggaggcctcatccttgacgatgcgcttgtccctcggcgaccggccggtcttggcgccggacagcgtcgccagcgcgccggtggacgtgatgaacgaccccttctcgtacttgatcgcctgctcgtacagctctgctcgcccacatcccaccagaaaacacgtcacttacacatgtcacgagttataatccctgaacaaaaattacagccgttctggcgtcgcgtcgcgtaccagcaggcgagaggttgtagagcacatgggtgaacttgagggagctgtcgctgacggcgatggtcggggtgacgtgcgggtggtggtggtgcaccggctgcgggtgcggcgacggcgcgcccttcgccgcggcctcgcccttcctcgccggatctcccctgacgaccttcggcccggtctcacgcgtcagcgacgccaacgacgcgctgcatcagacgtcatcgtgacagggatcgttccatcagttaattaccactttatcaggtcaaaataataataataagaacatccaaagaaaatcagcacttgctcagttgcttgctaccactgctaaacttactcctaaataaaagtaagaccatgtctcaatgaactcattgtgtctagttagtccgaatagaatactgtgtcgagcggcttgtgtagaacgatacgaggtttcctctaatttcttgggggaaattcaggcgcaagttacgcgacggcaacagctaccgacgccgccgcgtcaggctgatgaggagattatcgggtatccccgcggcgcaagttgccgccccaaattgcgctcgcgttcgttacgtctgagacaccgcatcggcggctggtgcgtgtcgtatcgtatcccccaacaagccctatcgcgataccgtcgacgttgccgatcgacacaaacggcagcgtgcatgacggaagcatgtattgctctcccaaaaatacagctaaaatcaacgcctctgttgtctctaccgcccaatcgaattctgtcacgccaaggttcttcgctcgctccccagcatgactgcgaaatcgtattgggatttttgggggtttgcgtggattcggtgcgatgcgagggggaatgcgaacttgtgcggtgcgtgcaagcgggtggatgttctgggcaattttgtgatgcggtgcggtgcggtgcacgggggatgtcacgtgaaaggctgcggcctgcgggcagcgggcgtgcatggcacggtgcggacatcttgtgatgattgtcctttctgctggaaaacgacctgggattgtaatccggacctacttttttttttgtccaactttttgtgcgtattagccgattaacccacggtaatcctagtcccaacattacttctttttttttttagaaacacattacttggtttggccccgtgagttacttttggtttatctttattcgtttcatttacgctctgaactctacgtgtctgttacgaatttaggttgctggatatggttgacacgcccgtcctccaatgtccacgtggcagaacaggtgcacaactaccattaccatggtccatcctttcgttctcttccatgtgggagtaaaattatccagcaacaacgtcattttatttttttttactttcgtcctatctaaaaggggattgttcgattcctcctcttcattttccatttccatttctcccggctaaaatttcccattttcatttgtcattcccttgttagttttcttaacaaatgcattggccagtggccatttccaattcagattgctcgttaggaagcaaaaggcaaagcctattattatacgagcgttctcaaaaaaaaagagagagagagagagagagccgaggagtcacctgatggactggagctgctggcgctggcgctcctcctcggagagggcggcggcgaagggcgaggaggcgccgtccttgatgggcgtggtgggcgccgaccgcttccgctgcagcgagtggagctcgtcgatggtctgcgcccgcaccggcgccgagctgtcgtcgtggcatatcccgttctcgtgcttcttcgtcttcgccccgtgcgtctcgatccgcgccagcccgttcggcgtgctcgccatggccgtctccggtcgcgcgaaaccttcaaaaaaaaaagtaaacagtcacgttaattagcaacgccaacataacagcgctagttacgatttacgacccggttctgccattgatgcttgcagcatccaaatgccggtgcaaaaaccacggagaaattaaaagagatgatgaacacgtacgaggcagtcgaggaggagatcagcaacgcgatagtgtacaagatgacaggacaggagtggagaggtgtggggcgtattgggcggagtccgggtgcgcttttaaaggggcagcgagttaaccatggttaggtgctctaaccatgagtaggtgttccaacctgagttacgaggcccaaataccgacgtcgtcgatcaggattgagaaatgggaaaatatacggtgaaaactatgtatacggtgaaaacttaaaacctaccattaaatcgaaaaataaacgtctaagattcatctacgttatcacgggtaaaaattttactcgtaagtttacttatgagtaaaaattttattgagacttatattgacatggacgattctcgtacatttaattttcaatttaatggtaatttttgagtttctaatatatatgatttgcaccgtatatttgtcggactttctgtcccacgggaggttgtggttaacgtcggaggctcggagcgagaggaatcaccaccaaattcgctgcatgcacactttgcacggttgcaccaggtttgggacttggataaatgaattcagacggcggttaactggaaattggttggattagctaagctacgaaatggatttgtcacacgcttttccttttgtatagatgctcagagtaaattatagtttacagtagttatccatcgaaacgttccacatatacacttataatttttttcctttgaaatcaacaaaaacaaattcgtggtaacttgttttcctaattagcaaatttggctcagtagattcagtgattcacagtagtcaccaccgttgtttccttctcaaaagagtatatctatatatttatattaattaatttttacaaaacttatcttttacaccaactggtactatgctcctgcttttcaacaggactaaaagaaatactaacaattagtttgatggggttgaattttatctatccacttttttatgggttgattctcgtgcagaaacactcttttattttgtcttttaggcaatatggttttttcatgtggcggatgaagatgtgcgagaagatgtagacgactatctgattttaatagattttgcagtattagtagagatacgtagaagcagaaagaaaaggaccatcactaatctcaattgcaaatagaacaatgtgattaacattattcatgtggttagcttttataaacggagcaggagatgacgagatgtagctgtaaattcattgataggaataggattaacacccgtagcagtgagaactggattgcctaagatatataagtaaacaaattggccaagtatgtggaaaaggcattagtactacaaagtagagtaatttacaaataggattattatgcatgcttatcatctgcaccgccaatcatccagctagatcactggtgcgattatgcaagtcctttgtggtcgccattatcattcgcagataatctgaccatcctgggtcggcgcaggtcggccttcacctgttcatctatctagccgttatccaacctctcaagataaatccaacaaaaaataatctctcacaaagataatccaacaaaaaagggtgtgcacagctgagcagcccgacgtgccctctaaaaaatacgtaataagaacagagagcagtgttgacatttgatccagtcccaaccaggggcaacacagtacggtcattttacggttatcacgtatggtgatcttcttaatttttaaaaccacaataaatctcatgatgatttgtgtgataacagtcttatcattgtaaacttacctaaaatgatttggtgaacctgatcctaactcccaggctcccagctaatgtgtctgtgtgcgtcgcaaacatgcaattgcagatttgcagtcatgcagatgtgtacgtgagatggattggatagggacgacaacttattgctcctacgctgcttaagttgaaacacccttttcaacatttgttctgtgaataagtattccatctcaaataaaaaagtagtactagtacaagtcttcaaacacttgcactatactagtctaaaagcaacgaatttgctgtgcataattcaactcaagcgagtctacttcaccagtcgattaatgacagacattaactacttagcctagtcatttttttcctacttttctgatgtgtatctgtccttttcattatcgctcccccaatttactactcaccgctaactcctcaaccatgagatttctcgagattttggtgaatgaaggggatactgccgggaagctgagggagtaattaattaatggttaatccattcacgttagggtgcatgtaaccaagttggttccgtgaacccagttaagcgtagtggatcagatgccatgaaatcggggaaatattaattttcctgatcattttagtagtagtgcattttgcactcagaagcgaaatggaattgtgaaaagtatggtgaattttcttgtaagcttttatttttcttccgtcaattaatgactcttgataatgcttggaagtagtagtagtggtgactatgcatccctgttgtataggaggtgacatgaggaacagagggaaacgtggagcttgatgcgtgtactacatccctccgtaatgcaagtgtaagcgtttgactcgttttattattgattattctaccttcttcctgtgtgtatacatgagtttgtctttgctgtccatgtgcagatacatttctggttatcttcataaaaaaggaagtcaattgccacggtgtatatccgacgcgaatccgggtcacactcctcaatcctcatctacatggcattggctatgcacaacattatcctctggatttttcttcgtgtatttagacgtgttcctactttttttttttgaaactcaacgtgttcctagttggatgccctcggcggcttcaagctccaggacttgaacgagtctccaactctccaagcacgagcgtgatggcctagtagcagcagcgtgcccttgccccttgctcttggggcagtaacgggaggacgatgtttcgccgaagttattgatcgagccgactaacgactgcacgcacgagtggacaatgtctttgatcattcatcactgggtcagtttgctcctttttttataaaaaaaaaatcactgggtcagttagttagtcagaccttctttgtttaggcttagacttattggcctagattttttaagtcaacttattgacttatatgatttataagccagtggatttaatgtcctaagtttagtggtggagttatacatctatctcatataagaaaaaaaagcttctctaacctaacttttggcttaatagtattagagtggcttatggctttaaaaaagtcaaataaaaaactgcttgtttgttttggcttagacttttcgacttataaattggcttataagcctaagcaaaagagggcctcaaaacaatcgccgtcgaccaaccaaacaggaaacaagatttgagaaatagtacgagttagtagttcatatgctacggcgcctacaccaggttgtgcacaatgcaccgctaggctaattctgaaagtagacgtgcctgttgagcttggacgacgtagcacgaaacgcgatcgaaagaagacatcgtattgttcatgggacgcgcgttaatgcgttatagatggggctaaaaccaaatggcgatgggaacacctatatatttatcgataaattttctcctaaaaatttgacagatgtaattatagtataatcgtagtgtaattacactgtaatttgtatgtaattacactgtaatttgcatataactacagtgtaacttgtatataagtttcacgtaattttgaatcgttagatctattacaagatttgttttggtgaggaagaaaaaacaatcacagcacacatatatgtgaaagaatttgttcccacaacctccattttaccgaaataacatgttacggagagatttttgaaagttacatacaagttacattatagttacagtgtaattacactacgattgtgtaattacatgcaagttacagtgtaattacactacgattgtactgtaattacatctgtcaaatttttcggggaaatttgtcaacaaatatatagcaaaattgaatggggattcaccccctccatccggccatcccatgagatcggtgcacacacgcgtcggtgacaggcgccgcgcgcaatggggaaatgggaaacgggaggcaggcggcagtgacaaggttgcgccacacgcgcggcggggagcggttgcgtacgtcgattgttgcgtacgcctactcgcgctggcggggttttatggccgcgcgcgtcgggcgaatcgaaggcttcgcgatctcgcaaacacatgaaccgtggcccttgcgcgctcgacgtcatgcacgtaatctgggcagttatacacaccaaccgcccggcgtctggctcgtcgtcacgtcgtcccccgctatcctcttcacgcgcgcatatctatctatctatctccgcttttgcgtggcgtggctgcgcgtgacggcgtgaggctgttaaatgcggacttgtggcacgtgcctaggcaagcgcggtgagcctctctgttttcaaacgcccggggcaggttgtaacgctccgcttttcgtgagtcgttaaaaaaaaactaactcggcaaaatcctaattgcgaaaattttcgttctttgtgtgagagtctaagttgtgccaaggatctcaatttaatcccgttgttccctctcatcgaaatcagaatcctccacctcgaaaattcctcttccgattcgagtctccaaaatcaaattccgaaagtcaatcccttcctttgaatccttgccgaatattcgctccgactaaaaaaaaaaaataaatatccaagtttccgttttgaatctcttccttgacttctcctcgagtctcccttgattcctccctaaaccatcgagttcgaatgtcaaatttgaattcgaatccaaaaccccaattcgaatccactccaaatcagtcttctctacaaaagtctattttacctccctcgtgatgatttgggccgaaacctgccgctggcccatctcttctcagctccctccaactccacgtgcgccgcacgtgaccaccgagagagagagagagagcgctgtctctctctcccttccctctctcggacgttctctcgctctctcgtcctcttcctctctttcgctgtctctctctctctctctcgttttctctctctcgcgccgacgccgctttccgccgtcgccgcccaaaacccgccaccgccttcgctctttcccgcgctcgcgcgtggccgaccggccggtcgttgccgccgtcagccctgccgcgcctgcgccgcgcagccgcccggttgccgccgcgtcaagccctggcgccgcctgcgtcgtgccctgccgcgctgccgccccgccgctccacgccgctagcttccaaggccgagagaggcatcccctgtctcactcccctctccctcctccttttcccgtttcggcaagggtcaagccctcctttccctcttcctttcccctttttcccgaccaccgccgatgtcatccatggtcccagccgcttgcggccaaagcgcggacgctggtcgtgcgactgcaccagct

SEQ ID NO: 8218 - DNA, 12750 bp, Oryza sativa
cacctaaccacatttattgcggtttggctgagcgtgtcacgccgcatgtaacgcagtgcagtgcactagtttatccagtcagtgaccagtcacagaccggtcagatcgcgggttaggtggcgacaggcgatctgacacacgccttgccccatcccgtcaggacgagggcttctaggcgctcgtccccagctggagctagcgtgttacctcccagagatggcacgttagtcctagtcagatatatgccaggcttcatcctaaccattgcaggcaagatgttgtgtgaagaagggcgaacatgtagattgctaagctgacacgtggtggacaagaatgaccgacgtgactggtctgacaccggtcatgtcgtcagcagacagccacgattccacgtcgcacctgctcccggcgaaagtggaggtagttgtggcccgtctcatcagaaggtgactcggacggcaactatacaaatctcggtccatttatgaaaaggtggggtaagtccccacaaaaaaagagagaaatggtgcatgtggtatccccttaagatataaaaggaggaccttgcccactgagatggggattggatttttcggatggagaaggatcagagagggagagagtaagagctctctggttctccagctctttgtagcttcttcatacatagatccaccaaaacacaggagtagggtattacgcttctcagcggcccgaacctgtatacatcgcccgtgtcttgtgtgtttccattctcgcgaaccttccacatacagagagcttagaatctcaccctgagtccccggccgaaccggcaaagggggggcctgcgcggtctcccggtgaggagccccacgctccgtcatctggcgcgccaggtagggggctctgcgagtgatcttctgagctctcgcactcttgcgtgtgcgccaagcttttcctgttcagcccaatggccgaacaagcaaaggcgcacaacctctctccgagcgttagcggtgacgatgggaagtcaaacccacgccgtcgagctcgtactccatcgccccctccacgccaaagtcctaggagggaggaggtgctcgagagggtcgaaggatccgcgacttcgacatccacgggtgatggagaaggacggcgagacggggagcgtcgcctcctcgtctacggcgacggcagcacgccccagggtgcgctccaagctgcgggcgcgctcctacgtcacccgcccattgtccctgacccggagtctccagcccaacgttggctggacgacgtggccaacttggtcatgacggcacggcagcgcctaggtgctggtgggcggtcctccgccaccaagacctctggcgctgctaccaccggctccgtatcgtcaaggcggagggcgcggcgagcggcggctgttgctcgccattcggccgccactccttcgtcagcgcctccgacccaggaagatctgcgtggggggccggatgcccgcatcagtatcgagcgccggcgtaatggccgacgtgctgcccacgcaacggagggcgcctcctcgtccggagtgtcacatcaacacggacgcggggatcagccctccgtgcccccggttggtggtgtcggctgtagagcctttgtggcgagccttcggaacgtccgttggcccccaaggttccggcccaccatcgccgaaaaatatgacgggagcgtcaaccccgccgagtttctccaggtctacacgaccgggatcgaggccgccgggggtgacgatagggtcatggcgaatttctttcccatggccctgaagggacaggtacggggttggctaatgaacttgccacccgcgtccgtccactcttgggaggatttgtgccaacagttcaccatgaactttcaaggcacatatccgcgcccaggtgaagaagcggacttacatgcagtccagcgaagggatgatgagtcacttcgctcatacattcagcggttctgtcaagtccgcaacaccataccatgcatccctacacatgcggtgatctacgcgttcagggggggtgtgcggcacaaccgcatgctcgaaaagatcgcctccaaagagccccagactaccgcggagctttttcagctcgtggaccgagtggctcgtaaggaggaggcatggacctggaacccctccggttccggtgtggcagcttcggccgcccccggatccgctgctcagacagggcggcgtgacaggaggaggaagaagaggtcagcccataccgacgacgagggtcatctcctcgccgtcgagggcgcttcgcgggccacccgaaaggggaggcctgcgagcgacaaaaagaaggaagccgacgctccctgacctcggctacttggaagagcgaaggtggcgcgcggcccttcgagccgcgcgcaaccagcagagcctgcggcgctaccatcagcgccacgtccgggcccgataactctgcgtcgacgacctcgtcctacgccgtgtccaaacgcgtgctggactgagcaaactctcaccaatgtgggagggtccgtatcgagtgatcggcgtcccccggccgggctccgttcggctggccacgggcgatggcacagagctgcctaacccatggaacatcgaacaccttcgtcgcttctacccctagtgggggtcgggtgtcaggtcttgggctcgggccaaccccgcacccccccgggcgtgcagggttggccgggggcttatcttttttctcttccgtatttcaataaaagcattttcgatttcctaaaggctgtatctgtgctgttgtttccttttgaaggatcttgacttgaaataggtcactcgtgttcaatcctgccctcgggggctcgggtcagctaaaatcgccaaacggggcccagaaccgagccgtgccccgggacgtggtgaactccgggggggagggaatcggcaaaaacccacaatcgggtcacccataaccctcggtcaccacgctcccggcttggccagtctcgacatgtggatctccccaggcactagccttgacccgcgccgtttgaggctgggacctgggcacgagcccttgttcaagccaagacacagaaggaccgtggcacagaccatcctcgtctcatacacagaacaaatgaaattgacacaaaaatttcctctttatttgattgcagattaaatcagcctataacaagaaggaggcccgaaggcctcggaagaagaaggaaaagaagaaactatttaaagattggcgggggcctgggggctcactccgatgcacccgtgtcgccagcctcgtcgccactgtcggttttcccttgctgatgcgcgcgatttgcgaccgccgggattctgcccgaagagagagagagagcagggaggagaggcccccgagccgaacggcggcccaaggcccccgacggccggaactggctctccgcctgcttgtccgacggtgccaggcgcccccgacccccaggatggccccgaggccactgcgggaaggccgcgcctgtcgccctctgaccccgaggtcgtcggcacagaagccgagtgcgccccgcgtggcctctcggatggagagcgccctggacatgtggcccctgacgaagaagatcggccccaccgaaaggtgcagcggcccgtctacttcgttagcgaggccctccgggacgccaagacccgataccctcaggcccagaagatgctttatgctatcctgatggcttcgaggaagttgcgccattatttccaggcgcatcgggtcacggtggttacgtcttatcccctcggccgaatcttgtataaccgagagggtactggacgggtggtgaaatgggcaatcgaactctctgaattcgatttgcgctttgaaccaagccacgcgatcaagagccaggccctcgccgactttgtggtggagtggaccccagctcccgagctcgtctccgtccccgaggccagctcgagcccatcgcagctgcctcacaccgccctctgggtgatgttgttcgacggcacctgtaggaaccggccccacctgtcaccaggccttagaagtggcgtcacgcccgaccgcttccctcggggagggcgatcgccctggcataacgccgggggctactgtcggtgacatgggaccgggagtatcatgactagaggcttgaggcagacacaatcgcccacgtggcctggcaccctcggggggcgtcgggcccgagggtgatgtgttcgccctcctctttgtctccccgagggggtcgggccgcacccgcctcggccccgagggccgaggcgccccgacccctcgtgggtctttgctctgcgtgtatgggttaggtgagcacagtggggctcacctaaccacatttattgcggtttggctgagcgtgtcacgccgcatgtaacgcagtgcagtgcactagtttatccagtcagtgaccagtcacagaccggtcagatcgcgggttaggtggcgacaggcgatctgacacacgccttgccccatcccgtcaggacgagggcttctaggcgctcgtccccagctggagctagcgtgttacctcccagagatggcacgttagtcctagtcagatatatgccaggcttcatcctaaccattgcaggcaagatgttgtgtgaagaagggcgaacatgtagattgctaagctgacacgtggtggacaagaatgaccgacgtgactggtctgacaccggtcatgtcgtcagcagacagccacgattccacgtcgcacctgctcccggcgaaagtggaggtagttgtggcccgtctcatcagaaggtgactcggacggcaactatacaaatctcggtccatttatgaaaaggtggggtaagtccccacaaaaaaagagagaaatggtgcatgtggtatccccttaagatataaaaggaggaccttgcccactgagatggggattggatttttcggatggagaaggatcagagagggagagagtaagagctctctggttctccagctctttgtagcttcttcatacatagatccaccaaaacacaggagtagggtattacgcttctcagcggcccgaacctgtatacatcgcccgtgtcttgtgtgtttccattctcgcgaaccttccacatacagagagcttagaatctcaccctgagtccccggccgaaccggcaaaggggggcctgcgcggtctcccggtgaggagccccacgctccgtcactgtcatacgcacattcacccatatgaaaatacgtgtgtataacctacccttattagcatctcccaaagactgggccggcgtatcttcatatttacgaagtcaacattagatgcatcaatgtcgatgggtacgtcaactaccattaaaagaactagcaaggtggcccgcacagattgcgcggctagcatcattatattttctctcatataatagcatatatgttttctcattatattattcaaatatattaaaatgacaacataattttaaattttgcaataactttacaaaactactaatgtgtaatattcatattatattttatatacgtgttagttattaattatttttaatatcaaattttagttatttgtaattatatatattcttatatggactctagactcgtcttttaatattcctttcttttttaattccgaattttctgtaaattgtatttctatatagacactatgctcttcttccaatattatttatttttatttctgaattttcatattatattttatatacgtgttagttattaattatttttaatatcaaattttagttatttgtaaattatatatattcctttatggactttagactcgtcttttaatatttcttttttttaattccgaattttctgtaaactgtatttctatatagactctatgctcttcttctaatattatttatttttatttctaaatttttattatttctaattttatttctatgtggactctaaacttatttttcaatattctttaatttttaatttcgaatttcagttacttctaaattgtattcctatatttgtattcatatattgaccttaaactcttcttcccatgtttttcttaatttataattttagttatttgtaaattgtatttttatacggactctaaactctacttttaattttattatgtttattatttcaaattttagttagttttaaattcctatatggactctatactatacttctaatattccttatttttaattccaaatttttattatttcctaattgtatttctatatggactctatactccaattctaatattccttatttttaatttcgaatttcagttatttcctaattgcatttctatatggactctagtctcctcttctaatattctttatttttaatttagaatttcagttatttcctaattgcatttctatatggactctattctcctcttctaatattccttattttttaattccgaattttagttatttcctaattgtatttctatatggactctattctcctcttctaatattccttatttttaattccgaatttcagttatttcctaattgtatttctatatggactctagtctcctcttctaatattccttattttttaattccgaatttcaactatttctaaattgtatttatatatggactctagtctcctcttctaatattccttattttttaattccgaattttagctatttctaaattgtatttctatatggactctgctttttctttttctctgattaatgtgagaatttctaggccatgagagcgaacatagaggctcctttttctattcatttaataatataatagataataatttagccgtaaatatgagtacccaactacccatgttaagtctagcacctgagtccaggtgggatggttacaccataggaacataatcagttgagctacgcttacttctacgtagctatattctacaacgaagataatacatgaaattaattcaaagaatgttacaaatggttacgaagataaaatatatagatcgcaaaattaaataggagaatattttgtttggttaagaagagaatattgatagagaaaatgcctgatttttaaacaaattttgattacttctatattttagatcaaattaatgtggtactttttcatatgtggtcggctcatctcataagcatatggtacgcactatttatatatgttccctttgtggcaaaataaattaacttatagagtttaaactttatttcaaaataaaaggttagctaccatgtgattctagacgatgctccagttgctatccgtgcgtctgctttcttaaatattttgaaatagagatgttgtgtaaatatctgtattaaacctcaaatttgacgtccaaaataaaaaaggaaacacggctaaagtttgaaaaagattcagggtgtgttgcgtgagtgaagctgatctaacagtcggcttaggaccggttcgaccgacggcagatggctggtcgaaccaataacatttgaccggtagagtcgactctgagtttaatttgccggttctcatactttcttgcttgggtttgagttctctcgagtcataattggtttattgtcctagtaagacatggagatggatcaatgaaaggcaagaccaacccttttataacgttcatggctagtttaattaagagataagctgcactcaacgcattagctaattgagaatcattcaatcagttttgtatatactttttatgtaattcgttcatcttcacctgtttgcgttgtaagacatccatcctccatgtgagagtgcgaatcctctttaaacatttgtcttgtgaatcttccgttacatctataagacgggagtttgtctcaatttatgtaaatgagctccgctacctgaatttgatcttctaaacttgacttgaggatttttctcaagattaggattgttagtgactcgccgtaaatttttgggtaatttggaaccatgtcattataattttgcaaagtttgagatatgtcatcggtatctcaatgacttgtaaggatgtcatatatcaaattttgtaaaattataatggcatggtttcaatttttcctaaattttttaggtgaatccgaatcgtgttggcgacatgatcaaaattagacgcgaattgagcaatatgcatgctggagaactcctcttatagtcttattcccttttttttttgtcgccaagatgattagaggtgtagttaattacttaattatctttgttggttgctctacttttatcaccgtctactcccatcattccttcgccatataataggatgcaatcacttggcaagcttgtcaggtaggacaatgttcttataccagattccatatgaaccgggaaatcgggaacttccgtttggctctgttcagcaataacaggaagaaattagtactagcagcagtggtgtctcttgcaggtgcagtgtatcgataaggttttttttttttttttgttaatgtgatctggcccttgatactgtagttgtttatgtaaagttggtctcgtgttgttctctaacttctatgtgctgaggagcagctgttccttttcttgtctgcttatcttgtttcttaatttaaagacgcacaggttctttttttttaattccaatgatagttaaacgaaattgagttaatctatacgtaaacgtgcgtggatcaacaccttaacacgtttggtgatacataaccatacaaaaactgcacgagctgcagtattttccaatagggccacctaagcttcagactattaataacagcacctaagcttcagactattaataacagcacttacaataatgcaatactcttgaataagtcacagttgtgtgtatacgccttttgtaatcagaaggaaacaactctcacctaagtcgcccagggtcgtaaattaacacccgatagacctagacgattacataataagcatatcaattctgcaacccgtataataacagttattttggtaaaatagaagtatacttacttccttcgtcctataataaatttattttagctcatttcatttgtcccaaaatatttagagtggtcattgtattcgagtttatgaaagtagaaaatagttgtgtttgaagtagataaaatgaggaatggttatatattgggatttgataaagcagagatattttaggtttttagttttgtattggtatgtattaaatggatgacaaatgaatttactttagaacggaggtagtaaaaaagatgaacaatacttgatttgagtaccaccaccatgcacccaatgtagtatactctcctacttgtagctgttttcctgcgatcaggatcctctacaattgactgcaccatgcatttatcactgacatctctctatccgtctccccgtacctccacggttactctcactcatagtatcaggcaacttcgacatcaagcaagacatgaaccacatagtacaaaacattaattatagcaaaccaaatcattccggaatgcatcggtacggtagctattgcgtaccccgtaaatgcacacgatccccaattccccatcgagcagttgtcaaaaaaaaaaaagagaaaagaaaccaaggcctatttgatgagaaattagctagcttatcgtgaaattaaatttgtatgtcaccgtgcattcagctcgtcaatctcgtctgtacgccgccctgacgttgatcattgcctcagctcgttgacaacgaggaagtcattccatccatcaccgccgccgctcacaccggcacacgcgtgtgctagtctcacgatgcagtcccacaccgacgaccgggagaggcgcggacgagacggttctgttcagtttgtggaaatcttaaaaaaataataattatacaacctctatcttgggccatgtttgtttcagtttaaaattattgtaatctagattatagaactagattaccataagttagattataatctgtttgttagttgttagtcacccaataatctaaaataagcacctttagagtggcttaccagattatagtaacttggcttataaattataataatatatcataataagctatctggtttttcagcttactcctaataatccatattataataatcctaagctgtattaaacagggcctaatttacttttttagatttcttagaatctgtacgacaaactaaattgttagaagaaacttctgatagctgaagattataggagaacctatagccattagaagcttccaaacaagatctacgacgcgcagcgggatgtccacaccgccttcccccccacgctcccgatcgtggaagcagcggtgacaagaaaaatggcctgttcactttgatgccaaaaaaaccttaccaaattttggcattacaaaaattttggcatagttgccaaaattttagcaggattttctatatagctaccaaaatttggcagcaatctaaatatagccacttttttagcaactttaccaaaatttgataagtttgaaaatagcatcaaactaaataggccaaaagaatagcgtgcggccggctgcctgccctcgtgccaccaacggggacaggggatcggatcgtacgtgccgcctccccctctccagcctccgcgaccggccgcggcgccttcgctgccgtgcacgcaccgtgccgtgcttgccttgcctgcttggtcggcgcggcgcggccatatcccccgcgccgcccgcacgcacgcccgggccgcgcgactccaccgccgctcgcgtttgaccgtaaccgaaagcgccgcgcgcgagtcgtggacccggcggatcgggccaaagaggcttttctgggctcacggaccgccgctgcgccgatacactacacacactgtttgacccgaccccatatcctcctcttgtctccgccgcgaaaccgcctgccccgggggtggacgtggaccgagccttcggtacaccacagcagcaaaacggatcgtacgcgacacggggacacgcaggcgcaggtccgtctaatcctacctgaggttgcagccttcggctaaaaagctctactgtttccacaccaacaaagcagagcctacacgctgacatgtccattgcttctgctcccgacagatcatcctcgcggcttagctgtggaccgggtgcatgcaaggtaggtaccccgctccccagctgatgaactggcgtccacgtcgtcacctcacccagccaacggcagccatcattattaactcgccacttacgctgcctccgagatgattttcacttgaccacgcatctttaatccggattaatcacctccttccttcgcttttaattactttttgtatgtttaatcaccccgccgaaccccaggtgacgaccgcgcgcgcggcggccgcggctactcgtggacctggtgcacggcgcgggggtctacccgcggatctcgaggcagcggcggacggaggagattcctccacgtctcccgacctggtgcggagcgtccacgcgctggaggacaagcgggagcatttcttccatcggttacggcgcagcagcaagacacgatcaaaggagagagagagagagagaggaagacgacgacgacctttgttgttgtttccttctttctcttctcttctcctcatcctcctctttagcttcctctcgcgctcgccgtctctctctctctctctctatcgggcgcgcgcctttctgtgttggtcgtctctttcctcgcgtgctctgccgctgcgcaagaatcaaaaggcgccggccactagagagagtgtgtgtttgtgtgtgtgtggcttgagttgagagttgagagaccaatcgaccatcggctgtgatctcaaaagagagagaggggcaaagcgaagtgggcagacttgggcggcaatccttgcgaatcatcaagggattctgtcttttctttggtgcgattcgattgtttctttgtagggggaagggagagaggagggggggggggggttttggcaattggcatggaggaggcggaggagatgcaggtggagaggatgcaggaggaggtggagggaggcggcgcggatacggataagctcagctacgagattttctccatcctcgagagcaagttcctgttcgggtacacggacccgcaccagctgtggctgcccaaggcgccggcggcgcaggcgtcggcggcgacggccgtgccgtcggggaaggcggcgcagcgtgggaaggtgtgcgtgctgtgcgtggatggcggcggcggcgggctgcgggcgctgctctccggccgggcgctggcgcacctggaggccgcgctccggcgcgcgtcgggcgacccggacgcccgcgtcgcggactacttcgacctcgtcgccggtacgggcgccggcggcgtgttcgccgcgatgctgttctcgacgcactcgcgcggcgcgcctctgttccacgccgatgacacatggcgcctcgtggctgaccacgctccccggctcttccgcaaggccgcggcggctcgacgtcgctcttctgccgacccaagaagcggcccctcgcggcgccgacggcggcgctggacgcggccatgaagacggcgttcggcgaggagctcaccctgcgggataccatcaagcccgtgctcatctcctgctacgacctcaagtcgtccgcgccgctcgtgttctcgcgcgccgacgccctggagagcgagagctacgacttccgcctcttcgaggtcggccgcgcggtgtggt

SEQ ID NO: 8219 - DNA, 20070 bp, Oryza sativa
cacccacaaaacctatggatacccccctaagccccccttcaattttttcatcatagttgataagataggaggtgctaaaggtcttataatagcattttagcatagtttaataatgagattatatgtttatatcggtgtactcggtatgttgagtccccccaactttttgtttctggatccgcccctgatggttggtggtgagcttttgcatgcatggcatcctgggttcgattcccttgccatgcaaattttgtctttaatttcccttggtgtatgctccctctttctatttgactcagtgccatacttatctttctatttgaatcagtgtcatatttatttttgaaagaatacaaacaaatgagagaataaaaaagaatacaaacaagtaagagaataaaaaagaacagggaaaaaaaatgacttttctagcgatcggtgagattcgaacgtaggaccatgtgtacacaaggcaagcaaccaaaccatggcaccactaccttggtacacagaacaaatcaaattgttaattagcaagtatatggggtcagcgccgaggtatttgacgctaaccccgtgccacgtgaaaattcaatgccagctcaacaaaaatctcggcgccaatgtttttggcgctgagacgttagacctcagcgccaacctcaatggcgctgaaccgacggcctagttttggttgaagtttttggcagggactattttcaaaataagtttttataaagggccaatttgtcgaaaaaacggtgttgttggcgtgtatcgatcaggtcaggtggatgggaagagaacggacaccggaagagcgttcccgttaattgctgctcctgattacttatttgctcgctgttaaccgcgacagaattgtgtacgtgcgagaggccgtttttaaagttgtgcaagagattctctgttaactcgatggcgagatgccgatcgatggcaatgcaagacgcgtccatcgtctccaaaaccgtgcgagcgcgacgcgtcggaaatactgtgcactctgtgcctactccgcgtcctctaaacttacggcccgaattcttagtccctccgtttcacaatataagtcattttaatattttttatatttaaattaatgttaatgaattcagacatatatatatctatttatattcattaatattaatatgaatgtgtaaaatattagaatgatgaaacggaggaagtatacagtacaataccgcctcggacgggcacctcagggcgcaacattactgcatcgtattagcccacccgaatctagtaaatctagatggaataagatcactttgactccctcaactgaccactaaatctaaatcgtattcctcaaccacaataccagaaatcttaacccccgaacttacaaaaccggtgtaatttgactcccttggtggttttggagggtgatttcgctgacgtggtgcacacgtggcagcgttgatccggtctttgtcccacgtggcattgacgtggcgcttatgtggcattaaaataaaaaaatatatgcagggcccagtcattcacccaaaaataattgtgggacccacaaacatgtaggtcccacatgtcatcctccctcctctatatttccctctttcgcttttacagcggcgttcggatcggcggcggcgacggcgggcgatggacgaatcaacagcggcgggcgggcggccattggagttgcggatccggaggccggatctgcccctcgcttcattcctcctcccgatagactgcgccatggccgtcgccgctgcgctgccgaccgtcgccggggagctagccatggacgagactaaacattcacaaatctcaccagggctggccgcctgggcccaaggtagagctggccggctactaggaggacgcgggagctcaggtccctcggcggcggtgcgggcgctccagctatggcggagagggtggcttgctttggagggggatagggaagaggacaaatattgcccgctgggcagtagccaaaagcaaaggagtactggggcacatctatacacgagctagacaaacgacagatcctacaatgctcaaaaccaaaaccactacatcagttcaacatctcgaaacaagaaattgtaaattgaaaaaacaaaacaaaataagccacggcaaattgtccaaatttcacgcgtcgacgaggatgcacaaggaaggaactaagagtactagaggtttacttgttcaaatcgttaaacgattggttggaattagtgggaggtcatcgggaagcgtcgacggtgaaggcctaaaccgtcggcttgtacccctggccgcgccgaggctgaccagcacggacttgaggaaactcctttcccagcgacatggctccggcgccctcaaaggacaccgcttctgacgtcgacaaggacggtcgctgctccatgcatggctccggcgacgacgggagggtgtcattaatggcgctgctagagtaggcggagcggtggcgacggcggccggggacgccagcctgaggcgcatgatgaacgccgtcttggtgacgcccacgccgatcgtcgccgcgagcaccgagttgcggctagctatgccggctgccttgaagatgctcgggccatacaacaccacggcctcgatgccggtgaggtgctggaagaagtggatccccagggcagcgatgacgatgcgctgcaccggcggcgtcgggtgcaggaacgccgagggagccaacgctgacgccggcgacgcagcggccggcgaggagtgcagcgaagttgggggtgaggcccatgaggacggagcccgcgaggagatacagtcggcgagatgcaggagggaagagagggaggaggaagaagggataagagataatgacatgtgggacttacaagtcagtgggtcccataattttttttttggtgaatgacaaatgggccctgcatatatttttttattttgatgccacataagcgctacgtaaatgccacgtgggacaaagatctggtcaacactgctacgtgtgcgccacgtcagcgaaaccgctcttcaaaaccaccaaaggagtcaaattacaccagttttataagttcgggggtcaagatttctagtattacggttgaggagtaccatttagattcggtggtcagttaagggaatcaaagtgatcttattccaatctagatcgcgaccatccgatttgggccatctagtcttatgcccgagaagagatgcaccgcaccagaaggcccattaaaacttcagtcgcgcatgcatccagttgaggcccacaatatatctagtgccccggtccggccagccgtgagcccacgtgaaccgccaaccgtctccctcgccgatctcggcgtcgcgagtcgtgcgtgacccaacgccgcccgcgttggcggcacggcgcgccgggcacctccacggctccacccttcgccgcgcgtgcctcaacgatgccacgccgtggcgtgcattcccacgtcatccgacgagggcgtgcggcgtgcctaatctacgggcccagcgagcgagcggcggccgtcgccgccgcgccgcgccgcgctcgctcgcgtggccaagatcaacgggagcaaagacgttgtggttggtcctcgtgggccgcgtcaaaggggacacgcacgcgacggtcgaaactgtactggtcagtctcagtctcagtccggagtcattgctatttacaactcaatagcgaacaaaagcgatttatttacatacgtacaatcgtatgtacaatctatactaatttttcaggagatatgcaagctacactgacaaattacatgtttaaacctaacgattattctctgaatcattagttcgtgtacacttgctagcagctacttctttctatactgcaatctagcctgtccatgcaaggagataggactgaaaactaacgaaatcttgggacatttgctcaaagaccatgagcacagagaacacccccatccctactaaaactggctttgcactagtcaagtccacattgccactgccaccggcgacagatgattccgcttcgacagatccagctctcgaatctgacatcctggaggcgatagcccacgccatcaatggaggaagaacgccatacaagatggtcatgcagtaaccgccctgaacgttaggaaatcaacccaccaagtaattaatcttctgtaagtgtcggaaccatgctagctaggatggcaagaactgaaggatttcacatgtattggtgtacactcactgcaatgtcagtagcaatggagaatgaattcggaacggtagctgcaattagcacggttggggcaaccacagcccctgcagcgatgtagctgagcctgttgttgtccacagccgttttcgctccacgatgccttaatgcttcttcttcctgcactcatcgattgtttgttcataaaactgaacagattgttcttagatataaattaatgcaagtcctctggctgatgaagcatacatgtccttgggctgaagaagagacaagattggtcatctgctcaatgaagaactgtgaagctcccagcagtgttccgatcagcgacgtcccgacagcaaggagtgagaacgtctccacaacagtataactccatctacaaaagaaagaaaattttgtcctgttaggattcaacgcctccagcttcatacagagaagcagattgcaggtgaagctgtacacaacgtgttcttgctagtgcagtagtgctacagcggagacgctcactctgtattaagcatatccaggatgtcaaacccatcaagatccgtggagatgctgagcgcgatgtcgtcccacacgagcaaggacagcaatggcacgatgctcccgacgagtatcgagagccgaatcctcacgaggtcccctccaaggtacgcgcatatcactgcgacaattgcacactgaatcttcagtacttgtacctcttgcaagttgcaaatttcatccgtgggatgattacataagttgcattgcatgtacctggtgcgatatcatggaagaccagcgtgaagatgatcaccggaagcgttgcagggacctgctcccagttggtgttagctggcagggtcaggccggcaccgaatgctactgcagacacctcgatcgtcagcagtaatcctgcatcagtagacagatcacgatggtagttagtacttagtactagtgcgcaagacagatcacgttgatgacagcaagaacatgaggtgtatggatgtaatatggttatcagctacagtaggtttgctcttacttcagcacagtgcattgtgttgcaagtagtatggagctcccagtggggagagtgggtgtttgttcgtcattgtctctacactttcagaaatgagttactactccactacatgccatctttgaattccagttgggcgaaccagtgtttgttcatctctgttttcacaatttcagaaacgagttactgttccatatgctgctaccatctttaaagtcacattttctttttcttgcttaattagcttggagatgttcagacagcagaatttcttctgaaagaagacggctgcagatgccaaaatttgtcatttaagcgtattaatgcagatctaaacaatgtggtatttagtaccgttggctgttccaagtgttgatcacaacgatagcttaccaacctatcatgacgaaagtgagcagctggttcactttgtcggtgacgcccgtgccaccggcggcgatgaggagcgcaagggcggcggtgaaggcgcagccggagacgggctcgggaacgccggcgaccacgctggagagcacctcgccagacttggacgtgtaggcgaccatggaggtgtaggacaggaacaggtaggccgcggcggccaggttccctccccactcgcccagggtctcctgcgccatgctcttcagcgatatgacctccagctgcccgccgccgccgccatcgccgtcgccgccggcgtccttccccttcttccgccgcaggtggacgttgatctcgaccaggaggagcgcctcgatcaccaggaacgcccagcaggtgaccatgcacgccgcgctcggaacgaacccctgccaattgcacgaccatcagcaatgccagcgaccctagtaagagtcacatcggcggaccttaataagttaaagccaaagtttattttcttaaaacttaatttttaagatgattttaagatattttcaatgcatttttttcaagtattaacttttaaatctctaaaaacatgtatataaaaattttacctataaactaatttttattttataataaactgttttgatttattggagaatatgagtaatcgacaagaacttaaacatccaccatacaaaggaaaagttcaagttcagatttttcttcttgttccatttctgttcgggagatttttttttttttttacgaatttgccagatcaagaatgcttgaggttggtgggtcgacaattaaccaagtgaaccttgaatgctcgtaactactcctcacaacaaagacagagaaattcagctgtttgtggggggtacatgtggacggctacttcagatctgtctcatgatagtactactagaactgctgctactactttcatttttggcgatcagatatcctgtcagttccgtgccaaattcatggtcctgaatcctgatagatgggccatcactaattacttcaccgtacgttgtagactagtattagtagtataatctttcggtgtcatgtggaaaggtcaaggcaagagagggacctgtcaccggtccgagatatgaatatacttcctccgtttcacaatgtaagtcattctagcattatctatatttatatggatgttaatgaatctagataaatatatatgtttagattcattaatctagattcattaacatcaatataaatgcgagaaatgttagaatgacttacattgtgaaatggagggagtactacgatgagagggtgattgattccatcgattttttcgcgttgtcttcctctaaaatcatgcaccgtgttgatcacatgtcgaaatcggcgcaggcgatcgttcgttttagggattctgattgtgatgatgctagcaataggctcgtcaggtgtagggtagtacggcgactcaccgcgggcgccgtgcgctgtggcacggcgaggatgccggagccgatgctggtcccgaccacgagcgcggcggcgccaaccacgctcccccgcttcgcgccaccgcccgaagacggcgcctctgccacgcccgccgccacatctccctccccctgaggcggcggccgcgcgtcgccgccgcgcgctcccgccgctctcacctcggagacggcccgggccctctcgccggtggctgcactactgccgcaccactggacgccgccgccgcgatggactctcctttccggcaagcatgtcgtggtcgtcactgggatgcaccggtacggggcgcggtggaatctagctgggcggtgctgcaagcgggcgcgcgtgatggcgccttgcatcggggaggtttcttgggtgtttgtgagctagagctgcggactggagggaatccccatggcggtatattcatcgtaggagtgacggagtgcgttgtcgagtgtcgaccacacgatcatgtggaatcttgagctccggtggtgggcggtggaagcggaatcttttgcagttgtggagcaggagcgcgcgcggacggacacggttgccgtgagactctggaccatgaaggctgattttgtttggagctatacatctccatcagtggtttgtggctgacaatatgtgaaaaataaacttcgaaaatagagtaaactagcatggtggtccagtccgcgcagattgcgcggctagcatcattatattttctctcatataataacatatatgtttttttattatattattcaaatatattaaaatgacaacataattttaaattttgtaacaactttacaaaactactaatgtgtaatattcatattatattttatatacttgttagttattaattatttttaaaatcaaaatttagttatttgcaaattatatatattcttatatggactctagactcgtcttttaatatttcttttttaaaattccgaattttctgtaaattgtatttatgtatagactctatgctcttcttccaatattattttttttatttctgaatttttatattatattttatatacgtgttagttattaattatttttaatatcaaattttagttatttgtaaattatatatattcctatatggactctagactcgtcttttaattccgaattttctgtaaattgtatttctatatagactctatgcacttcttccaatattatttatttttatttctgaaattttattatttctaattgtatttccatgtggactctaaactcatttttcaatattctttaatttttaatttttaatttcagttacttctaaattgtattcctatatttgtattcctatattgaccttaaactcttcttcccgtgtttttcttaatattgaattttagttatttgtaaattgtatttttatacggactctaaactctacttttaattttattatgtttattccaaaatatagttagttttaaattcctatatgcactctataatctacttctaatatttcttatttttaattccgaatttctatttttttcttaattgtatttctatatggactctatactttacttctgatatttcttatttttaattccaaatgtctattatttcctaattgtatttctatattgcctctatactctacttctaatattctttatttttaattccgaatttcagttatttcctaactgtatttctatatggactgtatactctacttctaatattccttatttttaattccgaatttcagttatttcctaattatatttctatatggactctagtctcctcttctaatattccttatttttaaatatttcttatttttttttaattccaaatttcagctatttctaaattgtatttctatatggactctgctttttctttttctccgattaatgtgagaatttctaggccatgagagcgaatgcggagggtcctttttctattcctttaataatataatagattactgttcgtgctgtatattcttgccaaatatttttaggagtgttaatttaatagggggtaaaagagaaggttgagaaataggtaaacgggatgattcattagcgcatgattaattaagtattaattattataaatttgaaaaatatatcactatgattttcttaaagtaactttacatataatttttttccataaaacacatcatttagtacttgggaagtgtacgcatgaaaaagtcaaatctactcacaatcttgtgcaaatgaaaacacccttaggccatcaccgatgcgtctctgggtcgttccctcgccgacggacatccgcttttccgtccgcgtcagctccctacgatggagcgcatcccccggcccagggacgcgtctctcgccacttttcagccgagcgatgcagccgagggatgcattgggagggggatgggctcctgtggacatcggttccccaacgagttttcctatttcaccccttggtagagctggagtatccgccgaccgaggcggacccacaagagagatagagagcggcggcaacgacaaatccgcggcggagtaggcacctcatccacctcgtgctcgccatccgccgcctcgactgccgcgatcagcacggcgctcgccaccgtccgccgccttgtccaccatgcgctcgccatccgccactgtccgccgccgcgacccgcgcggcgccggatctgccacctccggggtcgccgccaccaccttccacgggagagagagagagggggggagagagcggcggcggcctgggcttctctcggtgctctcgcgtggatgatggagaaagagagagagagagagaagagaggggtagaataggaaagagaggaagaggagagagagagagagagtcttttttgggttgggatactcattgggctacccagatgtgacctgcattatagaggtgagtacccctaaaatccctcagatagtgaggacaccctagaagtggctcatattgttgatgcccttagactaccccttgaagcattttttttcactttgaaaagtgatcgctgccaaatgttaagcattggatcagttgtctcacgtgtaagtgagacatggacagcaaaaatggttccttattgcctgaaaaatagtccctgttacttaaaaatctatccgggacttaaaaaatatttttagtcccgatttaaaagcacaataggactaggtgatctttagtcccggttggcaccaaagatcatctttagtccagactgattccatgtcaggctgtgttaggacgcccaagatttttactaaatatactaactttaattccgattggtattaccaaccggaaataaaaatcaaaacactatatataatttttatgacttatcctcttctcccatcctcaaaaactcctcgtctcctctatattttttcctccatctccttatctctctttcctgtacctgtttttcctttctttccttatctcagcgcggggagcggctgggagcgagccgagcgcacgacgaggagattgggcggcggccgggcgcacgaggagacggggcagcaaccgggcgtggtcggcggcggccgggctggggaggctgggaggaagaatttgtttgtttacgatttgtggtgaatttcttcttgagaatttgtgatgtatttaaccgtgacgtgaatatgtgatgttatttttagaatttgtgatgtaaccatctttgagaatttgtgatgtatgctctgtggtttggagatgatttggggatttcacgatttggtgatgatttgggaatggagttaaatcaatatgcaaggagttaaaaacaataaaaaaactaaaaaaaactaccaatcgagacctggtctcttcatctttaatcccggttggtaacgatctttaatcccgattatttcacgctatagtctcggatacaaccaggactacatagggttacgaactattgggttgtgatccaaatttatttgcacacgtataaaggctaacttcggacggagtgaagcggaggcccgtcgtcggaggcttgggctggagcgaagtgtccagattcgttatactaggagatgccacatcccctcataggttgtcttttttttagacgaagagagtacggggctgtttggttcttaactaacattgacataactcactttagacaatgttaggcagccacactttttgtggcctacaaattataagccacacttatggcaaagttaggtaaaagattgagtctacgacgtgtggggtaagatgataagaaagtatggattgccataagacaatgaaacaaacacaaggctaaaacggtataacagtctaaaatgtattgtggtaagttgaagcattgaaccaaacagcctacgcctcaactgcagtctatcttctccgagatggatccattggtgagcgccttgaatgtggcaggtgcaggttgcctcggcaacgtgggctctccacctatgctgtcgtcctctccaaccccgttccggcgattcgcaggctttcctctcagcccacaggccgagcgagtgatgaggcgtccaactaattctgctctcgccttcattgcgccatttaacactcggcgctctcggctctcctcctcactaccccaactacccactcccccctccacttaaacgcgcgcgcccccccgcccgcctctccgtcctcggaagcgccgcccactcttccgtccacgcctatcgctcctctccgtgggttccccccgcgcaagttgtgcgcgccatggagatgcagctcgccgccgtcctcgcctcgctcgccctcggcggcgcgctgctcgtgctcgtcttcggcaagtggtggcagccgctggccgacgccgacaggcgcgtcaaggagctcgccgacgccgtggaggcgctgctgcagctgcggtccgagctgctcaaggtggagcccgcgccgccggagtcggaccagctggcgcgcgcgtggctgcggcgcgtgcaggaggcgcaggacgaggtcgcgtcgctcaaggcgcggcacgatggtggccagctctacgtgctccgcctcgtgcagtacttcgtctccacggcacccgtcgccgggtcggccgagaagcagctcaaggccgtccgcgcgctccgtgagcagggcgaggcgctgctcgaggccgcgctgtccacgccgcaggcgccgccgccgctgctccgccagccggaggagctggagctcccgccggggaccagtctcacgaggccctacctcaacgaggcgctccgcttcctcggcgactgcgacgccgcgctcggcgtctggggcgcggggggcgtgggcaagaccacggtgctcacgcacgtccgcgacgcgtgcggcctcgtcgcgccgttcgaccacgtcctgctcgtggcgacctccagggactgcacggtggcgaagctgcagagggaggtcgtgggcgtgctcggcctccgcgacgcgccgacggagcaggcgcaggccgccggcatcctgagcttcctcagggacaagagcttcctgctgctcctcgacggcgtgtgggagcgacttgacctggagagggtcggcatcccgcagccgctcggcatggtggccggccgggtgaggaaggtggtggtggcgtcgaggagcgaggcggtgtgcgccgacatgggatgccgcaagaagatcaagatggagtgcttgagcgaggaggatgcgtggaacctgttcgaggccaacgctcgcgaggagacgatccatcgccaccctcggattcctgcactttcaagacaggtaatcacttgatctgtctttgtttgaaatcagattggttcaaaacaagcgctacgtttagcattttcagttttccttcaaaaaatagatatcttccatccgttagatcatacaatggtacatgcttaagtttcagtctaggtttgatgctaactgtaaggatttatttcgattgagaaatgagatggtcaaattctcatgtctccgctaactgaatttccttgtatatttttttataaatggattttccgataaacattagctacctttttaaatcaggatcatctctgtgatttcctgttctttccagctactaccaaattgcaaatcacaaattgaatgctatcagattattatcacccaatggttatggtacaatactaccctttgcagaatggtcttgcagaagattttaaaatgtgttccgttttacacaaaggcaatcgaacaattctgtttctctattttccatgataatctttctgtttcttcaatccttttgcactggcttgttgcacgacttatcaacgtgttatgtacttatgtgccatcaagtttagttgatgtatttcatttacatttgatctgttccatcattgacaactgctaataaattcgttctacaactaaacaggttgcttcagagtgcaagggcttgcctttgtccctcgtcaccgtcggccgcgccatgtcgagcaagcgcacaccgaaggagtggggcgacgcgctcgacgccctgaagaagacgaagctctcgagcgcgcccggcccggacaagatcgctcaccctctagtgaaattctgctacgacaatctggagaacgacatggcgagggagtgcttcctggcctgcgcgctctggccggaggatcacaacatctccaaggacgagctcgtccagtgctggacagggctcggcctgctcccggagctcgccgacgtcgacgaggcgcaccggctcgcgcactcggtgatctccgtgctggaggcgtcgcggctggtggagcgcggggacaaccaccggtacaacatgttcccgtccgacacgcacgtcaggctccacgacgtcgtccgcgacgcggcgctccggttcgcgcctggcaagtggctggtccgcgccggcgccgggctgagggagccgccgcgggaggaggcgctgtggcgcgacgcgcggcgggtgtccctgatgcacaacggcatcgaggacgtgccggcgaagacggggggcgccctcgcggacgcgcagccggagacgctgatgctccagtgcaaccgtgccctgccgaagaggatgatccaggcgatccagcacttcacaaggctgacctaccttgacatggaggagaccggcatcgtcgacgcgttcccgatggagatctgctgcttggtcaacctggagtacctcaacctctccaagaacaggatcctgtcgctgccgatggagctgagcaacctgagccagctcaagtacctctacctgcgcgacaactactacatccagatcaccataccggccgggctgatctcacggctcgggaagctgcaggtgctcgaactgttcaccgcgagcatcgtctccatcgcggacgactacatcgcgccggtaattgatgatcttgagagcagcggcgcgcagctgacggcgctgggcctgtggctggacagcaccagggacgtggcgaggctcgcgaggctggcgcctggcgtgcgcgcccggtcgctccacctccgcaagctgcaggacggcacgcggtccctgccgctgctgtccgcgcagcacgcggcggagttcggcggcgtgcaggagagcatcagggagatgaccatctactcctccgacgtcgaggagatcgtcgccgacgcacgcgcgccgaggctggaggtgatcaagttcgggttcctgacgaagctccgcaccgtggcgtggtcccacggggcggcgtccaacctccgggaggtggccatcggcgcgtgccacgccgtggcgcacctgacgtgggtgcagcacctcccgcacctggagtcgctcaacctcagcgggtgcaacggcatgacgacgctgctgggcggcgccgcggacggtggcagcgcggcgggtgagctggtgacgttcccgcggctgcgtctgctggcgctgctgggtctgcccaagctggaggccatccgcggcgacggcggggagtgcgcgttcccggagctccggcgcgtgcagacgaggggttgcccgcggctgaggcgcatcccgatgcggccggcggcgagcgggcagtgcaaggtgagggtggagtgcgacaagcactggtggggcgcgctgcagtgggcgagcgacgacgtcaagtcctacttcgcgcccgtgctgatctgaacaaaacaacgtcgtcgtcgctgcaatctcgccgcgccgtgccgcgcgtgcgtgcatccgattttccgatgcagaggttgaagttttggagacgtgctgatctgttagggaaggaacgtcgggggaaatttggtgactgttaatttggattatttttcattttcctttaaatttgggacggtttcttttgaacatcttgtgtttcgttgccaaaaggaaaactcaaccgctgaacattgcacttctttctttgttttgctcaaactatatcctatgctacaaacaagcaaacttgaatatctgatatgttcatactagttttgtgctcgaattcccgacgtgattataaggctgaattcctgacgtgattataaggctgagtttagttccaaactttttcttcaaacttttaacttttccatcacatcaaaacttttctatatataggcctggtttagtttccaactttttcatcgaactttcaacttttttatcacatcaaaacttttctacacataagcctggtttagatttcaactttttcttcaaactttcaacttttctatcacatcaaaactttcctgcacacataaactactaacttttctgtcgcatcattttaattttaatcaaattttcaattttgacgtgaactaaacacgcccatacaaatttccaacttttccgtcacatcgttccaatttcaatcaaacttttaattttggtgtgaactaaacacaccctaatacgtaggacatgctgatgtttactggggggcccttccggcctggggagtagcaggctgggttggctatgggccatggtttgggctgcacctggacattgcagctaaatggatcggttaattacctaagcagtcactaaaaagggctgattagagttttctttttttttatctcgttatatcttttttttcttgtgagaataaagctaaactcagttcgttcctttctcaaagtatgagatctgttatgtatgaaatctacgacctgtttggatgttttccagcttttgtcacgtggaaagcttttaaaagatctattgcacaccatgatgaattcattaccagctttgactggacaaacaaagatgtataaaagaaggagcgtatcctatgcacacaggctctcgcgtgtacacaccgtgtacaccaactaaaaattatcacaaaaaattctaggaaaattcatacatgtactttcaatagtattacatctacgtgcaaagtcgcatcttcaaattcattctacatagagaataacaaaaaagataaaattctgacaaaattgcaaccttaaaactgttagattttttgtttttttgttacggctaaaatataatgaatttgatgttaagattttaaccctatgtgtaatacaattgaaagtatgtgtatgattttttctagattttttggtgacattttttagttggtgtgcacgtgtgtacacgtgagggcctgtatgtatagaatatgttgccataaaaggaaggggtgtgatgtagatattgtctgtactcaactaaggagaggagaggaagaagaacagagatgttgagatgtggatctaaataaacatttactggtgcaaggagaaagcatccaaaacgccgcttgctaaatcataggatactttagtacgagtgtattatataagtaatcaggtaaatatgttgacatgaacataattgtagaaatacatgatcattttcatttgaagccaaaatatggcatatcaaattcttaatagtactttggctagtgtttggtttgctattaaaatgtgccattggactcaatcaaaatttacctatattttgacattgccaatatcttaacatggtagcgaagcaaacaaacctataatgccaatttttattgaatatatgtgataattgttttcactcgattcaattcagattcaagagacgatgagtggttaaaaacaaaccacaaatgaaacaaggagtaaagcaagggcttgtttggattgaagctaaattttgtccaaccaaaatcatggcaaatttaaccgtgtcacgtacgcctcactagttcaaattatatactagcacaaaaatttaccaggttttggcaaaacaagcctttaggttggttcagatccgtttgttctagcatggaaaacaagataatttattagcgtatgattaattaatcattactccctccattccataatacaaggcacaagtactttttagatttgttctataatataaggcatacatgcatacatgctattaactaacacatcttcttcactaaaatattactatttaaattttccactatcaaaatctctaattttattgggtgcatgcattgtatttattagattaatccaaactatgaggtgataataattatttattggtctttgggttgtgtcttgtattttggaatggagggagtaactaaaaactttaaaaatagatgatattttttaaaagtaacatatatatatatatatatatatatatatatatatagaactactatacggcaccttagggtgctacgtattaaacaatacctgatacagcctccagccccaccaggtccataataagcagttaaaatttaactcatcgacgaccaatctccaatccacccctagcccaaactatgaggtgataataattatttattggtctttgggttgtgtcttgtattttggaatggagggagtaactaaaaactttaaaaatagatgatattttttaaaagtaacatatacatatgtatatatatacatatacatatatgtatatatacatatacatatgtatatatatacagaactactatacagcaccttagggtgctacgtattaaacaacacctgatacagcctccagccccaccaggtccataataagcagttaaaatttaactcatcgacgaccaatctccaatccacccctagccgtagtagtaattttttttacttgcattttgcaccgcctatatatgtatttgtatccagcaataagcccgtaaccattcaaacctccaattcccgaaatttttggatccatcccagcacccagccgtagaatgccctaccggcacctcaccgccacgccatcgtgatcgtcgtgttcgcggcgggatccgcagtaggcaacgtgcaacgagatccaagccgtgagtggtgataagttgcgagacttggtggcggatcggtatccggctctacccgtcggcatcgccgatgtcaaattgaattggtgtggcgccggcaacaatgctttcccaagcgcttgcctcgatggcgggcctacggcggcggccacagggatggaggcggttcaggactcgggagaatagatgtgcctcatccttcatcttggatctacacagcagttgcgcgtacatgcatggtcggggatgttgagggtgccatgcatggatcccggtgctgaggggcgtggcggcgagcgctggcgttgtctgtgagtaggccgggctctacggccggatatggcttgttttttgcgaagcaactagcgaacggtgcagtcgacaatcgatctgcgcagcccctaccatcactggatgtcgctccctaggagcgtgccatggaacttccatgagcaggaggatcgatgaagagcgtcagccttggtgccatgccggccatcctccatgacatcgacggtgcccccgcgggccgcgtggcctcgttgcctgctgcagtggttccatggataccggtggtggaagctgctccctcgctggtggtggaagtacattttgcgctcgacgtaggggagcatggatccgacggtcagggatgaggaggtcgtcgctacctttagaggttcataccgcgctagttgcagaacattgctgtggaggacagaggaggacgtctcctccaggctccaggaccaccatgtcctcggcgactccgcctgacgaatgcccgtgtcctgtaatccagcgttatttagttgtttttatccaatgatatttttttaccctaagttggtctcaactcccatttgtaattttttttaactcaggaagttaaatgtgtatacgatcgtattaaacacagtgccgtcattaagtgagtaataaaatatttattcaacaattaatgagttattaactataataatgcaaaaaggatgtaacaaaaatattattgttaacacacggaaactggtgtgaaaaatatacggggagtaatatcgagcccctaatttgtggggagtaaaattttaactaagtttaaatagaggggagtaaaattttaactaggtagatatacaggtctgattttgctatggaattttttactggaattaatactaccggatgtaagtgggaaaaagattaacaaaataattttattagtgagaatggaccaactgcagtaaatattttacttaacacaggctagcatctggagtgctgcatgcggaacggataagtcggaaggaggtgggaggaaaaaaaagaaaagaatagcggtactgcgaagggagttaaaaacgggaaaagcggaggaggagagggaggggggcgactggtactggcgttacgaaactcggtggcgcgtacgggcgctacgtagcgtcaccgtgtgtgtgtgtgtgtgtgtgtgtatatatatatatatatatatatatatatatatatatatatatatatatatatatatatatatatatatatatatatatatatatata

SEQ ID NO: 8220 - DNA, 29495 bp, Oryza sativa
taaccattacaggcaaaatgtagtgtgaaggagggccgacgtgcagattgttaagctgacgcgtggaggacaagaatgaccgatttgtgaccattctgacaccggtcatgtcgccagcagacagccatgattctacgtcgcgcctgctcccggcgaaagtggaggtaggtgcgggccgtcccatcagaaggtgactcaaacggcaaccatgcagatctccgtccatttatgaaaaggtagggtaagtccccataaaaaagggggatgggacatgtggtatccccttaagatataaaaggaggaccttgcccacggagagaaggggagatagattttgggggagagagagctttttcttggactggacctttccagattaggagcccataacaagggagaggctggctgatactttgtagctctttgatacacagatctcccaaaaacacaggagtagggtattacgcttctcagcggcccgaacctgtatacatcgccagtgtcttctgtgcttcctgtctcacgaaccttccacatacagattgggagtttagagtttcacccagggtccccggccgaactggcaaaggggggccagcgcggtctcccggtgaggagccccacgctccgtcatctggcgcgccaggtaggggactctgcgagtgatcttcagagctcttgcgctctttcgtgtgcaccaagcttttcctgttcagcctcatggctgagcaagcaaaggcgcacgacctctctccgagtgtgagtggcgacgacggggagccgaacccacgccgtcgagctcgtactccaccgccccctccacgccaaagtcctgggcgggagaaggcgcccgagagggctgaagggtccgcgacttcgacatccacaggaggtggaaaagggcggcgagatggggagcgtcgcctcctcgtctatggtgacaacagcacgccccagggcgcgctccaagctgcgggcgcgctcctacgtcatccgcccgtcgcccatgacccggagtctccagcccaacgttggctggacgatgtggccaaattggtcatgacggcacggcagcgcctagatgctggtgggcggtcctccgccaccaaggcctctggcgctgctaccaccggctccgtgtcgtcaaggcggagggcgcggcgagcggcggctgttgctcgccattcggccgccactccttcgtcgactccttcgacccgggaagatctgcgtggggggccggacgcccgcgccagcatcgagcgccggcgtaatgaccgacgtgctgcccacgcaacggagggcgcttcctcgtccagagtgtcacctcgacacggacgcggggaccagccctccgtgcccccggttggtggtgtcggctgtagagcctttgtggcgagtcttcggaatgtccattggcccccaaggttccggcccaccatcgccgaaaaatatgatggcagcgtcaaccccgccgagtttctccaggtctacacgaccgggattgaggccgccgggggtgacgacagggtcatggcgaatttctttcccatggccctgaaggggcaggcgcggggttggctaatgaacttgccacctgcatctgtccactcttgggaggatttgtgccaacagttcacaatgaacttccaaggcacatatccgcgccccggtgaggaagcggacttgcacgcagtacagcgaagggacgatgagtcacttcgatcgtacattcagcggttctgtcaagtccgcaataccataccatgcatccctgcacacgcggtaatctacgcgttcagggggggtgtgcggcacaaccgcatgctcgaaaagatcgcctccaaagagccccagactaccgcggagctttttcagctcgcggaccgagtggctcgtaaggaggaggcatggacctggaacccctccggttccggagtggcagcttcggccgcccccggatccgccgctcagacagggcggcgtgacaggaggaggaagaagaggtcagtccattccgacgacgagggtcatgtcctcgccgtcgagggcgcttcgcgggccacccaaaaggggaggccagcgagcgacaaaaagaaaaaggccggcgctcccagcagggagcgcccagccggcaagtggtgcaccgtccacaacacttcccttcacgacctcgcggactgccgtgcagtcaaaagtttggctgagcggacgaggaaatgggaggaagagaggaggcaggagcgccgagagggcaagtccccggcggttccttccggcaatcggcgaagtgaggccaagcagaaggcccccgccgaggacatcgatgacggcgatgatgacctaggtttccaagagcctggggccaccattgccactgtcgatggaggagcgtgtgctcacgtttctcgccggagcctcaaggccatgaagcgagagcttctggccgcggcccctactcatgaggcgacgcgccgggcgcggtggtcgaggttgccctcactttcgaccagaccgaccacccaccgtgcgttgcccggggagggcagattgcgatggtggtttctcccaccgtttgcaacgtgaagttggggcgtgtcctcattgatggaggagcagccctcaacatcctttcccccgcagcctttgatgccatcaaggccccggggatgatgctccggccgtcccagccaatcatcggtgtgacgccggggcacacttggccgctaggtcatatcgacctcccggtcaccttcggtggacccgccaatttccgcacggtgcgggtgaacttcgatgtggcggacctcagtctgccctacaacgcggtcctggggaggcccgcgttggtgaagttcatggcggcggtccactacgcctacctccagatgaagatgccgggccccgatggccccatctctgtccatggcgacctcaaagtcgcgctcgcttgtatggagcagcgcgcggaccgcctcgccgtcgtgtccaagcccgagggtggcgacgagaggcttggcacatccgcccccgccgccccgaggcagcggatagtcacgtgcgatgaggtcccggtcaaggaggttgtcctgggcgacggcccgtccaagaccacacggatcggtggtctcttggatggcaaataggaagacgcgctcgtctctttcctgcgggcaaacgctgacgtcttcgcatggagaccggcggatatgcccggggtccccagggaggtgattgagcaccgtctcgccgtacggccgggcgcaatgccggtccggcagaaagtgcggcgcccgcataaaacttttgagagcctccgctccgcccgcataaaactgaaccccgataagtgcgtgttcggtgtacctgcgggcaagcttctcgggttcttggtctctgcccgaggcatcgaggccaaccccgagaagatacgagctatagagcggatgcgcccccccagcaagcttagggatgtgcaatgcgtcaccggttgcatggccgccctaagtcggttcatatcgaggctgggagagaaggcgttacccttatttaagctcctcaaacgctccgggccgtttacttggacggaggaggctgaacgtgccctcactcagttgaaggcgtatctcagctctcccccagttctagtcgccccggagccaaatgaacccttgctactctacttagcggcgaccccacaagtggttagtgcggcgttggtcgtggagcgcgatgaggacaatcctcattccgcgcacccccaccttgtgcagacttggcccgggagagagcagggaggagaggcccccgagccgaacggtggcccgaggcccccgacgaccggagatggccctctgcccgcttgtcagacggtgctaggagcccccgacccccaggaaggccccgaggccactgcgggaaggccgcacctatcgccctctgaccccgaggctaaccctgtgccgatttggcccgggagagagcagggagaagaggcccccgagccgaacggtggcccaaggctcccgacgaccggagatggccctctgcccgcttgtccgacgacgccaggggcccccgacccccaggacggccccgaggccactgtgggaaggccgcccctgtcgtcctccgaccccgaggtcgtcggcacagaagacgagtgcgccccgcgaggccgctcgggtgaagagcgccccagggatgcggcccctagcgaagaggatcggccccaccgaaaggtgcagcggcccgtctactttgttagtgaggccctccgggatgccaagacccgataccctcaggcccagaaaatgctttacgctgttctgatggcctcgaggaaactgcgccattatttccaggcgcatcgggtcactgtggttacgtcttaccccctcggtcaaatcttgcataatcgagagggtactggacgggtggtgaaatgggcaatcgaactttctgagtttgatttgcactttgaaccacgccacgctatcaagagccaggccctcgccgactttgtggcagaatggaccccggctcccgagctcgtctcggtccccgaaaccggctcgggtccctcgcagctgcctcacaccgcccactgggtgatgcagttcgacggctccctgtctcttcagggcgccggtgcgggggtcacgttgacctctccgagtggagacgtcctcaaatacttggtccgcctcgactttcgagcgaccaataatatggcagagtacgagggactccttgccggactcagagtggcagctggactggggatccgccgcctcctggtgttaggcgactcctagctggtcgttaaccaagtctgtaaggagtaccggtgctctgactcgcagatggacgcctacgtgcgccaagtacggcgtatggagcgccattttgacgggattgagcttcggcacgttcccagacgggataacatgatggccgacgagctctcacggctcgcgtcttcgcgagcccagaccccaccttgcgcctttgaagaaaggcttacccagccgtcggcgcgacccgaccccttaggggagacggatgcgcctgaccggcccccgaggcccgtcggagtccaggcctcgggacccgaggggagtgctcccagctcccttagattgattgcttggatcgccgagatccaagcatacctcacagataagactctacccgaggaccgcgaagggagtgaacgcgtccatcgcatctccaaacgctacgtgctggtagaagggaccctctatcggcgcgcggctaatggaatcctcctgaagtgcattcctcgggaacaaggcgttgtgcttcttgccgatatccatgaaggcgaatgcggagcccactccgcctcgcgcaccttggttggtaaagcttttcgccaaggtttctattggccgacagctctcaatgatgcggtcgacctggtccgccgatgtagagcgtgtcaattccacgccaagcaaatctatcagccggcccaggccctgcagaccataccactttcgtggccatttgctgtctggggactcgatatcctgggaccgtttaggcggaccccgggcgggtttgagtatctgtatgtcgcgatcgacaagttcactaagtggcccgaggcttatccggtcgtcaagatcgataagcactccgcacttaaattcattaagggcatcacagcccggtttggagtgcctaaccgtattattacggataatggcacccaattcactagtgaactcttcggcgactactgcgaagacatgggcatcaagctctgcttcgcctcacctgcccaccccagaagcaatggccaagtggagcgcgccaatgcggaaatcctcaaaggtcttaaaaccaagaccttcaacacactcaagaagcacggcgtttcatggatcgaggagttgccagcggtgctctgggcaaaccgaactacaccaagccgagcaaccggggaaacgcctttcttcctcgtctacggcgcggaagcggttctcccatccgagctcaccctgaggtcttctcgggccaccatgtactgcgaggctaatcaagatcagcttcgcagagatgacctcgactacttggaagagcgaaggcggcgcacggccctccgagccgcgcgctaccagcagagcctgcggcgctaccatcagcgtcacgtccgggcccgatcactctgcgtcgacgacctcgtcctacgccgcgtccaaacgcgtgctggattgagcaagctctcaccaatgtgggagggtccgtatcgagtggtcggcgtcccccggccgggctccatacggctggccacgggcgacggcactgagctgcctaacccgtggaacatcgaacaccttcgtcgcttctacccctgaggggggagttgggtgtcaggtttcaggctcgggccaaccccgcaccccctcgggcgtgcagggttggccgggggctgccacacatgcactttcttatttctcttatttcagaatttcaataaaagcagtttcaatttcctaaaggttgtatctgtgctgttttttccttttgaagaatcttgacttgaaataggtcactcgcgctcaatcctgccctcgggggctcgggtcggctaaaaatcgccaaacggggcccagaaccgagccgtgccccgtggcgtggtgaactccgggggggggaatcggcaaaaacccacaatcgggtcacccataaccctcggtcaccacgttcccggcctggccagtctcgacatgtggatctccccaggcactagccccgacccgcgccttttgaggaccagaacctgggcacgagcccttattcaagctaagacacaaaaggaccacggcacagatcatcctcatctcatacacatagcaagatgaaattaacacaaaaatttcttcattttttgattacagattaagttgatctatacaaaaaagaggcccgagggccttagaagaaagaaaagaagaaaaaactgaagaatggcgggggtctgggggctcattccgatgcgcccggatcgccggcctcgacgtcactgtcgtctgcaccaccggcattgccctcctcgtcggagttgggggcaaacgcaagccgaggggccgagccctcgaagctgtcgacgatatagtcggcggcatcccggacttgcgcgcgcgcgcggtcctcggtcccaggagggaactcatccagcgccatccatggagagaagttggggtccctggcctggtagctcgccaggacgagctccaccgctccttgggcgaggtccctcgaggatgacttaattgtcttctcgagctcctcgggaagccgttggagggccccggccatcttcgagaggtgctgggcgaggcctccctggttgtcggcgtactttacggtctgccctctccagaggcccacctgccgaccggcgcgatctaggcgggagacggcgtcccaaagcatgccgggcccgacctcgcctgccaagcggagggcttcgacctccccggcggatgagtccagcgcgctctgcagaccggcgatggtgtgttcggcatctgcgaggcgggcggctaagtcgctttcgcccgcggccgccccgccgctgcgcgccctcgcgtccagctccttcgcccgcgcctcgagctcagcggcccgttggtttagtgcggccctctcggcgcgggcaccttccagattgcggcgcgcctgctcctcctgcgctgcctcgtggagggacaggctgtccgccagctgttgcgccgcggcctcgaccccctcgagagctcgctcccgctcggtgagcgcgtcctcgcggaggcggagcacgagctcttcttcggcgcaggcagcctcgtgcgccgccagtgtcgcttcccggatggtgacagcggcctcgcggtccgccagatccctctccacgacgcaggctgtcacgtcctgataaattcattccgaaataaaattcattttctaaaaggaataatagaattaattaaaattcgaaaagaaattggcaaacactaaaatacgtacaagaaaaattcgaatgtggtccggagaatttttgttaaattctccttggtctaaaaggagccctcaaattttacttgaattttcagagcatgggaattatttattaagcaacaacaaccttgatcaaagtttattaaaaagaaaaagctaaaaataatccccctcctccctttgggccaagtctggcccaaggtttctcccctcttcctctcagcccggccaaaagtttgtttaacctcccccgcgctacagtgctccttcttccagctcaggcagagcccgagctctccagccgtgccgtgcacagtgccgccgcctcctccttccaaatctcgcctccccgttgctccttttttcaaattagttgcgggaatggaatcctctcaatctcctcttccttcccccaactttccccctttaatcccgcccccaatcaccgggatttaatccctcttctttgaccaccattgatgccgccggccacctcctccggcgccgttttcggcctctcccgtgaccggcactccgtccttgccctataaaacgaagccctcctccttcctttggtccattttgctctctcccgagcccctagccacctccccgccgccctgctctctctcccacgccgccggccgcctccagccgcctgtgccacctcgcccgtgcaccgtccggccgtgccgtcgcctcctccagcgtcgcagccgcctcctctcccacggcctgccctccgtttcgcgcagtgaccgccggaggcacgttcccgccgtcgcccttctctttcctccacgccggccgcctccagccgcctctccctcctcgccggagcgtcgtccggtcgcgccgtcgccgccagcagcgtcgcagctgcttcccctccaccggcgtcgcctccgtttcacgcggagaccaccggaggcgcgtccccgccggcaaccagtggcattggtgccactgtactccctccagccggctgctgttcgtcgccggtacgccgatcgacgtcgccgtctcctccgtcgacgtcgcagcgtcgtcctctcctccggctgctcctcggtttcgccggaacaccgccgtcacgcgcgccgcctctccctcggtttcgtcggcacccactccggcagcccctttcgccgtgccagtgcgccggccgacgtcgccgtctgcacccccggcattgcagcggcaaggtcgccctcgccctcgccctcgcctcccctccacccgaacgccaccggtgtccgtcgtcgtcttcaccgttcattctcgcccagttcgtcgtctcgcggtgccgcctccgtcgtgggcatcgctgcggcgtgttccacgccgtcctcgtctccgtgcagccgctgccggctgccctcgtcgcctcctcgccggccccggtcgtcgtcgtcgtcgtcctctcgtcgttcccggtcgtcgtggcgttcgtccctccgtcgagccgttctcgtccgtcgtccgcatccgtcaagcaagccgcggcagccccgtcctcgtcttcgtcctcggctccgcgtcgtcaagccttgtccaaggatcgccgccgaagtcgttccctcaccgttcgcctccgtcgtccccgagctgtcttcgccgcgcccgttcgtcgttgtcgttcccacgcctcgtcgcgtggtggtaaggatccgtcctctcgcttccccgccctcgtcctttcggtgtcgccccgtacccgttgtgcggttgtcgacaccgatacccgtgtaccggtgtcggtagtcgttcgcttgtgggtgtggtgaccgtgttagtgtgcccgctcggtagccgcgtggtttctacgtgtgcagcccgtgtggtgtctagtggagtccgtttgttggccactcgcctcggttgacacacggggtccgcttccgtcgacccgtggaccgtctctgtgtactcggtctaccgtggtcctttaggttgacatgtggggtccgcatgtcaacagcgcagccttcctgtctcttccaggctagcgcttacacatgttttataattgcaaagcttaattataataatccgcaaatctccatataacagcactaaacttcggatgatcatatcttggtcatacgaactccgaatcgacccgttcaagtctcttaatgtttgttataacctaaagaaccctgtgctttctttttatgtattgttattgcttctttttaggcttgtagctttgcttgtgtgtttcgcgtagtcttcgtcgttccggaggttcccgaagcgtggttcgtggtcgtcgctgaaggttcggaaggccgttctctctgagcaaggcaagtcacatcatctttgaacatattgaatcccaatttataaaattatgttgatttaaattattgcattatcgctttatttaaattcccgcgttatcactgttttatctagccatgcctatttacctttgttatgaccttattattgttattgttattatttccttgttcaccctagagtaaacaaaaccccaactagtggacactctactcatggcaccactagtttaattttaggtagatgcttcgcaatttaattaggtaacattaggtggttttacaactctagactttgggaatattcatatcatttggacactatggaatggttggcttatggtggaattggacatacacctctcttcctctttcaaaacccctaaaacctgttttccggtggggtttgggtgcatgccagttgtgggaagtagcaccccggccactataaggattaagctcgggcctctgttgcaaagcactaccgtacttccacatgtctagtgggtaaggcttagtttgtggctcagtctggttataaacaaaagtacacggatggagatggacgaagtcgggggtcgatggacatctctaggacaaatgaaggctacacgagctgcggcccggtagtcgagatgtcatggcacagggctggtgtcctgctgctagggggctcaatcctgcctgcctgtcccgggggttccggccgtaggtggggttgggtcggtactcttgtttatggctaggatgggttgggaactatgtcacgtcttccgtccgtataccgtggtggtatgtggcacgtggttacacgtgaggaagatgtgtcttgtgggtaaagatgtacacctctgatcagagtataatctattcgaatagccgcgccctcggttatgggcaagccgagcaatgtacccaagttagtgttttaattcttaaaatttgctcaacaactaaaatgtggaatggttggcctgggttggcttgggacgagctgggacccagggtcgggttgccagttcggtctgaatcatcgtaggccttgggttaaggcaggttcgtgtgggttcacggccttgattaataatactgtgtagctctaggatcgtcttataaaatggctttgggcaactaagtgacttttaaatgctgttttctgcaaagcttaacccctatattattaccccttgtatccccttgcattaatcatgcatctgccggtgtggcttgctgagtactgtggttgtactcattcttgctcaatcttttcccccattcagtaagagaagctttggagaagaagtcttaggtggagtcctggcttacaccccagttgagcgcctgtgaagatggagccgtaggcccgctagtccgctgctgtttattttttgattgccaggtctaaagcgcctttgtaataatgtaaatattatcgatataataaagatgtgccttttgtatcatgtttgtgtggtgtaccccggcttttcctgggatggggattaatacactagcgttcgggaaaaggcaattttctcggtcgcgacacaggcgcgctcttccagcgccatggcgcgcgcctcgagggtctcttcgcgccgccgggacgccgcttcggtctccgccgcccgctgttctcgggcagcggcagcgtcaagcaccccctgggcggcgtcgagcttcttccctagctccgcctcccagctcccgtattgaaggcggagggtgtcctgcgcctcgttcattacggtggtggcaatgagggcagccccccgctcctcctccacttccttggcgatctccgccaacaccttcttacgggtttcaagctccgagacatgccggcggtgagccttacggcccacctccaccatggcctccaccgagcgtcgcccctcttcgacgcgcgcccacgcggcgtcgagctccgcccgctctgcctgcagggcctccacctgggcacttaacccgtccaacaccgtggtgtttgcggcggccaaggcttgcagaaggggctctgcgctcagtagggcagcagaaggcgtggggaaaagtcgcctcggagaagatgccgcgcggctcggcccgccgatggacgtgccagacgcagggatgtcctccggacctggttgagcctgagcgtcgcccgagggagtgggcccaagcgacgcgcccgcagcttcgtcgccagctgccccggaagttgtcgcctgagcgtcgcccgagggagtgggcccgagcgacgcacccgtggcctcgtcgcgaactgcctcggaagtcgccatcgcctcgtcctggcgaaatccagcctcctcccgagcggcttcctcggcctggtgggcttgggcagcctcctcccgagcggcttcctcggcctggtgggcttgggcggcctcctcccgagcagtttcctcggcctggtgggctcgagcagcctcctcccgagcagtttcctcggcctggcgagcccgggcggcctcctgggcggcctcctcggcttcccgtaggcgatccgcggcctctcgccggtcagcttcccgcctgcgggcctctgcggccgccggatcctcggcctcaggctggccggacttggaatgatgggagggacgtgacgggatctcgctgaaacaaaagaaaagaccagaagacgaacaagatgggcgagtgaaaactcatgttgagagaatgaatatagccacgatgggtgagagacgaacctgcgagggggtcggttaaacgaccactttggaggggaaatgaggtttccccgagatggttctgtctcctccatcttgcggggccgcttcttcttgcgctccccctcgagctgcgatgctggcgcggccccctccgggcgcttgctgctggcacgcgccgccccgccccctcggggaggagaagggggaagtgttcctccctgcttcctcttcccccgggcgtcggcagggcggctgctccccgggcccctgacacgggacccagaagcacgaccccctctcggggtagattgctccccccggcggctccctcctgcgccgtcatggccctttggagctcgctcctcagaggccccgacccccatcataatggtcaggatcgaggcgcggtctggatcgctgcagagggggaggattccttggggaatgagggccgcctccacggagttgagattcagcacccgttggaccaatatcttgaagtcctcaggagcccagtcccatctcactccctggtgggtcctcatgtaatcttcggacccggtgtactcccaggcgccccgagcgcgccgctggagcggcgcaatccgacgacggaggtagtcgccatacaccatggcccctgtgagccactgggatcgcaggcccgccaggcggtcgaggacggcgtcatagccatcccccagatctaccggcgcccgccagctggaggcctgcgccgggggctggctcggaagtcggaggcgcgcttcgtcggcgaggggagtgtagaaccaatcgctcttccagtcgtcccacttcttgcggagggcgcaggggatgtagcggttcagcgccggcccccgtggctggaagtagcagccaccgactaccgatggcggcgacaccgactgcacggtgaagaaccaccggaacagccgaagagatgggcgcaccccaatgaacatctcgcacagatgcgcgaagatggccaatgtcatcaccgcgttgggggtgaggtgcgccatctggagatcgtagaactctagaacatccatgaagaaagaagaaaatggcggaaccagccctgccattgcaaaagggagaaagaagacggaccgccccgggtagtctggcgccgagcgtccctcgcccagcgtgactatctcccggccggcggcagattccggcatgaagcggcgcggcagcccagcctgcctctcgctcacgatgcgggagggcggcagcacgctaccatcgagcagagcggagccccgtgccatggcgccggaggaagagaagattaagagcgagcgcgtgtggcgagggtagggcgcaggaaagaaggagttagggcgcaagcggcaaagacaaggggaataatggcgaaaggaaggaaacaaatcccttcctcagtgcctttatacccttgccaacgctgtgcccggctcctcgtttctcgcgcccactatttcgccccctcgtttctcgcgcccacgcttccactattcccattcgcccgcttgcggcgcatgaggtggatatgcggttgtggcggtcgaggtagatcatatcgtgcgcgcgttaattacgctcgccaaccgaagcgacgttaccatatcttcagatgaaacgaatcgccatgtccagattcgtgtgctactcgagtaatgtggcagtcttgaagagaccgctcattattgacagccgagttaccattgccgatgtgcgtgatttttgaccgttggttttctgcccaattgtggagaccggtcccacctgtcaccgggccttaggagtggcgtcacgcccgaccgcttcccttgaggagggcgatcgccctggcataacgccgggggctactgtcggtgacatgggatcgggagtatcatgactagaggtttgaggcagacacagtcgcccacgtggcctggcaccctcgggggacgtcgggcccgaaggtggtgtgttcgccctcctcttagtccccccgagggggtcgggctgcacccccctcggccccgagggccgaggcgccccgacccctcgtgggttttcgctccgcgtgtatggggtaggtgagcacagtggggctcacctaaccacatttattgcggtttggctgagcgtgtcacgacgcatgtaacgtagtgcattgcactcatttatccagtctgtgaccagtcacagaccggtcagatcgcgggattaggtggcgacaggcggtctgacgcacgcctcgccccatcccgtcaggacgagggcttctaggtgctcgtccccagctggagctagcgtgttacctcccagagatggcacgttagccctgatcagatatatgccaggcttcatcctaaccattacaggcaaaatgtagtgtgaaggagggccgacgtgcagattgttaagctgacgcgtggaggacaagaatgaccgatttgtgaccattctgacaccggtcatgtcgccagcagacagccatgattctacgtcgcgcctgctcccggcgaaagtggaggtaggtgcgggccgtcccatcagaaggtgactcaaacggcaaccatgcagatctccgtccatttatgaaaaggtagggtaagtccccataaaaaagggggatgggacatgtggtatccccttaagatataaaaggaggaccttgcccacggagagaaggggagatagattttgggggagagagagctttttcttggactggacctttccagattaggagcccataacaagggagaggctggctgatactttgtagctctttgatacacagatctcccaaaaacacaggagtagggtattacgcttctcagcggcccgaacctgtatacatcgccggtgtcttctgtgcttcctgtctcgcgaaccttccacatacagattgggagtttagagtttcacccagggtccccggccgaactggcaaaggggggccagcgcggtctcccggtgaggagccccacgctccgtcacatctgttgcatcttgaaaggaccttaatgtcgcctagaggaggggggggggggttaataggcgttcctaaaaattatcacaacctcatagcatattagagagatgagaacttttggttcaaattggaacttccggtatgggattggaagttctggtctcaaccgaaaagtttggcggataatggaataaaacactagctatgaacttgtagctcgaataaagaaaatgtatatgaatcagaaggtgacaaataaggtatctaagcaagatataaggtcaccaactatattaattaagcatgcaagtatagatcgggtaaaaacaagctcaagcacaatatgagagatggcaagaacgagcaaactaagagaggagacacattggtttgtttcccgaagttcggatccatggatcctaggtctccgttgaggggccactctatttcaacccttacctcacgaggttgcacaaatgcactcctcggtttcactcttgatttcttcccttgcagaggcgaaatcgaagccttcacaaacttcccgtggcacaccacaagcttgggtgctcactggcgacgcctagccgtctaggagaccttagtccccaagagtaacaaacacaatcgaagatttgcttgctatgaactcgagtgctcaaagtatggagtgaagttcacaagctctcaacttctcaatctctcaatccaactctctccccttctcaaatccctctcacaaagaggaaccacaaaggatggagtgaagctcactagctctcaactcctcactctctcaatccaactctcttcccttctcaaatccccctcacaaagaggcaccacaaaggatgggaaatggggatggctatttggctttggatgtgtctaatgttgcccaagaacagcagccactcaaaggagggtggaggagtttatatacccgagcctctcaaaaactagccgttggaggcaaagacatgaattttcggaactttcggaaagcattttcggaacttccgaaaatttacagaagctaaactcagttttgcagccattttcggaacttccgaaaagcacagagtaaaacgaccataaaattttgctcgggagcccctttttgatgatcttggactctatggaaagctcacttagaggactacccaactcaaccaaaaacaaggtctaaaaccactcaaaggataggttaaagcttgggtttctctcaaggtagcactataataggtcactttgaacatcgagacatacacaaactcatcgacgttgcatccctcttaatagtacggcattcctatactcaaatataaatagaagagaattataccaataggaatgccttctttccatttccttcctttgtcttaagggacgccaacgccaaaaccgtttcaccgtatattcttcaaatgattgatgcggttacttgtagattcaaatggtctagcatggtccatcatgacaaagccatcactcgcccttcaccaccggattttgttcttcggcaccaagctccttgcttgcccttcaccccggcatggtccatcgcgaccgagcatcacttgcccttcaccgtcttgccatagtagtcactttgtatcccaaatcttcaatatcttcgctttgttattcttggtattttaggtgtaatcatatcacttgagcgtcaacatattttcaatccttggaacctatttttctcattcaacttagtgaaattattagtctcaatgatccggttgtcaacctccacatgttgactaaccgatcgcatgtataaaaggatatgaataaatgatgagtattaatcaacaccacaagtgtcatatactcaaatatatgctcaaatgtaaagatcccaattaaatgaaagtgaataacttggatcaaatacatgcataactaaggtataggatttgcttcccctaaatgtatgcataaggaatatttgtgtgaagcaagagtatgcataaatagagatgaaacattgggagcttatcctatataaaaatagaaggcatttctcaaatacagatattaaaataaaaacataccttcatcatctccacgttctcaatgtaaatagactaaataagagataagattcaaacaaaatattagtttcacatgcatatgtcaatcacgtggaaatattatatatgaacatatcaatatgtacatggagagaaagaatgatacatatagcttgatcttcatacatttcatccttgtgatttaggtccaccatcaatgaacgtttctatctcaactcatatgaagtccgtgaatcatctctcacacactccacttttatatccatatgagactagacaaagaaatgcttacaacaatattagtctcatggaattggatttgtcattaatcaccaaaaccaaattaatagcacttgaactttcacatctgttgaaccagtttctccatatctgctttttgctcatcggacaaatgctcaaccgtgactgggatgacgttcttctcgtcgatctttgtgatggacggtgtcatgatgaatggtgaagtggttccactgggcatgccaaaagcgtgttaatgtgaaacacggctgcctgagagatttgcttcactctggtgcaggtccaaaacttgcctcgagtgtcaagagtgtcacgaccggaaataacccaacatgcgttccttacgtgcgtgtattattccttgtcccaggaggcgaggtacaccaaaagttgatacaattcagagtttaacaagcggaagcgtaaatagttaattattacatgggcaacgaaggcccagcacacacgaagacaacgaaaaacagcggaagactagggtgacgaccacaggcgcttgacggcaggcacgagctagacaccaaagccttcatcatccaggagctcctcttctgggtttgggaaaaattgagtaagactgagtacaaccaccgtactcaacaagacacacccacaagtgcagagtaaatgcaaaggagtacaaaggagttataatacagggggttagggtttgcagtaaacagcatttaaaagacacttagttgctcaaagctaaatttaaaacacgatcctagaactatttgatattattaaataaggccgtgaacccacacgaacccgccttaacccaaggcccacgatgattcagaccggactggcaacccgaccctgggtcccagctcgtcccaagacaacccaggccaaccattccacattttagttgttaagcaggttttaagaattaaaacactaacttgggtgcattgcttggcttgcccataaccgagggcgcggctattcgaataggttttactctgatcagaggtgtacatctttccccacaagacacgtcttcctcacgtgcagccacgtgccacataccaccacggcatatggacggaagacatgacatagtttccaacccatcctagccatagacatgagtaccgacccaaccccacctatggccggaacctccgggacaggtaggcaggactgagcccctagcagcaggacaccagccctgtgccatgacatctcgactaccgggccgcagctcgtgtagccttcatctgtcctagagatgtccattgacccccgacttcgtccatctccatccgtgtacttttgtttataaccagactgagccacaaactaagccttacccactagacatgtggaagtacggtagtactttgcaacagaggcccgaagaccggtccttatgtggccgaggtgctactatcaaaaccatgcaccccaagcctagcctaaaaccattttgagggttttgaatagagggggaggtgtgcatccagttccacaataatccaaccattccataatgtccaagcgatatgaatatccccaaagtctagaattataaaatcacctaatgttgcctaaataataagcgaagcatctacctaagttcagactagtggaaccatgagtagagtgcccactagttggggttttgtttattctagggtgaacaaggtaataataacaatagcaataataaggtcataacaaaggtaaataggcatggctaattaaaacagtgataacgcgggaatttaaataaagcaaaaatgcattaatttaaatcaaaataatttcgcaaagtgggatccaatatgttcaaagatgatgtgacttgccttactcgctttcccaaacgtcggcttcaacctccacgaagagcggatcttccgaagctgcagcgtctacacgatcaacggaaaagaaaagggcttttactctaataaactccatataacaagcaagaacaaaacacaaaaatgggttcttcacttcttaaggaaaaattagagacttgaacggtccaattccgagttcaaatgcccaagttatggctatttgaagtttatatgctctttacatgaatatttacgaatttcttcatttaaattttaatttaaaaatggtttattgcgttagccgagggggaggggcgcgcggaccgggtccacgggagtggggcccacgcggcagcctcacggtccacggtggaccgggtgcacccgggctcacaccggccggcgccgtgggccccacgcgtcagccgcacccgagggcgtgggcggctgacggccgggccccacgcggcagccgctcggcgcgcccggaggcggccacgtcggcgcggcggcgggaggcggcgcccgcgcccctatggtcgccgacagcggccataggcacagcggaacggcggccgagagaggggaagggaagggggaaaagaggcggcggtccccggctcaccccgggtcgacggcgatgacgaaagaggcggccggagcggaggaaggcggcggcgcggctcgggtggacggggacgacggtgttccggcggtcggcgagctcggcgaggtagtggacggggtcggcggcggtgcggcgaagctggaggaggcgacgccggggcgggagacggtcccggcgagcgaggagggccggccggaggtcgtcggcgatggaggagggagagggcgacggcgcgagctcgaatccggcgaggaggaagggtggtgagaggcggaaacggacgggagaagcgcggggagagtttaaatagggttggaagggggagagggcggccggggaggaaggaaaccggcgcgggaggtccggccaccatcaatggcgccggcgagatttgtgggagcaaatccgcccgtttgaatgagagagagagagaggggaaaatggggggaaagggagaggggatcacggggagtaattcccccctattgatttcacgcgggggcgacgggatgcggcggattcggcggcggcggtggcgctaagcgcgggcggggcggcaggagcagcgggaggaaggggatgacgggtgggccccacccgtcagcgagggtggcgggcgggccgcggggaggggccgagtgggccgcggggaagaggagagagggggagggaaatgggccgagccggcccaagagagggagggagggatttttttagggttttttctttttatgaaatcattttaactttgtttatttcttaataattattatttgtgctctgaaaattccactaaaatttatttacacattttaggcttttaggaaatattaaaaaatcctccaagccttaattgacttttaactttgcacattttaatttttgaaggctttcacaaggattttaattattctaggcataatttaaaggatatattttagggtcgttttgggacgcgacaaagagcgtgccaactggtttgatcacagaaaatatagttagcttcacgatagccgatcgctcgataagccgatgacgtattgtttaatacctagccgatacgctcaaaccagatcggctgtatgtttatgataaaacagatagggcaaaactctaaatatgttctatccgctataatattgtccttttattttttgtcagtcaattttggacaatactataaagagccgattatccaatacttagagcaaagtagataaagtaccggatattactccaattaaccttatgtaaacaaatcaatctcagatacaatgatgtaatcaagattgattaagacttgatatatttagatagagtgatctctctatataagtggcatatatatatatatatatatatatatatatatatatatatatatatatatatagaactactatacagcaccctaaggtgctaagtattaaacagcacctgatacagcctccaaccccaaccccacccacccacgctcccaccaggtccatagtacgcagttaaaatttaactcacagacgaccaattttaatcccacccttgcacgccctcccctcactcccatagtccgggtaaattttttacttgatgttatccaacttcttattagttctatatatagttaaaatttaactcatcgacgaccaatctcgatcccacccctgcacccctacccccactccaatagtccgagtaaatttttaactcgcgcaccactaagagccacccccacaccaccctgtcaacgctcctgcccaaacaatagtaatttttttactcacaccaatagctctatttataccatccataaccatctcactgtatccaaacccccattcatactcccgtcctcttccatttttttcggatctgagaaattggggattcagcggcgacgggtgaccggtctgctcgtcggggcgatggtgtggaggccgagctccgagtggtggcgaggagatccatcagtgaggggtggcgtcatcatacacagcgcgtgtgtagcatcacgaagcaaaatagcgcgactctgagcgcttccttcccacaccacatccggattttccgttttttctctgttccgcttatccaggtaccaaggcccgtatatatatctttaccaccccttccatcacaagtaaaaaaatttctgattcaacataacactgagtaaaaaaattacttctatctctaccctaatttgaactgggagttaaaaaatcactctcgagtaaaatatttttcacattcactgagtaaaaaaattacttctatctctaccctaatttgaactgggagttaaaaaaatcactctcgagtaaaatatttttcacatcagatcagttaatagtaaaatttttactcatgtatttttttatcactttccggtgtgttcataataatacttttattcatgtctatttaaggtgcataaaatcacacacaatattcaatcgtgcaaatcaatcataccaccacagtaaaaatattatagatcgtgcgaaagatgaaaaaaaaagagatgcatatctactttgtccttctctgatccacttttttcgttccagttcatatccacagtccactttttccgttatttgcctttttttgctttttcctccgttcctatcaagtattaattcacgttcctaaccacgtaaaggttatcctctccggtttttctgtttgttaactccctttccgattttttcgttcaatacgaacacctcctgctgattccaaggaggggagtggggccttcctgtgccgcatgtatccaacaacctcgagtaaaaaaatcactgcctaattaaattaggttccgttaaaaaaattaccatgtcttttctttcataatttcatcccagtaaaaaagtcactgatcagcttactccattaactaagagacccaataagaaatgatagtaaaatagtagtaaaaaagttttaactaacatatagtaactttttaactgcaagcctcgctctcacagacccacacattcatcatttagtgatttttttttaccaatcacaatgacccctatatgcatcgtttggtaattttcttaccaacacgacacatgtatttgatttgcttggacaatgaataataggaattttatactccactatgatatgtggattctttttttttaataatacttctgttgcatccagtcatacagtgaatcacatgtataaaataatcacacagccctggtggaaaaaaaatacagaatacacaaaaaggaaacattggccatcggcagctctcatcggcatcggcaaagagcagcacgcatctgtcgccggttgtatttgctgatctacagcctagaacattttgcatccactctcgatcggcatgggtacgttggacagcccgggggcgtgcggcgattgactacaatcacggcgaccggcgcaagcagcaccttccaggccaccgtcgatgtggattgaccacgatggagccgtcgaggcatcggtcctcctctgcgttgtcaaaaatactaaagacaaaaaaaagaaacacggaaaaaaaccaaatatgtgctgccgatgacttgcgcaggcggcgcctcgctcctgcagctgcatggccgctaaaccgacagcttgtgcgagatccctcacgccgccgagagtgcctcccacggtcgagctcgtagttgccgggagtggaatgtaatggagccgctcgtggtccatgtcgctgcccatgccgtcggtcgagcttccaccagcttcggcggccacctctcagtccacatcaatggtggcatggaaggtgcttcttgcgccggtcgccgtgattgcagtcagtcggcgctgcacggggttgacgagagacgatgcggccccatcatcttcaccggcccccaccgccgctgcttcttcaccgcatcccagctggtccagccatcttgacggcaggctaaggcgttcgacggctgagtcgatggatccaaaaaattcggggattaggggttggatggttactgccggatagaaacgcatataaatagatggtgccatacatagtaaaaaaattactatcacgttttttcagggatcgcttctaaggtgggattgggaaggatgttcggtacgcctgcagtaaaaaaatgggagtacctatacatctttcgaaagatttttatgatcgtatcacactaaattaccatatcctcaagaaaaagaccaaatccaatacaaaatttaaaatttacatgcgaggattcaaaaattacagtgtaacttacaaaagttacagtgtaagtttcataaattacactgtaacttacaagaaaatatactgtaaatttgagtgagaaaatcgagtgagagataagaaaaaatctttcgagtgagatatagcaaaatcgtaaaaaaaactttggtgggtgcaggcggggtgggctgggcctggtagggacacgcaaggaaactctgtgagacgtgttaactaactaggtagcaccttatagtaccatatagtagttttatatatatatatatatatatatataaactattctacacccgggcatagaatagctattctatacccccctcccaacggtcacatccacttccccctccttaccaaggcctaaaacccacctcccacctcggtcaaaggcccctcccaccgatcaaacccgcctactaactccccccaccacccacctcttctcagctctcgtcccaggatggtgcagtaacacgacgaccactgtgcagtaacattgtgtcttacgtgcagtaacagcgttaaaatatagttgaaatatagttatgacggatctacctttgataagctctttttttctaacatcatggtgtaaacggttttaaaaaaccttacatcacttgggagatattgttcttcaaagcttgacttttttgcaatttgtttctccacaagtagtaatactatactattacttgttattacttgtctgttgtacgttactacaatcacatcacgatgttactacactgcgttttactatattttttgggtagtgttactgcataaacacgtgataacgtgtaccttccgtgcagtaacccttttacttttgtgcagtaacaagtatatggttagcatctgagacttttaacctatatatttttgtttcaattcctaatttactataattcaccacaatattactgtcacatcttacacatgcagtaacgctatattggagggaggagaccaattttcttgagaagagggaggaagaacggttcttgaggaggggagtatatagatgcatcttgaagtttaatccttcacatgcagtaacactataacatcatggtggaaacgattttaaaaaataatacatatcttgtgagatattgcttttcaaagattgacattttgaactttagccctccacatgcagtaacagaatgtgtaatttacagtaacaggggtatatacatgcagtaacatggttttaccaaatgtataaaattgttcaaaacactcctacatcaatcagacatcgctcaaagccacctacagactttacctatggcccacctatttgatcttcatctcgtaaaaatgacacagtaacactgcatttatcatgcagtaacatagctacttagaagtggtaacatgcacctattatgtagtaacacttctacttttgtgtagtaacaagtatacggttagcatgtgaggctttaacccatatatttttgtttcaattcctagtttatgtagtaatactattcaagaaatgcaagacactttgttactgcaaagcttattgtctttactagactcttatattaacgttgtgatagaactgtagtaacgcacagtagtaacaagtaatgctattgtattactacttgtggagagtcaaattccaaaaagaaaagcttttaagaacaatatctctgatgtcatgtatggttttttaaaattatttgcaccatgatgctagaaaaaaaatgcttaacaaaagtagatccatcatggggtgggctgggccggacttgctctatacatatatatacacacacacacatacatacatacacatacatatacatacttgtaaatatgaaaatacaacttcatgtttatagttcaacgatgggcactaagttttacaacaagcgtatatagatcattatctggccacacaagtgcgcaagaatattctctcttttattttgcgacaggaatattcaggcatgctatctaaatgtatattagttgaattacgttctgcagtgctgtgtttggttcagtctagtgtagcagtcttttgtttccatccaagatatgacgtcctgattgtgtgcagtttgctggctatttgtttcatgttggctcgttcacttggtaactggcgcgtacaagaacgtgccaatcctagcagagacaccatgcattggtagaatccactctcttcaaaaatgcctggttgatcatagtccttgcattcttctttcagatgatcatcgatgatatctaaaacttgacgtggagcactgttgtttacatagttgatgatgtcgagtccgtccttgaacataggatcagttggtcttttccctgtgataatctccaatagcactatcccaaaactgtagacgtctccagaaggtgacacatgaccaccatgtgcatactctaaaagggtgcatacagaaagtattgttcgttacataaaagcatatatgtgtactaatgctagcctgtgtaagtgtatggttgacgacttttatattattaaaatgcggaaaatcacaaacatacctggagcaatatatccgattgtgcccttcagaccgactgaattaactgaacctgctgttgtagagaaagaatcaacataaaaccttgcaatgccaaagtctcctaagagtgcggtcatgtcatcgtctagaaggatgttgctaggcttcagatcacaatggacagtaggccttccgcaatcgtggtgtaagtaatccaatgcatcagctacattaacagcgatgctcattctttgagataagcgtagaccttttgaagcttttccgtccactctgtgatgcagccatgaatccaagcttctctcggcaccacgcatttcaagattgaaaaccttcaccgccacttcaacttttggttccttcagccttcccctgtacaccgaaccgtgggcccccctcccaataagattagattccgagaaattcgttgtggcttgagctagatcgttgtaagagaccttaagaaagttttcgccaaaagaagtttgttctgaatattttcttcttggcttcttcttctcaaggattacaaagtagataagcaatataagggacatgaacccaaatattggaatcaatattctgattaaataatattgtttgctcattctatgagaaacagttgggcttgggcatgagggcatatggagatccttatttcctccacagagtccccaattgccaccgagtgaaacagatgtagcgtctgcaaatactccgttcgtcggtatttgtccatagagatgattatatgaaaggtccagactcttaagctgcagatcacttaaagttttaggaattgtacccgataagttgttatgagaaagattgagcgccaacaagcccacgatattcccgaaaggtggaacctctccaatgaaaaaattttgatccatcaaaatgttcactaaatttttacattcgctcaaagaatcaggaattccaccagtaagcttgtttgatgaaaggattaagttaactagctgcctaagcaaaccgatctctataggtatgttgccttggagattattataactaaggtccaatgatgtgagtagagaaagacttcccaggcttggtggtatgggaccttggaatctattgtttgctaaagagagtcttcccaattgtgcaagattgccgatagaggatggaataggcccaatgaagttgttgtttgcaataattagaacttgaaggtttttcaactttccaagccattctccgatagtaccaataagaaaattagaatctaatgtcaacagaattaacccagaaagtttccctatgctatctggaactattcctgaaagtttatttccacctaatactaggttttgaagagttttcgatagattcccaatcgaatctgggataggtccagttaatttattttttgctaatgatagagtttgcagagaactacagttccccaacgcatgtaagaatgcccagcttactctgtcgcttgcttcaaggtcattgttatcaaggtttagagcaagtagtcccgaaagcttaccaaaagaactgggcactgggccagtgaaaacattgtttgacagataaacccttgttagccctgaagcattgcccaaggaagctgggatgttatcttcaaacatattatcttgcaagaaaatacttacgagatttgggagcttgtcaccaatgtcaggtgctaatgccttgcctagcttattgtcacgcaaagatagtccttgaagagatgagaggttgtagaagggacgtggaatttcgcctgagagattgttgtcagccaatgataaggactgcaaattggacaattggccaagctcactgggaatggttccctcgagttgattacttgcaa

SEQ ID NO: 8221 - DNA, 803 bp, Oryza sativa
ggatccaacacgtacaagaaagggctaattgtgcaagagaaaccaagcattggtatgttgcattttctgttttagttgttgcgtgaatgaatcccttgcattcttcctggagatgaacatcaatgatatgtaatatatgatctggaaagttcctctccacaaaattggtaatggtcagctcattctcgaacatagagtctgttggtcttttgcctattagcatctccataagtactaccccaaaactataaacatcaccgctggttgatgcacggacactttgagcatactctgacaaaagggattaaatggtacttattagtgcaatttgaatctttatatagcaccatatgtggcaatgaaatttacctagagctatgtatcccatggttcccttcacaacaattgaactgttacaaccagaattcccatctgatgtcaatgaagaatcaagaacaagacttgcaatgccgaagtcccccaaatgggcactcatatcctcatctagaaggatattcgtgggcttcacatcacaatggacaataggccttccacagtcatggtgtaaatagaccaaagcatcagctatgttgacagctatgcttactctttgatccatggacaaatgtttgcgaactacaccagcatgtccatgatgcaaccatttgtccaaattaccgttatgcataaactcataaattagagctttgaaatctttacctccattgtctatcgtggagcatgcagctagtacaggaagaaggttccggtgccgaatggttcttaaaacctcacattctgat

SEQ ID NO: 8222 - DNA, 5150 bp, Oryza sativa
tttgggcatagagattcaccgagatagaacaaagtatgcattgggactttctcaaaagacatatatagaaaaggtgttgaagaaattcaacatgtacagatgcagtgctacacctgctcctataatgaaaggcgaaaagtatggggcatcgcaatgtcccagaaatcagtatgagctcaatgaaatgaaaacaaagccatatgcgtcagctgtaggaagcctacagtacgcgcaagtgtgcacacgacctgacttggcattcgttaccgggttacttggcagatttcagagtaatccaggcctagagcactggaaattggtaaagaaagtcttgcgttatttgcaaggaacaaaaggcctcatgctatcttacagaagatcagaatcactccagatagtggggtactcagattctgactttgcaaaagataatacaaagtcaacatcgggatacgtgtttaccctggcaggaggagctatttcatggaaaagctcaaaacagactatcactgcagggtctactatgtatgccgagtttatagcatgctatgaggcaacggggcaggtgaactggctaaagaagttcatacccggtttaaaggtggttgacagtattgagaaaccactaaagttatactgcgacaacgaacccgcagtaatgtacactcacaacaatcagtcaagtggtgctgccaaacacattgacataaagtactatgttgtgaaggacaaagtccgggatcaaacaatcagtctcgagcacattaaaacagaaaggatgctcgcggatccgctcacgaaaggcctaccacccaacgtgttcaaggaacatgtagccggcatgggtttaagggaagccttatgaatcctggactacagggcccaaaagtaaagtatctgtttctgaatagagatgtgtatagtggctgtcgaatccatcggcgattgaccgtgacgatgaaacatgctctatttacaaatctgtgatggaatagaaaaagctaaaagaaaaagtgagatcaagggggagaatgttagatagatctctctccccttgagcccaacggctcaagggggccttgaccgcgccctgatcgggggcgcccagcccaatggctggtgggcccccgtcacactgcgccatataaaagaggggtggaggccggcacggcacaaggtacgagattcaccgccgccgccaactccaccctacaaaccctaatccgatcgagagggggcgcagccagtgacgggaagcgccaccgccgcgccacacctcatcgccgggacatctacgaccgtcactcccgcagccgtcatcgtcgtcgacctcaccggcgccgcatccacgacaaccgagcgccaacgacgacgatggccggcacttcttcatcctccaacacctcaaccggtcggtctatctaaaccctctcccgttttcaatctctacaatgtcattcatcaaacccaaatagaaccacccgactagatctaacctaggtgatcctagtgcaaagtctaacaatggtatcagagcaaccctagggcttagatcggttcgggaaaagaaatccaaagaaagaaaagcacaagatccgcacggatcaaaagaaccgaaaaccctaaccctaatcttacctcgtcgccggccgtcgccgacgccggcaacggagggggggaggggcaaagaggcgccgcctaggagccactcgacggccgcgcgcgcacctgcacgcgcgtaccgtcgagggggcccgcggcggcgccgccatctccgtcgtcgccatctctctctcacacggtgggggttagagacggtggggggagcggagaagaagagaaaaggcgccggccatggcgcggcggcgcgagggccgccggcgtcggcgacgccgctccgcgcggccgcgcgcccgcgagagaagagaagctagggttttcggcggccggccgggagagggggttttgatcctccgatctcggcgcccggccgtccgatcgaaaccctagctgatcggacggtcgacgccggtcgggccaaaaacggcccaagagggagagcgcgcgcggcgactttcccggcccaggcccaggttgcggcctggtgggaggggggagcgcccgcgcgcgccaaaaaggccgcgggccgacctgaaaaagtccgtatgaggtccctcgggggccgaaaatgaataaaagagaacagtagcaattttccattttattttgtcaattttcatgcaaattttcaatagaattttgaatagatttttgcatgttttacctctgtttaaatttgaaccaacgggagaattttcacagagagagaattacagagattttgctactgttcatatgttttttatatagttttccgctgcaaatagatgaaattgatgaaaattagtgtttctaaaattaaatttcgaaccaacgggagaatttaattttaggaacattaattatgtgctatgatgttgtaatttttctgaccaacgttgataattgcaatattatagttatggttatatgtgttatgtctatttctgcccaacggtgatgtaggcttaatgcataatattttaatgttaattttgttctcaccgcacatgattatttcaggtggctactccttgatgggttgcattaaagatattccgaccctgaaaggagataactacgcagaatggaaaagaaaactcgaccttgcttttatcttgggagaggtggactgggtgttgactaccccatgtcctatagaacctgctgaacttgtcagaggtgaaaatgagtcagatgctgactggcaaaagagacagagggacaatgctcctctcgtcatgtcgtatgacattgaacaaaagaaatggtccttagccaacaagaaatgtttggctgtggtaaagaatacgattgagcctaccatattgggctcgatcccagagtgtgacgctgtctcagagtaccttgaaagaataaagagtcagtttactggctcttcaaagacttatgctacacagctgatcaagcagcttgtgacagaaaggtaccatggaggtggtgttagagaccacatacttagaatgagcaacatggcttccaagttgaagccaatggatttgggcataacagatgactttctggtccatctggttatggcctcattgccaaagcagtttgacaattttattgtcaactacaacataagtccagagaaatggaactttgagaagctcattgctaattgtgtgcaagaggaggagagaatcaaagaatcaaatggtggttcaataaactatgttaaagataagaaaaagaaccacaagtctcccacctcaaaaggtaaacagtctcagcatctgcctcaacaacaacagttcgctgttgagaaagatcaatgtctccactgcaagaagacaggacactacaagaaagattgtcctgactttttgaaaatgatcatggcaaagaaaggtgagaacattattacatttgtaaatgaatctcattatgttggttactctagatccacatggtggattgattctggagcaactattcatgcttgtaattgtttaaaggcattccgttcgacgaggactacgcaaagaagagaaaacaccattagagttgccaatggagttgaagaaaaagttgaagctgttggagatcttcctctagagctcgcgaatggcttcatacttttacttcgagatgtcttttatgttccttctttgcaaaggaacttaataagtgtatcaaagttggattttgatggatatgattgccgctttggaagtggcaaatgtgaactatggcataataatgcatgtattggtcttgctgtgttgcgagacgagctttatttgttatctctttctgagaatgtgaatgttgtgtcctcgttgacaaaagaaaacaagaaaagaaagcgaactcccgatgtctcatcgaaattatggcactgtcgtttgggccatatttcgagggggagagttgagagactagttaagaatgaaattcttcctccattggagttctcagacttagaacaatgcatagaatgcattaaaggaaaatttgtaaagagcatcaaaaagggtgcaaaacgaagcgcaggaattttagagatcattcatacagatatttgtggtccattttctgtgaaaagtgtggatggctatgactcgttcataacattcacagatgattactcccgctatggttatatttatccaattaaagagcgatcagaagcattggataaatttaagatattcaaagctgaagttgaaaatcagcatgatataaagattaaagtagtaagatctgaccgtgggggggagtactatggtcgacatacgccttatgggcaagtccctggaccttttgcaaggttcttgctagagaatggaatagtagcccagtattcaacaccgggcgaacctcaacagaatggggtagctgaaaggcgcaaccgtacccttatggatatggtgcgcagcatgatgagctactccacactaccactcggtttatggatggaggcgttaaaaaccgccattcatattctcaacagagttccaagcaaatcggtgcccaaaacaccgtatgagctatggacagggagagtaccctcgctaactcacctccgtgtgtgggggagtcctgcagaggccaaagtatttaacccaaatattgggaagttggaccccaaaacagtcagctgccattttattggctatcctgaaagatcaaaacgctatcgtttctactgtccaaacagttatacaaagtttgtagaaacgagacacgccgtcttcttggaagacgaaatgattagggggagctcggtagttcgagaaattgatcttgaggagaggcgggtgtctgtacccgctccgtcgactcaggaacctttcttctctctacctgctgatgttgtgcctgcaatgcctgtcattgaggtaccagcacctgttgttacccctcctgtggcaacaatgaatgagagtgaggaacctgttatacaggattcaacagaaatggttgtcacaccagaggaggagctacaacagcctcaaatagataatgtgccagtacaggagactcatcaagagcctcaggtacaggatgtgccaaatgtgcag

SEQ ID NO: 8223 - DNA, 1654 bp, Oryza sativa
cccagagagtgtccgagtcactgaccaacctgctgaacttcatggaatctctctcgttcatagttgggtcatcaacgtcacgtaacatgtcttgcagcatatcagggtccacatcaaccatttcaccgcccaatggagatgggacaaacatgtcatgctcttcttcatctccttcttcgtgattgtctgcaccacttctgtctgcagttgcaccatcagtacccagatcttgctctccatgcttcacccaacatgtgtgtctctccatgaatccccggcgtatcaagtgagcgtgtacttccttttcatcgtccaacaaaatatcattcctgcaatcgttacatggacaacacatgtacttgtcgtttcttcttatcctatcttcctctgcggctttcataaaacttaatacgccatctctatactccttgtactgacgcctcaagtcagtcgtgtacatccaacttcgatccatcgctgaacaatgaacaaaatattagttaacatctcatgacataagtactactaaattaataggaaatgattagtacccttttgtttacacccaaatttggcacctaggattaaaataggaaagattgccaaaatttggaagtcaaccggtttcctccgagtgggccggtctgaccgccgtgtgttgggcggtcagaccgccggttgagggtcggccaaaccggcggtgtgtagccggtctgaccggcaggtccgagtccgattgtgtttcgtcgggtctcgagatttccttactcgggaaggcatgtttctggtttcctttggtttctaccccgagttagacgtggaggagggcctgtagagggcaagaccaacctctatataagggacatggccggttcattgtaaaaaccaatctacaatcaatcaatcgaatcgtttttcatattgcttttagttttctcttagtttgtccatctttatcgatttgcgccgtaaaccgtccgccgccgctgcgagagtgcgacacctctttgtaggtttgtcctgaaaaccttccgttttgcccacgagacgggtagttatctagaaatcggctccgctagccggtttagttatcaaaacccatctaggtttagctctttgctagatcgaggtggttggcgactttaggatcaccgcaaggcttaaggtgcttcgatcgtgcttgtcaacttgtcaaaaaaaagttgccaacacgttttacttacttttatgattttcctatttttgtttgcaaaaaaattacaaaaattcgcctccttcaacctcccaccaaaatagtgaacagtgggataactacagacaacggactgctggagtatatatagtgtgcaaagtatatctcaatcgggcaaaaaaaatgtcatctctaacgggcgcacactaatctctaacgggcagaaatagaagcccgacaccgataagagtcatcggtgacgggctataggaatatgcaccccgacgagtacattacaacggcaaaaatttaggcccaattgagatgacttcgttctgacggcccacgttgcccaggcatgtaatgggccgtacagatgagaggatctgtgtgtaaacctaccgccaacaaatactagccatatactacataattcttttggtttcttttattttcaaaaca

SEQ ID NO: 8224 - DNA, 2681 bp, Oryza sativa
ttgtgtgaaagatctagcttactgaggagctgtaggccactcaaagcagttggtatggtccctggcaaactgttataggaaagatttagtacgttcaagctttttagattgccaaaatatactggaatgtctccagtgagaatgttttggcccaattggataactaccaagttttggctttgccccagagcatcaggaatttccccagaaaacttgtttgatgaaagatgtagttcgaccagttgtttaagatttccatctcctagatgtatgttaccttggaggttgttacagctaaggtctaactctgagagcttcgtaagatggcctatgttaggtggcataagacctttgaatttattattttgtaagaagagctctgtcaactgagtaaggtttccgatggagggcgtaattggtccgatgaagttgttctcacggagaaatagaccttgcagatttttcaggtttccaatccattctccaatttcaccacaaaaactattgctactgagaaagagtctgattaagtttggaaagttccctatacttggcgggatcgttccctgatatgttatttccgaccaatattaagtgctgaagattgattgatagattaccaacggaatctggtagggatccctgcagattattataagctaatgcgagcacagttaaagaagtacagtttctcagcgcatgtaagaattcccatcctaggttttcattcgcttcaagcttgttaaactgaaggcttagtacagacaaatttgaaagccttccaaaagaggtaggaatttgtccagcgaaattgttgtttgcgaaatctataggtaatagcgctgaagcattgcctaccgaaggtggaatctgaccttccaaaatgttttgactcaaggatactatttggagatgaaggaaggcatcatcaaaggttgtgtttggttaggcttttcaacctgcttttgcttttgcaaaagccaaaagccaactaaagggcccaaaagccacatctatttttgcctaaagccagtttttggtgtagtacaaatcaaaaacatccctaattaaggtccggcagtaatagttgttggaaccttcatattcattccttccaaagagaagcactacaacttgattttaagattgccaatagaagatggaatttgtttaatatgtagtgaaactgttatcttcgagcaatagccactctagttttgctagccttccaacccatccttcaattgtaccacttaaactgttggtatctagtgcaagtgtagttaagcctttaagtctccctatgcttgggggaactattcctgataactcattaccacctagatataactgttgaagatcggttgataagttaccaattgaacttggaatagatccttgtagctgattcgcagctagtgagagaacttgtagaagactacaatttgttaatgcgtgaaaaaattcccagctttgatggctgttactagcttcaagctggttttcctcgagatttagatgatacagattacgaagcttaccgaaagaactaggaatttctccattaaaattgttgttttctaggtctagtctttccaaccctgagatatttcctacggaagctgggatgtaactttcaaacatgttatgatttaacataagccattggagattggggagggcatctccaatattcggtggcagtgtagtaccaaacttattcaattccaaagctagcatctttagagaagacatattaaagaggacatgtggaatttcacctgacaggtcattgccacctaggagcaacctcgacaaatgtgacaaattccctagttggtcaggaattgttccagtgaagtgattagaagctagagctaatctctctaggtgagtgatgttgctgagggttggtggaataattccagtgaaattgttccaggaaagccgtaagaccaaaagattggagaggagatctagtttgaggggaatttcaccagccatgaaattcttagacagttccaatattcttaggctggagcaattgacaagtgtttccggaatcacatcttgcaatgagttcgtgctcagattaaggacttgcagcatatgcagatggttcagaggaggtaacaagccagagaactgatttgtggacaggtccaatttctcaaggaatgttaggtttccaagagagcttgtgattacgcccgctaagctttggccggagagatccaacgccacaactcgccctggccgagttgggctgcatttgacgcctttccacctgcacaacggggtggttctattccaggaactcaagcttcctttcggatcgttagtaacggcctccttaaagtcgagcaacgagagcatgtcagtggtgttgtcgtagagctgggagcagttggtttggctagaatttagcagcaatagcaacagtgtaggcatgacgagtttcatgagcgtcattagctgttatctgcagaagataaagcattgcacaatttatttcaacacaaaatatcgaaacgtaaatgggcaattgacataagcatttatattgacgtgcaattcttttcacgaaaaaataagcattggtaagaagatatatgttttgtactgtaaaaatctaatctaaaggcttaggaaaactgcacttgactatcttgaacagaact

SEQ ID NO: 8225 - DNA, 2978 bp, Oryza sativa
atgtcatcgttcacgtggcgtgccacataggcaagaccatggtcaaaagtggctttggacctggatgatacaataaaccaagtttagagattttgatgtgcgctttgcaagttcgtgaacctaagtaaaaccttctgacaagtttaaggaccgtttgtgcattttactcttcttttttttacacgcacattttccaaaccgctaatcctaaaccctaaacggcttttttttaaaaaaagtttatatagaaaagttgctttaaaaattatattaatctatcttttaaatttattttatctttaattaattatacgctaattgatcaccccgttttacgtgaaggttggtgaagtttttaaccactaccttcaaacgcagcctgaagatgttatctgtggagatatatatatcatataagtcgagcacacacaagtattatattgtcattgcgaggtagacgggaattaggagtggttaggcctattcaagccagagcccgcagtaaataagacatgcagtgctttatgcatacagtctaatcagaaaacaaaacaagagaaagttaacgaacctctgctcgaacagggagcaccgccacggcgaactctccctgtaatcgtcggtttgccgtagactagagatactaatgccgtgtgtttagttttttcttcaaactttcaatttttccatcacatcaaaactttactacacatagaaactttcaatttttccatcacatcattctaatttcaacaaaacttccaattttgatgtgaactaaacacagcctaattaacatacatatatagcgggtttagtcccctggatacataaaacgcagttccacggctctacagtagtgttgcatccactgccatggcccattgctaagagaagagaagacagagcgactcctttggtgtttactgtttactccgatttttcgtctccaggagtttgtcctctttgctagtgttctctgattcgcgtgttagggaaatgggaatgaaatccggcaggaccgcagaagattttccttttcttatctttttcccctcttaaggtagtgggctagtggctgcatatgcttctcgtgaggaagcgtcttcggcgtcgaataagttcacctgacgtcccttaactttacattgaatttgtctgagatccccaatcctcaatgccagaaatctctacccctcaactatccctgaccatgtaaaaaaggtcttgaggcagtatagacccaatttatccctggttttactgacgtggtgtacggtgggccccacatgttagcgctcacttggtgtcagcgtcgtcagctcctctgtcgagccggaacatcagcccggtgtgggtgcaggccactgttgcacctgctgcgagttgccgtcggcggtcaccgccgaggccacctcactttggatcggctgcaccatggaggggccttcatcatcgcctcctactgctgaggccgctcctcttgcgcgcttcgtgccgccctcctcatcgtcccccatgactgtctacgacacggttagtccataaggatcagacacctatatcccaggaccatacaaacccgttacatgaaatgcgccaaagccaaagcaagccccgtcaacatgcttaaacttgaaaagcttcaatgcagaaaaagtgacgcttgtggtgattgttgtggtggtgatggtggtggtggacacggtgaccgccacagatccagcggaaaatgtggcatgtcacagatgatccacgactcgctagtgttcgacgatggtcaccgtgtagtgggtggcaaggtgcggtcatggagcaccattcaccaccctcgacaagcctgtggtggtgatgggaccaggggcagccggagccacgccgtggaggcgcagcaggcgtcgccgctatcgatgcccgtctaaacactgaagccgcaaggcgagtcgtcctctagtgtgggctacagagacggcagcgagccacgggcgatgtgcccgtgcaagatctcataggatacgcctaggggtggcggcgacggtggccatgaaaaggtggtggaaccaggcggtgacctcggtgaccgcgggtcacaccaccgctccacctcgagcagcgggtcgccacccacgaagaccgttggttcatgatgctcgcccgcctgtcccacaccctattccccgtcaccaagccgctcgccttgccgtccccatcgccacggctcccccgtgaaggaggcactgagttgccatcacaacgcctgcctgccctgcgctccgtcccccatcgcctcgtagtccctgtcatcatgcacgcgccccccgtcccctatcacctcgccgtccccatcaccgtgcctctcccctcccatctcataccggccgcctcccctctaccctgttccctcctcccatcgcgaggcgctcaaggcgacggagcttggccgggctcaccagtcaccagctgcctctcccctctctcacgccaccggcctcccaagattgctaaagagaagataagaaagaaaagaaaacgaggagagaagaaaagaaagaaagaagagataagggccccacatttttttactcacttacatgtggatctcgtaattttattattttttattttgctgactaggatgccacgttaaaaaaaccaaagaccatacttgccctgggtcttgtataatttaaaggtgaagatggcgttgccccctggtggcatgctcgttacaacgcagggtttgcacgcgccgtggctctagaagtggtagaacggcccaggtagtatacatatggcccaacaaagcaaagctatcagcagccgaagtgccgaacaaagccatcttctgttccacttcaccgcgaggttgcaaccctgcaggagcggcggtgcacgttggcgccgggcggaagactcgccgacctcgcgcggcggcgtcttcctcttcttcaccttaggagaatcgacggcctcagtca

SEQ ID NO: 8226 - DNA, 10311 bp, Oryza sativa
taacgtgtaatcgtccataagaggccgaatttaatccttaaaaactcatcagatttacccttaaaagtggcatctaacttatttttaaaaacaatcatagatgaatctattgtagatgctatttgttgttgggtagattgtattacctcatcattacttaccaagtcgggagcgagcttaggaagtggctcgggcttaatgatcacgccttgacgagtcatagtgcacgccctcatcaacgcttcctgtgtcatctccttgatgtactcctccatggacttgcggtcttctccttcgaaatcatccaatgagatcggcatgatctcattcccgctcatcatggttgatgaagaaattccttgattaatttcggccatatagctcatagctgaaatatttgaccgaataaattaatatacggtcttcttagaaaacagccgaaacaaatgaatcagctttaatatttctttttcttaaaaatacgtgagcggtagtaaatcggctttgttagcctgatttttcttttttaaataacttcactcggtttctgtacacaacaaagaatatacagaaaccaatactactgttgctggctctagatagactgatagatcggctttgtacagcctgatcgttttcttttcagaacgcgttagatttctgattttttttttcagaccgtgtacaggaaggatactgccggtcgcttgttgctgtttccacacgtggataaagatagattccggctgtatagccgaaacactcgattagacgggaaatcgatgaatcgatggcagcagttagcttgatgaccgaacagtgtcgccgccaaatagattgatccgatcaaaaatacgtagcggcagtgacggattttgtatagattgatttcggctgtttggccgaaattcttgactcgacgaaacgaaaaggtgactagtttaaacggaattcggccgtgatatggccgattagatcgtttcccagcggagtcgccaaaaatcgtgttggcaacttttttgacaagttgacaagcacgatcgcagcaccttaagccttgcggtgatcctagagtcgccaaccacctcgatctagcaaagagctaaacctagatgggttttgataactaaaccggctagcggagccgatttctagataactacccgtctcgtgagcaaaacggaaggttttcaggacaaacctacaaagatgtgtcgcactctcgcagcggcggcggacggtttacggcgcaaaccgacaaagatggacaaactaagagaaaactaaaagcaatatgaaaaacgattcgattgattgattgtagattggtttttacaatgaaccggccatgtcccttatataggggttggtcttgccctctacaggccatcctccacgtccaactcgggatagaaaccaaaggaaaccagaaacatgccttcccgagtaaggaaatctcgagacccgacgaaacacagtcggactcggacctgccggtcagaccggccacacaccgccggtctgaccgaccctcaaccggcggtctaaccgcccaacacacggcggttagaccggcccactcggaggaaaccggtagacttccaaattttggcaatctttcctattttaatcctaggtgacaaatttgggtgtaaacacatgcctccctgcctttttgatgaacaacgtgaatctaaaagcatagaccatgtttttggtcttaggacgataacccaattaccggccatagtacctcctaagcgtcttgccaaacgctcatgaagtatttcttcaagtatttcccgttgattgctcgctgaaaacgctccccttgaagtgtctccaaaaagtatgcgttccctcgaacggtgccgcacactcgataaggaccctcccaactaggagaccacttaccgaactccttggatcgagtacccaaaggcaaaattgtcttccaaaccaagtctctaacctgaaacaactttgctttcatcctcttgttgtataccttggccacccttttcttctctttctctatctcttcgaatgccttcaagcgcctgtcgatgacttcatcaaggttatctcccatcaacgtcttgtaatcttcactggacaaatcatcttgcttgatataacgaagagaaccaagatttacctcctccggtaaaacggcttcttgaccataaaccaactcaaaaggagtgactttagtagcactatgtttagatatcctatgcacccacaatgcttcggaaagcacctcatgccactttgggtattcctcaatctttttcttcactaacttcaacaacgtcttattactcgactcggcctgtccattagcctgagcatagtaaggagaagaactcaacaatttaataccataagattcggtaaaactcttcacttccttagacataaaagaagcaccttgatccgtagttaatgtttgcggaatactgaatctatgaataatatgtttcaaaataaagtcaattacctccgtatgagtcatattattcaaaggcacagcttcggcccacttggtgaagtaatccgtagcaactagcacgaacctatgcccctttgatgacgaaggataaatttgaccaatgaaatccaaagcccatcctcggaacggccatggtttgattatagggttcaacacggcggcgggcgccaattgaacattgccgaaccgttgacaagcctcgcatcctctataatatttgaagcaatcatcaatcatcttcggccaatagaatcccgctctcctaagcaaccaattcatcttgtgggccgattgatgagttccacaaattccttcatgtacctcccccatagccactttagattgatctttatctaagcacttcaacaagacaccatctatgttttggcgatacaaatctccatcaagcaatgtatatttgaatgcttgccgctgaattttccgatcacccttaagtgtaggatctttcaaatatctaatcaaaggaattctccaagctatttctaattcatgggcacaaatgtccgaattcacaattaattcggccttttaatcaattgtaacatgcccccccagctctctacccgagatcggttagaccggccacgcaatgccggtcagaccacaatgtctgcccggtcagaccggccatgcaaagccggtcagaccgctggctaccaccggtcagaccggccgtgcaatgccggtcagaccgtccctggtctataactttgccaatttcgtccaaacttttgaaatcaagcatcggcttttagtatataaatttttcttcacataatagccagatgcttggtatatcaaattattgaaccaaaactccttctttctagacatatgaaaaatcataatatccaactaatatgtctagatgaatactaattcaattggcttttgaaacaataatcatcatggcatcacaacacttagccaattgaagtatgatcaataatgaatcaccaaagtcatatgtgtcacatgcatagattccaataaactaaaaatgtaagtaatcggcttgagcatgtatgcaaaatattaacaatgccaatgttcctaaagaaaactactctagagcaaatcatcacattgaccattgacattagccgaattactagtaagcaaaactttcatggtgcaataaatatgaaatctatatcttatatggtgatccataaaaacacatatgatttggctttaaataaatatcaaagagtcatgagccaaatcatacttcaaacaaattatatgccaacctaccaattctactacctagaattggcatttgcaacatgtatgtataatatcaatttgataagcaaaaacacacatgtgctagatagcaagcaatgttctaataacatggcataggcatataatataatggtaaacacaataaactcataccttgccttagcatccaacaaacggcggctcaaagatgtgatgttgtatccatcgccgttcatcttctcttggttccctaatgaacatattaatgtcttgccccccaagcaaaatcggctttctagattgcgcgatttcgaaggcaagacggataccgcactaacagtcatagcatcatgtgaaggagacttatctctaatgaccgatgattcttctcccatcaaattggatttatctctactatgggaaatcaccggtatcttaacttttacctctttggatctccacacttgcctaggtgcttttcgaggctctaaattattacatgttttgttctccacatcttcggcctccttttccttttgacctatggcccgaagacgttgtagcctcctcttttgagagcgagataagccggaaggtatgcacttcggctgtggttgttttccaggagctaaacaatgattcttcatatttttggtcgaagtggaagctcctatgttgctctcaattttcctactcttctcaaatgccccccggtcagaccggcctctgagcccggtcagaccggccacaagccgtcggtcagactggccagtaaggtcggtcagaccggctgtagactggcggttagacaggccagctgtctcgattagacccccaatgttggcagtcatggcgtcggcttcgatctcctttgcctgcgtggtttccaccgcatctccagtacatgaacatcttgagactcctctttggcagcaacaacctccggagctttggtttctttcctcacccacatcttcttaaactttttcacctttgatccaccggaccgattcttttgtgggaaacggtcttgtcttgaattagatgaatgatttggcactgtcctaggtgattcctcccatccttgatgaaacggcgtagagaattgagacatccatggcatgtaatacataaaaggataaccatatagtgacattggatatggataccatggcatcacaaccggaggtttgtatggagttggtatagttgatggctccgattgctttggtgtttgaccaaatctcttcctacgagacgatcttggtctttttgaatcactagtttgattattaaatcgttgaccggctaatcctttcttgtacttagccataaacatctcaaaaatgagcttcggctttttggtcttttgagaactagatgactcaccctttgcaactttatgatctttggccatcgcatttttgatcctattcttagggagaacatcactaataattccggtcttaggcatagatgtaaccgaaatagtttcacaagtgaccgatgaagtatcaatcggtctttgctccatcaagcttgcatctttaaaataatcatgaaactcatgctccatttgtgaccatgtagaaattgaattaggagcaagtaaactataccatgtagatgcaaagtttgacaaagaaagaggaaacaactttaacttaagcaaatcattactaccggccttaccacattgatcaataaattggccgatatgctccattgttgttctagcatcctcacctgtaaattttgtgaagttgggcacctcaaatccttgcgggtatgggaccgaatctacgtgttcaggatacggcctttgatatgtatgcatagcttctttggatcctatttcactactatcccgcaagacattgtcattatcttttccaacatctacatgaccgatttgtgattcggtcttaggtgacaatgctatttcattttctcttgtaatacaatccgaaccgtcatctagttcggctatatcttcaatgatgctatcatccaagctagcaacacaatccgaaccaccatttggttcggctattccatcgttgtctaaactagtaacacaatccgaaccaacacttggttcggctataatggttattgcattatcatccaagctagtaagacaatccgaaccaacacttggttcggctataatcgttatagcattattgcacaaattattaacacaatccgaatcatcgcttggttcggctatacatgatattgcactatcatctaaactagcatttaagttattgtcatccactcgtcttccctgagccagagcttcatgcaacacatgatcaatatcaagaaatacttggccattcaatttctttttattagaatcaagcaatctatcatatgcaatgttggccaaatctttgtcagttattttcaaactaaaacatcggcttttaatatctctaaatctttcaatataatcaacgacagattcattgtatttttgcctaaccaatgttaaatcaaacaacctaagctcagttttatcagtgcaaaaatgatcatggaatttttgttctaattgaacccaagtataaatagaatttgccggtaaagaagtaaaccatgtaaaagcagtaccggacaaagataaagaaaacaagcgcaatttaaaagtatcactattagcctcaccacattgcgccaaaaattgacctacatgctctcatgtggtcttactatcctcaccactaaacttggtaaattcgggaactctataattacggggaaacggcacattatcataataatcaggatacggctttttgtaaaccctagcatgattcctagtttcaatcccgaatctattcctaataatctcactaattatatcctccatattattaggcccatgttgatttggcggtgaattaggtggcctaataggttgtgtttgtggcgcaatatgattatattggccttgtctagtatcgggaggataccccctagcaacgtcattataagcattaggaacacgtgggggaacttggggactatttgtagtagtagatataggaggatcaaatgttttaaagtgatacaaataactagcattagtcatcggatctattccctgtattggaacaattgcgccggtctgaccggcccagggcccggtctgaccgacatccagaggtgcggtcggaccggcctgagtgccggtctgaccgccggggtaatacccggtctaaccggccgtttggccggtcggaccgacggctaagtcccagtttgaccggccgtcaggcctggtcagatcgaccgtgtgcgccgctccatcggttttactacccgtttgatctataggaggttggttagcagtggtagaggctttatcctttaacgtgtaatcgtccataagagggccgaatttaatccttaaaaactcatcagatttacccttaaaagttgcatctaacttatttttaaaaacaatcatagatgaatctattgtagatgctatttgttgttgggtagattgtattacctcatcattacttaccaagtcgggagcgagcttaggaagtggctcgggcttaatgatcacgccttgacgagtcctagtgcacgccctcatcaacgcttcctgtgtcatctccttgatgtactcctccatggacttgcggtcttctccttcgaaatcatccaatgagatcggcatgatctcattcccgctcatcatggttgatgaagaaattccttgattaatttcggccatatagctcatagctgaaatatttgaccgaataaattaatatacggtcttcttagaaaacagccgaaacaaatgaatcagctttaatatttctttttcttaaaaatacgtgagcggtagtaaatcggctttgttagcctgatttttcttttttaaataacttcactcggtttctgtacacaacaaagaatatacagaaaccaatactactgttgctggctctagatagactgatagatcggctttgtacagcctgatcgttttcttttcagaacgcgttagatttctgattttttttttcagaccgtgtacaggaaggatactgccggtcgcttgttgctgtttccacacgtggataaagatagattccggctgtatagccgaaacactcgattagacgggaaatcgatgaatcgatggcagcagttagcttgatgaccgaacagtgtcgccgccaaatagattgatccgatcaaaaatacgtagcggcagtgacggattttgtatagattgatttcggctgtttggccgaaattcttgactcgacgaaacgaaaaggtgactagtttaaacggaattcggccgtgatatggccgattagatcgtttcccagcggagtcgccaaaaatcgtgttggcaacttttttttgacaagttgacaagcacgatcgaagcaccttaagccttgcggtgatcctagagtcgccaaccacctcgatctagcaaagagctaaacctagatgggttttgataactaaaccggctagcggagccgatttctagataactacccgtctcgtgagcaaaacggaaggttttcaggacaaacctacaaagatgtgtcgcactctcgcagcggcggcggacggtttacggcgcaaaccgacaaagatggacaaactaagagaaaactaaaagcaatatgaaaaacgattcgattgattgattgtagattggtttttacaatgaaccggccatgtcccttatataggggttggtcttgccctctacaggccctcctccacgtccaactcgggatagaaaccaaaggaaaccagaaacatgccttcccgagtaaggaaatctcgagacccgacgaaacacaatcggactcggacctgccggtcagaccggctacacaccgccggtttggccgaccctcaaccggcggtctgaccgcccaacacacggcggtcagaccggcccactcggaggaaaccggttgacttccaaattttggcaatctttcctattttaatcctaggtgccaaatttgggtgtaaacaaaagggtactaatcatttcctattaatttagtagtacttatgtcatgagatgttaactaatattttgttcattgttcagcgatggatcgaagttggatgtacacgactgacttgaggcgtcagtacaaggagtatagagatggcgtattaagttttatgaaagccgcagaggaagataggataagaagaaacgacaagtacatgtgttgtccatgtaacgattgcaggaatgatattttgttggacgatgaaaaggaagtacacgctcacttgatacgccggggattcatggagagacacacatgttgggtgaagcatggagagcaagatctgggtactgatggtgcaactgcagacagaagtggtgcagacaatcacgaagaaggagatgaagaagagcatgacatgtttgtcccatctccattgggcggtgaaatggttgatgtggaccctgatatgctgcaagacatgttacgtgacgttgatgacccaactatgaacgagagagattccatgaagttcagcaggttggtcagtgactcggacactcctctatacgcaggatgcaagccaaagcacaccaaattatcagcaacattagacctaatgaagttgaaggctagtagtggatggtcagacaagagttttacagaacttttgggaatactgaaggacatacttcctcaagagaatacattgcccgagacgacatatgaagcaaaacaggttctgtgtcccctagggttagaggtccggagaattcacgcatgtccaaacgattgcatattgtaccacaaacaatacgcggacttagatgcttgtcctgtctgcaaggcttctcgatacaagcgaaagaagagcgcggctgtgcgggggagggaaagaagtcaaagcggggtggtccggcgaaggttgtgtggtatctaccaatcattgatcgtttcaagagaaaatttgccaaccccaatgaagcaaagttagtatgttggcatgccatagagagaaggaatgacggtttgctaagacaccctgcggattcgattcaatggaggaatatcgatcgaaagcacaaagactttgctgccgaccttagaaacatgaggatatgtttgtgtacggatggcatgaatcctttcggagacatgagcagttctcacagcacttggccagttctcattgcgaactataacctcccgccatggttgtgcttcaaaaggaaatatattatgttgtgcttgttaatccaaggtccgagacaaccccgcaatgatatcgatgtgttcttggagcctgttatcgatgaccttgagattatgtggaaagagggtgtggaaacttgggatgcatatggtcaggagaacttcacgctatgagttctattgttctgcaccattaatgattatcccgcactgggtaatctttctggacaaaccgtgaaaggaaggaggccatgctctgactgtatggaacatacacgcagtaggtggctgaagaaatcaaga

SEQ ID NO: 8227 - DNA, 2506 bp, Oryza sativa
tacccccactatatattgcagtacagaagagtagtttctcacacacacatccagtgtatgctgatggccaatttatcatgttttatgcacgttgcattcaaaatcaacagacaacacaattacacaagttccatggtacattgtaactcccttcttcgaagcttatcgtctcgcttggttgcttcagcataggatgttctgattgcttgcagcttaatagctatttctctaatgtccattcgttctcttgggatcggatgagtgcaagaaagagcaacctgcactacagacaacaagcatttatagaacctattttcttgctcgatcctttcttgattgaagcctttgcattcttcttggagttgagcatcaattatatgtggtatctgctctgggaagctcttctccacaaagttgacaatgttgagctcattctcaaacataggatctgttggtcttttacctgtcagcatctctagaagtactattccaaaaccgtaaacatccccataggtcgatgcattgccacactgtgcatactctaaaagaaaagataaaatcacactaattagtacaatgcaacgtctaagtattacttcagaaaacaaattgcctttcatgaattgaagatgtggcaataaccatatatacctggagctatataccctatggttcctttcaatccaattaagctattcggacaggaatgtccaagtgaggcaaatttagactcaagaatgaggcttgaaattccgaagtctcccaaatatgcattcatatcactgtcaagaaggatattcgttggcttcaaatcacaatggataatagatctttcacattcgtggtgtaaataggacagtgcattagcaatgtcaacagctatatttactctctgagataagctcaaacattttgaagcaacactggtattttttttatgcaaccacatatccaagttcccattaggcatgtattcataaatcagagctttgaaatcatttccactatagtctattgttgaacacgccgttaggataggaagaaggtttcgatgtcgaatgcttcttaagatctcacattctgatatgaagctttcgtctgcgcatctcgtctctaggtcaaaaactttaatagcaacttgtattttaaccggacttaacttagctctatatactgaactgtagcttcctcttccaattaagtttaaccgtgagaagttccctgtagcttgggctatatccttgtaagaaaccctagggaactgctttccaaaagaaagcaacgatagatatgttcttcttggtgtcttcttcacaaggtatataaggcatatcagcaccgtgagtgacaagaaaccaactattggaatcaacaatctggtcaaattgctcttcctttctattctgtgagaaacttgggggcacgatggcatatggagatccataactcctccgcatagtcccctattgccttcaagataaacagatgtagcatttctgaataatccattccttggtatttctccttggagattgttataagcaaggtccagattgctgagtagaggtagatcccccagtactgctgggatggtgcccgataagatgttatgggaaaggtccagattgctgagtagaggtagatcccccagtactgctgggatggtgcccgataagatgttatgggaaagatttagtacgctcaagccttttaggttgtaaagagtaattggaatggttcctgtgagaaagttttggtccatttggatgatcactaagttgtggcacatccccagagaatcaggtattttcccagtaagcttgtttgatgtaagttgtaggtagatgagttgtctaagattactgatctctggaggtatggtaccttgaagactgttgtagctaagatccagctttaacattagcgaagggtttcccaaggagggtggtatgtgaccttcgaatgcattgttttccatatagagctctgtcagctgtgtaagattgccaatggagtatggaataggcccagtgaacatgttcttttgaagatataaagattgcaagtttttaagattaccaatccattggtcgatggcacctgctaaactgttttcatcaagtgccagtagaatcaacccagagaggttccctatgctaggtggaattataccagataatttgtttccacccaaaatgagatattgaagagtgctaggtaggcaaccaattgaattcggtataactccctgtagttgatttgcatttagtgcgagcatttttagcgccgtgcagtttgtcaacacatccaggaatttccatccttctgtatcttttgcttcaagcatgtttagctgaaggtctagtttagacagtcgtaaaagcttaaccaaggaagtagggatccggcctgtgaaattgttggattgtagaacaatatcttctagcattgaggcattgcttaaggaagctggaatgtgaccctcgagtatgttgtgacccatgta

SEQ ID NO: 8228 - DNA, 9633 bp, Oryza sativa
  unsure (1)..(9633): unsure at all n locations
atgtgcccaaggattgccaacttagtgtgttgttgaccaagaccgcagaaatccaacgaacaactctacgattgtctcatcagctagtcagctccaacaacaacatcgatgatatcatccaccgcaccaatgctcctcttgctccacctaactttgcaataaatcatggcaataataccttcagcaccaaccactctctgcatcgacagcctcagcaaagaattgtcgtagatggaagaagttgtgtctctccccgacctactccaggccaagcaaagggcaatcaacctcaggagggcgataccaagcagaaaaccgtcatccgcttcaaacagcaatcagaaggaagcttctcctgtgaatgatagcaatatgcagtcctaacacatcatcacggaaccaatcaaggatgatgcagtcactagaacaacgccagctatatctctccagaatcaaaatgagcagccacgcttgtggttttcagttcgctacttatcattgtgtaatcgaaagtttgcagcaatcatgtaataaataaatatattcatgtctataaacagtgagcttgctatgtttatggatgattcatgttgaggatacaatgtaccgatgataagcaccttccctttttgtttaaggcagtgccttgtattcgggtaataagggagaaatcaatatttgagaacataatagtcgatggttggtaattagtctatcaggtatcagaaaagggtcaaaggtgatatggcagaagaacaatatggatgctccccatctcgaggaagcactaaagatgaccatcggcaaataaaccctagtggcatagatacaaatagcaagcaatgtatttcccggaaggtagtcagtgcagctttttgacgaaccacatcaaggtttcaccgaaaggcagcaagccaaaggacctcatcgtccccagaagcgtccgcaatccacattaaagaataccacctgttagagataagccgaaagatgattgataaaagagattggcaaagatgttctctagcatgaaagaagtaggccgaaaggtgattgataaacagaaacatgctctgcatcgctcaaggaagacccctgatagtaattgcccccccacaacagtcaccttgtcattaagtaagcaagatgacctaggtaaaagtgtttctattaaggcaaggagtgaaatcttcaactcggtatcagatgctacacggagtgaaaagtgcaagccccggttaccaggcaacgccatgtcttgggagatgatccaatgggaaagaacacatcaaggctgaaggtgcacaggaatacgttgaatgctaaatgatgacaacatgaagagaatagcggaaagtaaactgaacataaagaaagtgaatctgagttgcttgttcgtgggagctattcccagttatgaaccaagtgatatcttcgaagatagtctacagaggtcagagtaaaatcacatctaacaacgaagcttcaaatttggccggataacgatcagacaataagaagtccagcagtaaaactatttgggaagacgtcaaagtatatccagtgggataagttggttctcttgggaagcataattcaaaggcaaagttatcgacccttgcatcaaatagcagaagtagctatcacccggagaccaggaaagctaatatgaggcagttggtggcgagttagaagcaaatgacaagctcaacttagaagtaaatgacaagcatgatattctcatgatgacaagcatgatattctcatgatgacaagcatggtatcctagtaatgacgagctgatctcgacgcataacgtgaaatgggtaacttgtatgaggttgactccaaagatatgaactatacgaagttctggaactgaagccccatcttcaagtgccgcaacccagacgaagtcagctaaaggttcaaccagggacaagtcaggtgaagagaagattccacctgcaacaggagatcgagacaagcagtacagagtggagaagctttgctaggcaagtttgttatagaaaacgcgacggaagaagtcagataagaagagaagaccgcccaacctatcttcctgctagcctcctcgaatctcggggacgagattcttgtaaggggggtggatttgtcacgtcctgataaattcatcccgaaataaaaatcattccctaaaaggaataatagaattaattaaaattcgaaaagaaattggcaaacactaaaatacgtacaagaaaaattcaaatgtggcccggagaatttttgttaaattctccttggtctaaaaggagccctcaaattttagtggaattttcagagcacaaataataattgagaagaaataaacaaagttgaaaaggttttatagttttactctgatcagaggtgtacaactgtacccacaagacacagccccacgacacatttccgtgcgccgacatgccaccacgacatatcggaaagaggccgtgacaggacccttcgcataaccccctctaaccaagcacaccacacctcaggtttcacccccactcctcgcaaggcagcgggcagtcccctctcgtgcctaggtgaatccggaagccgcataggccgtcgcagggcccatccaaactccatcacgcccacccttgcctggatgcgtcagctaaaggaaagctacactacaagccctgccgttgcccacgctggcttgtggtaagtacgataagttcttccagggcatcccgcgaaccggtccttaattgccatgggtgcgactagcaaaactgtcacgtcctgataaattcatcccgaaataaaaatcattccctaaaaggaataatagaattaattaaaattcgaaaagaaattggcaaacactaaaatacgtacaagaaaaattcaaatgtggcccggagaatttttgttaaattctccttggtctaaaaggagccctcaaattttagtggaattttcagagcacaaataataattgagaagaaataaacaaagttgaaaaggttttataaaaagaaaaatccctaaaagtcttcttttcccccctttttccctcttgggccggctcagcccaattccctccctctctctcctctcccccgcggcccaccggcctcctcccccgcgcgcgcgccgctgacaggcgggcccgcccgccaccctcgctaacgggtggggcccacctgtcatccctatcctcgcgccgcgcccgccgcccgcccgtgccctagcgccgccgccgccgccgattccgccgcatcccgccgtccccgcgcgcaataaagtggggggaatcattccccgtgattccctctccgttttcccccgcttttccctctctctctccctcggattcgttcggatttaatcccgcaagtttcaccggcgtcattgatggagccgagatctccgcggccgattcctccctctccggccgctctctccctctcccgacgctatataattgttccccgtgcctccctcctccgtttccgccactcgccgctcgctctccccgtcggattcgtgctcgcgccgtcctcctctctctccgccgtcgccgccgagctccggttcgccgccgccgtcgctccggacttcctcccgactcggcgtcacctccatcggcttcgccgcgtcgtcgtcgacctcgtccgctcctccgtttcgcccgccgaccgccggagcaccgtcgtcctcgccgtcccgaaccgcgccgccgctttcctccactccggtcgtcgtttccgccgtcctcgtcgtcccggggtgagccgtggaccgcccctttcgcttccctctcttctccgctctctcgggcgccgctccgccgcgccggtggtcgccggcggtgaccatcggggcgcgggtgcgccgcctcccgtcggccgtgccggcgaggccgccttcgggcgcgccccgcggctgccaagtggggcccggccgtcagccgcccgcgctcgcgggtgcggctgacgcgtgggacccacggcgccggccagcgccagccgcgtgcacccggtccaccgtggaccgaggggctgccgcgtgggccccactcccgtggacccggtccgcgcgccctctctctcggctgacgcaataaacccgatttttaattaaaatttaaatgaagaaattcgcaaatatccatttaaagagcatataaacttcaaatggccatatcttggccatttgaactcggaattggaccgttcaagtctctaatttttccttaagaagtaaagaacccatttttgtgctttgtttctgctgttatatggagtttattagagtaaaagccttttcttttccgttggtcgtgtagacgctgcagcttcggaagattcgctcttcgtggaagttgaagccgacgtctgggaaagcgagcaaggcaagtcacatcatccttgagcatattgaagcccagtttacaaaattatttttttaatttaaattaatgcattatcgctttatttaaattcccgcgttatcactgttttatttagccatgcctatttacctttgttatgaccttattattattgctatggttattattaccttgttcaccctagaataaacaaaaccccaactagtggacactctatttatggttccactagtatgaatttaggtagatgcttcgctgattaataggacaacattaggtggttttataattttagactttgggaatattcatatcatttggacactatggaattgttggtttatggtggaattggacatacacctctcttcctctttcaaaacccctaaaacctgttttcggtggggtttgggtgcatgccagttgtgggaagtagcaccccggccactataaggattaagctcgggcctctgttgcaaagcactaccgtacttccacatgtctagtgggtaaggcttagtttgtggctcagtctggtcataaacaaaagtacacggattggagatggatgaagtcgggggtcgatggacattctccagggcaaatgaaggctacacgagctgcggcccggtagtcgagatgtcatggcagagggttggtgccctgctgctagggggctcagtcctgcctgcctgtcccgggtgtcccggccgtaggtgggattgggtcggtactcttgtctatggctaggaggggttggaaactatgtcacgtcttccgtctgtataccgtggtggtatgtggcacgtggttgcacgtgaggaagatgtgtcttgtgggtaaagatgtacacctctgatcagagtataatctattcgaatagccgcgccctcggttatgggcaagccgagcaatgtacccaagtcagtgttttaattcttaaaatttgctcaacaactaaaatgtggaatggttggcctgggttggcttgggacgagctgggacccagggtcgggttgccagttcggtctgaatcatcgtaggccttgggttaaggcaggttcgtgagggttcacggccttgtttaataatactgtgtagctctaggatcgtctttataaaatggctttgggcaactaagtgacttttaaatgctgtttactgcaaaacttaacccctatattattatccccttgtactcctttgcattaattgtgcatctccggtgtggcttgctgagtactgtggttgtactcattcttgctctatctttctccccccttcagtaagagaagctttggagaagaagtcttaggtggagtcctggcttataccccagttgagcgcctgtgaagatggagccgcaggcccgctagtccgctgctgtttatttttgattgtcaggcctgaagcgcctctgtaataatgtaaatattatcgatataataaagatgtgtcttttatatcatgtttgtgtggtgtaccccggcttttcctgggacggggattgatacactagcgttcgggaaaaggcaattttcccggtcgcgacaagatggtatcagagccatctcgactgtaggataagccgagtggataaaacctaaggacatattttataaataaaactatttgcgaaagttcctttttctcctttcccctgcgctatttgcaaaaggtttactcccttcttccttcttcggatttcaactagtactagatggtcaggtcagtgaagaagaagacatcgtcagttgtttgccgaagctccggaagactgcaggatccgctagtgaaatgaaggaaacagtgaagccagctgtgaagcaggagtgaagatcttggagaacccgtcgcaaaacctaagccaccctatagggtagtgttgttagtcgtgtgttccttgcttgtgtgtgtagcgcgtggtttgcatcggtgggttgtgatgtaaccatgctaggttgtttgcttaatcaacttgcagaataagtgaaacaaacaacacatcagcaagaagaattagttcctttaaggtcctgtctctagttctggtctattctttcctggcttgtttcctctctcacctcaacccctgtaacagatgtttaacagagaaaaaggaaagaatgtcagcgggtatgcctcaagtaactcaagttttcaactcaatccaccactggcctcaagagagttaaccagggcacacccttggtccattccaagcatgctgcttagttcacagctaccattagttggaagtcaagaccaaaatcagtatgtgtttgatcgagcgtttgccacccaggtcaatgagcttccaatgccagaagaggatgtccccttttgtcacgattgtagagagcaaggacactatgccctgaattgtccatgggtatatgtcaaagaagccccttcctttggtttagcagggcagacatcgctaaaccagcctcctcgcaccaagtcaagtttgcagcctagtgtgcaaagtgaagagcccaatggagacaatccattgaatcctagaaaatgctttcctcctagcctttcgcaccacgtggggtcacgtactaagcaagccaaaggcaggaagagtaagaatcagaagagaaaggcaccgatgcgaactgaagaagaagtacgtaagatgactattaccagcacagaatggcctccaccaggaatgacaaaacgtcagagaagaaataccttccgaggtgcgccacagttgacagagcaacttttagctaatggaggtagagtgtctgatagtgaagattcagatcaagtctcctcagatgatgaagatgagaagtctccccaaggtttcaaccagaataaaatggaacataaggcatgctctcgttgtagagaaatcggtcatgttgccagctcgtgtgccactacatgcgttcattgtgaggaagaccatccacccgacaggtgtccaacgagcaggatcacttgtttcttttgtgaaggaactgatcatgtaccaaaagattgtcaattcagttttctgctgacgaagaagatggccaaccaacccgccagttccaacggagagaagcatcaaggcaacacaaatcctcgccaagattacagtttcagcctgactccagtgccaggacagaggaatcaaaatgagaaaagaaaatgccgagtccgggaagatatctgttgcttcaattgtcaaggaatgggtcatttcgccgacaagtgcccaaaaccgagaaacatagctgccggcacgtcagtccacgtaactccctgcactcagaagcttgctcctcagcgaattgtcatccatgcatcccgaagcagtcctatagcccgcgttgcaacagctccaactccagcgagagcattaccacaaggtgtcaatgctcaatttcagccccagccatcagttgacaagacagaggccagtatcggcattgtacctttggatgttccagcacagcagccaaggaatcaagtacaagatgaagaacctgagcgtgagaaagttattgtctgttacaactgtagtacctgttaagggagcagacatgccaatcgccaagtggtcactggagcaaatgcagtacctgttaagcctagcgctagtcagaagcaaccataatactcttatatcagtgttcaaatacttttgttttatagttgatccccgtcaatcatgtaatgacagagaaacatgagattatgaaggagtttgataagtttatgaaggatccatgttaagattgcaagtgctgtgagttgtgtacattttgttgttgattagggagacctagggtctcatttccgtaaactcataatctattatgaatcaaataacctagcgattgatggcgaagaaaatcaagtgattaacccaagagacatttgtttggactaagagtttcagatgtgtcttcttcggatcaaaggcatgcacccgttgtggagaaattggacacgttgctagcatgtgtctcacactctgcactcattgtgaagaagaccatccaccaggggagtgtctcacccgcaggtgacatgttttctgtgtgaaggaacaaaccatgtgcccaaggattgccaacttagtgtgttgttgaccaagaccgcagaaatccaacgaacaactctacgattgtctcatcagctagtcagctccaacaacaacatcgatgatatcatccaccgcaccaatgctcctcttgctccacctaactttgcaataaatcatggcaataataccttcagcaccaaccactctctgcatcgacagcctcagcaaagaattgtcgtagatggaagaagttgtgtctctccccgacctactccaggccaagcaaagggcaatcaacctcaggagggcgataccaagcagaaaaccgtcatccgcttcaaacagcaatcagaaggaagcttctcctgtgaatgatagcaatatgcagtcctaacacatcatcacggaaccaatcaaggatgatgcagtcactagaacaacgccagctatatctctccagaatcaaaatgagcagccacgcttgtggttttcagttcgctacttatcattgtgtaatcgaaagtttgcagcattcatgtaataaatanatatattcatgtctataaacagtgagcttgctatgtttatggatgattcatgttgaggatacaatgtaccgatgataagcaccttccctttttgtttaaggcagtgccttgtattcgggtaataagggagaaatcaatatttgagaacataatgtcgatggttggtaattagtctatcaggtatcagaaaagggtcaaaggtgatatggcagaagaacaatatggatgctccccatctcgaggaagcactaaagatgaccatcggcaaataaaccctagtggcatagatacaaatagcaagcaatgtatttcccggaaggtagtcagtgcagctttttgacgaaccacatcaaggtttcaccgaaaggcagcaagccaaaggacctcatcgtccccagaagcgtccgcaatccacattaaagaataccacctgttagagataagccgaaagatgattgataaaagagattggcaaagatgttctctagcatgaaagaagtaggccgaaaggtgattgataaacagaaacatgctctgcatcgctcaaggaagacccctgatagtaattgcccccccacaacagtcaccttgtcattaagtaagcaagatgacctagggctgcagga

SEQ ID NO: 8229 - DNA, 15558 bp, Oryza sativa
atatatacatatatatatatatatattaacatccctaaatttaaccattttctaatcttgcatcatgtcggttcttatattcttattaaccctcgtaaacctaggaaattataattagaggaacttttttaaaaaaactaactcacataaaacctctccttttatttaatttattttgtggttttcatttaaaattatcttgggttatttcttgatttgattttaatttaaaaacctcccttcgactaaaatttccttatttaaatttagtttgaaaaccctttttaatgttatgaattgtggtccaagaaaccctccaatttagctcttaaacctaaaccaaagcaattccaattttattggaattaattgttaaaccatccctttgatctcaaacctattcttaatatttgatccaaatatctgaaatttctccttttgatctagccgccaatttaatccccatggcttgatttccttttcggcacaagaatagtttattacaaatattgtgaataattgctcttgtgctaagaaaatagttttcaattatatcctttcatccaaaagttgtaaaacctcatttagctcataattaattttctcatccaaaattacctattagcctcaaataattatatcctccaaaattaatgccaaataatttgaggctaaaatcctatttatttctctccatctattttatcccacattctcaaattcaattttaggaattcatctatctctccctcctatttgagtgcatcaatataaattccaccatattctatttccaaaaatattgcactcaaataaactagaaaaatatctctttcagaaattatatccaaatataatttcctttcaaacttttctattcaaatctcctttaaattctatccctacaaaatttcctaaaaggtcctatcttttttgggccgaaaccccctcagccggcccatccctttttcctctcctttctctcctctttccggcccagttaggcccagcacgagaggcagtcgcctttctccttcccgtgggcgccgccaccaaccaccgtgcgccatgggcgcgcgtgccgcccaagccgcagccgccgcccacggcttgcgctgccgcctgccatcctccggaaccgtccttcgccttgcgccaccaccgtcgccgtggccaagccgccaaccgcctctggaaccgcctccaaccactgacctccatcacctataaatagccgacgaagtcgtccatattccccacactatccgagctcatcgagctctgtcttcctctctcttcctcaagaccggctgccaccactgtcggccgatctccctcatcagagctccactagccaaactctctcaccaccagccttgcctcactccggcgaacccatttttccacttttccccttctccttctctctctctcctgccggttcatggacttgcgctcgccgttccagccattcccctaaccccctctgccggccactgccctccctaggtgcgccgcccgggaacaccaccggccgccgccgtcgccgcctcccagccaccagagcatcggcgcccaactccctctctcttctctgttaaccggctggaaggaggagaagaaagaagaaggcgggaggaggaaggaaaagagaaagagaaataaaagaaaagtctgacaggtgggccctgcacagtacattttcgcaatttctagattttaatccaaaatctaatctttagaagcccatatctcctaaaccgtaaatccgatttcagtgaaacttggaccaaaattcatctaaattcaaaccctacatttttatacccaattttctattttcatattttatttgaatttccttaatctatttaaataccatttgaagttatatttgatttaatcctatatttgaatttctaatttaaacttatattttatttttcaaatatttcctttttatcccaaaatatcctttagccactaaaaaccgccggttagaactttacgccttctatggggacgttcgcggtttactggtcccgacgtcgaaccgttggttgtaaagcccaacaaaatcctaacacaagatcaaagtgctgctcttggcaccccacacctctacaacacgccgcacagttagctctcaggctctgtgtgatcctaacagctccgccaccactcacggttgtcggagtaacacttcctgcacaaacttcttatttctctaaccgttatactgtccattgacaccgactagagaagatataaaacctaatcgttataatacccaactttagcatcgactagcacatagccaaatcctagtcgataccttgctagtcaaattccagtcatcatccaaactccatatcagctacaatactacctctataccacttcccataatcttcctcacctccactatatattctctacctacctagaatctgtacataaaatatagagcctagccgatatattgtcatgctccacaatcggctccaatataattaaaccctaggtataatattacctagagtaaattccctgtgtacccctgaaaactcactcaatcccttccatacccctgaaatttacccgatcccttctatgcccctgaaatttcagtttgatcccttccatgcccctaccgttacattttccattatttcactgttacgtttggttgcaaatgtcctttttgcccttgatgctttaggtttaaatgtaagcttcaaaaacaattgaaaattttgtttgattgcacagcatgtgcattttataaaactaatgagactaaataattagtgcagaaaattttgacataaattttgaaaataaaataaatgtaataaattaaaatttttatttgaaattttaataggataatagattttttttatcgggagcatttataaaaaaaatgttgtgaacattggtagtcctatctttatttgaatgctcctcatttttatgacttttttataaaaaaaataaatatgtattttttattttattatctaaaaatattttttgggataaataatgcattgcacaacaaactcataagtataatagtctcatgcgagaagcttttatatttttaataatgtaattcatgaatttctttgttcatccaaggttaaaatggtcatttttatagaaaatagacggtcaactaatggtcaactgacgggaggggtattgtcgtaggctctccggaccttccattataattgagagatgaaatgtataattcaagtcatcaaacaagtataatgaaatatccgacgcctcgagagaggaatattggagacattgccgggcctttagcctgccagtcaacttcagcctgagatgtgcccgtcaaaccactcgaaggcggtgaccagatgtgttacacattcaggagacttgacaaaaatggctaaagatctacaacatctcaaatattcttaactcatactcatgtgaatctagttcccaggatgtgcactagattcacactttcatctcaagcatgattatacatagcaaacacaaataaaatgaaagcgattataaactacatctactttagttacattggccaactggccaaataaatatatagaacagcggaagcttgtctacccaatctacaagcacaccgactaggggtttaccccattaagttcaagtcctagaagaagcagtcgattacccgcatcactcaaagactaaatctaaaacctgcaagcaaaaggttaattcaatagcaagagtcagtacattattagaaataatgtactggcaagcaccaagacaagcctaagaccctacttgcaaggcatataatcaaggaaggcataatatggttctttttagcataaagcaagttttatttgcataaaacatttctaaatcaggtttactttcaaataaatttcagcaagctagtacttgacatattgggcatcaaggtaggcattaatcatgtataaatgtacacctcattgccatccatggcagcaaggagatcattctcaaatctcatcacaatttgaaggtaaatttcagcatttagaagaataaacacaagtctatactcaatacatatccacacgccgctcatgaccgcgagcacggctaatcgattagtttttactctgcagagtttgtacacttttcccacatgatgcgaagtaataatcatgcaagagcatggcacgcgatacataagtacccgatttattacccacaacaaagcttttccaaaattcatgatttagccttacaccagcacgatacgtgttactccatcctaagccatacacgttatatgacctagaaccgttaagtggcgggcccacgccttaaacttaacgccgtggtggcggacacaacgggaacccaccacgtggcacaataccgttgtattggacacgcttagtcacctaaactaccacttcggggtaaataggaagctcctctgaattatacgaactcatacacaccggcctaccagaatgtaaggctaaaccataaataatttactaagcttgggctatcccatactagcacatgtggttgcactgtatacgaaatgaactgacgttgagtgaagtccttaggtcggtttgggcacactctccccctatcggtacacaactaatcaccatatgtgcaccacttgaggcccaaacctaaaatccatgttttccatcattttatttatcaaaatcacaagtattaaagttctgtccagattatttcaaaatcaatttttcatatttgtaatgagcccataatgacaaggaagaccattctaagcatggctaagcattatagtaacctagtgaggttagtcatattgttcctaaggttaggaatgagggatatggatatatgtggggtcaaggtgaatgcaaacaataggagtttgtctaacaagtttaacaaaattttaatttattagtgtacaatcgacatgcaagatttgcaaacattttcaataacctccaaaacataggttcaaagtgatcaaagagagggaggtgggacttgccttgaatcaggaaaatgtcagcacctaaatcacttcttcaccgtttaagcaatcatctatacaaagtacacgttatgcaattaaacaccgaaatatgcgaaaaatccaaaatgctctaaaatggatgatttgtgcacagtgaataggtactggtctaaaattaatttaggtgaaagaatttctattttatctcattttatttgggagttatgaattttagaagtttcgtcggtatagtgtaggatttacttaggtactattgtgaaatgctgttgtaaggtgattcttattaagtttatgtttgctggggtgaagatatgtgttttctaagactaacacatttggtttcataatttttagagttaatatgaattctttatgtattttacaaattataacgtgttataggtgtatagtgttctataggttcatggctttagaggtttaggtctagaacttgcctcatctagctagtgatgtataaaatgagtattttagttaactaatctaaccttagttcataggcttatggtctttattatcatggttcatattttataaactaggggagctctagtccatgttagcaatttattatatcaacctagaaattattatatgagctaagtgctttaagttttggtggatgggaatggaactatgaattcactggtctaacaagttttatttgggtttcattatagctagagtgtatttctatgtacatttatatatatacatattgctcaatcgatactatgtgattagaacctatcctataaatttaaagtttagagctataacctgtacagaaggttccatattttattttactatgttgaagcccactgtttgctggttctatagatatttggttcacttcatttagactaaagatgaattttctacaaattttacaatttaaggttgctctatggtggttattacttacataagtatttagaggcttttatcatacagtaagtatataattttattttataacttggaagtatatgttttggtgattctacagaacttgggtttactcaaaaaggatctaagatgaattttatatgaacttctaaaattcagcttatctaaaactagtcatttaaaggtaatagttttagaggcatttgatgtatagtatgtatactatttcattttgctttataggagaacataagttggtggatctgtagaaactgagtttgctccaaaatgagttgtaatgaattttgtatgcattttataaatttgtgtgtgctttatgtgtgatttaacttggataaattttagaggctaaatttgtactgtgagtgcaagtttttattccataacatcaaagttcccaatttggtgagttcacggaaatttgaatcatcttaaaatgagctatatttaattttatatggatttttacaagttttagttactgttcttttataatttcagattttgtttccaaggggtccactgtcagtgagagatcaatatacaaaaagatccctgaggtttctaagaatcaacccgcagacctaggctcatatgtcagtgagttgaaaagttgcacattaaaccttatagttgtttaaattctcgaaacaaggtccctgacttcttttctcacgcagagaggcagaacagccatggctgagctcaatctcgagctcaccggcgacaaacgatggctcgtttgggggtgcgaccaaaagacaaaatgaagatcatgctattgcgattccattcctctacttttcttggtcagtggacatcggagtaacgccggcggcgagtccgaaaggaggatgttttcgggtggtgatgcatgtgcttctacaatcatgtattggttaattgggtgcatgcatgtatgttctataggcttctgggtgctcaccgagatgctagacaaggctggggatgtctgcagagtcacagcgacggcgaagctccatggcggcatggcacaactccagggatgacgtccgctgctcgatctgtatggggagtcactaatacggtgcatgcaagaggtcaaaggctatctagagaggccatgcatgcatggaatttgactgacgctcaccagagagaatggaatcgatgatggaagcggttgaacggaattggaaaagacgatgtcgacctccaagatcgctgcgccattggatgggtttcttgagggtaaatggagaggaggttgaggtgaagctggtggcgtggtggctcgctccgacttgatctagattgatggcaacggcgacgatgtcgctgcggcggtgcgcagctccagagctccggtgtgcacggcagcgttcccgccgattggctgcaccagagaggatgaaatcaaaaggagaaatattcggcatggtgaggagagtatggaacgcaagagaagaggaaacgaccgcggctcatcaacgattgcggccatcgtcttcttcgcagccggcgatggagaaccagtggagaagagcagcgaggatgctctccctcggatggatcggcactggaatggtgggtgaagagtggcgacgcgtctgggagaggcagagatggagctcagcgtttttagggcgtcgacacgtcgtggccacgcgtcgcgcggcgtccagagccggtcggcgctcgatctctccctctcagtgtttctggctagggaagttgcacagaggaaaggcaagccggagggactgacaagggggcccaggtcgaggtaaactaggtggaagagagatgtgtaggcagaaacatgggtgagcttggtttttggacgaatttccggaattattttctcctctaattttgtagcttcaatacttaatgtgttgatcagattaactagtgttgattttactggaggtaggtgtatgtacctagtttctattttctttggttgcactcaaaaattatggatagattacttacagaaattagaggaatatgggttctttggaaactagttcgaatttttaggagacctaaacagagaagataaattctggaaaaattatttttattcattataaatgacctagtatttgaataaattattttacttatacacttttatgcagttaaatgcacttttagacaaagtatggttttagccgattaagaactacagttaatctagtttttattagtttgactgatttatttgaggtaccaaatttagttattgaatcataccaaaattacagtgagttgtatgtgttgagtagagcctacatgaattttctcatgattttatcttgcacgaattattttagataattcgcaagacttatgtcttatatatgtttccctttcctaaatgcatgtaaatgtttataaaagttatatttggactctcattaacctgaggtgatgttgatatgttagaattacaatttacattacacaggtcataagctccttacctattatgcataagtttactttagtattaaattaagagaatgcttatagagatgattaagatagaatataccctatatgatataatttatttggtcacttccatgttcatgactagtcttcagatggatgaccaaaatagttttgtggggcttgacattggccttgttgatgtattttaaggtgtatggtttctattttaacttcctctagctagcactaggccctaatggtttagttgtttatctagatcttagttaatattcatgagacctattatgaaatgcaaatcgaaaatccaaatgcaatccaaatccaaatgcatatgaaggactcaagtcaaacatgtctatgagagtatgcatgcttacacataaatttatatttttgtcctaggttagagatgcaaaggttttaatttgttctaaaattttatcatgcaagagttagatcaacttcacctaggtttaaaatggaaatttttggtttacaaaattgaagaactttcctttcaactagttttgatagaaattccttaatcctagaattcgggtatgttacaggtatgcaagggatcaaaatcaaattttggaggtatacaaggaagtaaggaaaattcaggggtatagaagggattaggtaaaattttaggggtatacaagggattttctctattacctaacactagaacgtgatcgcttatctgtgatgggctgaaagcatcatcactatcgggtaaggccaccgtcactgggtaaaggtcactgatgtgaggaaaaatctcaattgagcaaaagcccgtcatggatggatgttatcttaatcgggccgaaaacaaagcccgtcatagatgagtatgaccagtcaaaccagcgtagttaggagcccgtcacggatgattaatatcaatcgggcaccactaagcctgtcacagatgactagtcatctcaatcgggcatttagatagagcccgtcaccgattggtttgaccccacgtgttgagtcaaacgagtcccggctcagatgacttatctctatcgggcttactctgaaagcccgtcacaaatgacttagctctttcgggcttattctaaaagcccgtcatggatgacttttctctttccggcattattaatatgcccatcagggatgagtttggaacaaaaaaaaaataaagttttataatttggctagcctcaagcctttgctagccatgcccgctgcaaaaattgacagaagcacatatatatagtcccattcccagcaaccccattcccaatatcacagcattcacagccaattcacaacatttatattcccagcatcacagcatttacattccatcacaaaacatgcattcacagccaattcacaactcattcacatttgtattccatcacaacacatgcattcacatcacatatactccctctgtttcacaatctaaggctttctagcattggccacatacatatagatgttaatgaatttagacacatacatatgtctagatttattaacatctaaatgaatgtggcaatgctagaaagtcttacattgtgaaaaggaggaagtatatgtcattcacatccatttttctctctaaaccgccgacatgcatcaaaacctgcaaaactaagttataaattggaacaattttatatgtaattagaaatgcaagtatatacagagacgagctacctaggactttactctaaagaatttaattgtattacaaagaatatttacaaaaatcaaatgtttgtcgcatatgcattgcaaatgttctgccattccgagacgagatacctaggacttcactctaacatccctttcggtgacaagatatcatctagtatgaattgtgctatctcctctctaatgatttcaaagttgatttccggaatccttgaaataaattcctgcatgttcggcgccaagttagtctacatacttgtaaatttgtcgtcctatgtgtgtataaacaattgaattacacacctctgggtcgagcaatgtcaccttgtctgcgaagctccttatgttatggcagacatggaacccgcactggtcgccaacttgttgacgtattgggaagtctttcttgtgaccgagtttgggatgcccatccttatgcctcccgcctcttgccacgtattggtcccatgcctcgttcaaggcagattcgatggccgaccaatcgtatatttctggcttgatattggagttaaggtagtgtaccaaactccacttcggcgttattactagaagaatccaatgttgcttgccaaattattaaattgccagttacatactacagctgtacgcgccgagtatttgagtataagtatggtacacgtttactgttgattgtaggcacacataatgaagcccttgtcttgacgggcaaataagcagtccttgatatagcccaccatgtttgctcgatcgtttttcagtgttgtctcattgacgacaactggatcgagtaaggcaacatggggtgctttacgatggacatgcttccaggttaacctacgagcaagacaagagtcagggtaagcgtaatttatagacagttactaccatatcgcgtaccaagaaatacttacgaggagtagcacttaaggaggttggtgtcgatcgctcgtaccctgtagaggtcccatagatctttgaagtctacgacgatgaaggcagtaggcccgaggaacgactgaccatcgtgctggcccaacatggaggtctctctattcttcctccttgcgttggacttctccatgtagtacccgtgcaactccttgcatgcagggcccatcttgaataaggcgtcgtctccgaccaatggtatgcccaatgtgaattcggctggaggctttggaggagctactggcgccttgccaagatcaagcttcgttggggctaatggcacctttacttttgctctccccattccagcagcttttctgcgtgtgtcaagcttgggtggagaagatttcgccctcttgctccttttggcaggagaggggaggtgcggcctgctgtcgacctccataccgtcgtccccaaaatcagtatcatactgtaattggagatcttcatctctttgttcaatggcaggagggagagatacaacagttgaatggggacgcgtcggcggcggacgagaacttggcgctagccttggagttatattgatctcaatgttgtgcttgggccattgaataaaggtcccacatgcagccccaagggtcagaatctcgtcattaggtgggtgtggaatagtgtagccaacccaatcgggcttcattaagtccacctgaactttggcattgccggctagcagctgcgtcccatgcactcgggtctccggggtaggctagaatgcttgaccctctgcggcaggaattgcaaatcctggtgtcaccctagcgaatagggtacacgatgtgggttcctgcgatagattcattagtgtccatagtatatgttgcaatgtattatggtgctaatacaatatatgcgttattaagttgtttttaccgttatgtggtccaccgcagcggggccttcaggctgttctgctagagcctcagttgatgcacagttgctactcctctgcgtggggcttacttgtactatgggaccgggagtggcattggtcgacctatccctgatgcgtgcctccatccgagcctccatacctaacagctcggcagtgagctcttctctaagctcttctttaagctccacccgaagttgggccttaatgcgtacagctttctgcaccttggaaagcttgtgcttcttgtactgccacgcgtattggggaaacccaaacttccatggagcattggagccaatgccccttgttcgtccacggtgtttttcatttcccaacgctttcgtgaggatgtcatcctcgcgtttttgtgagcagacctcttaggaggcatgtctctcagcattcagttcgacctggggtacagttaggacgcgttagacgaagaatacgatacaacataatgaaacttattctatgtgttcaacttacgattttctggtacaccgcttgatctttgggatttgggaacgaaagaattccgtcactattcttcttcacccttgcccttgcctagttccttgcccgctagaccgggatatcagcaagcacttgcggggtgttagattccgctgcagcttcatcctccttgtcccattctgcctgtttccccgcgtagcctccggtgccaagccggtgcgggtgaagtttccttgcctgcagttcacggtaggcctggctttttgcccgagactctttcgttgatttggcggcatggaactcatcccacatagttcgggtgattgtaacgcctcgattttcgctcgggattaaaaatcattcaataatgcattttctagaaattaaataaaagttaaatcaatttaatcaagtgaaataatgggagaatttaaaattttcccttaaaaatcattggccgggaatattttgtaatattctttgtgccttcaaatactctccggatttttcccgtgaattttcggagctcaagaaataattttaaagtcacaaagttcatttaatcaatttaaataaaaagaaaaggaaataatcttccccttcctccctttcgggctcggcccaaattccccccccctctcttttggacccggccgccctccacttcccctctctcagcccgtcggcccagctcggctctctctctcccctccctcaagtctacactgcctccctagcccgtttcctcctcctctctcaggccgacaggtgggaccggtgggccccacctgtcatccccaacctccggccagctccaaccgtcggccacgccgcccactccccccgccgatcccgcgcctcccctcgtcccaaccggcgtggacccgagtccccttccacctcgcgaccacatcccgccccactccccctctctccccgcgggaatcgacgccacgccgagccgccacacccgccacgatgccgccccactccgtcgccggttgccgcctctcccgggctcgatcccgccttccctagcctataaaaagcatccccgtgctcccctcgtccgtttccccatttttcccgagcctggcatactctccctcgctctccccacgccgcacccatgcgccgccacactccggcgaactccggtcgccgtttcccgcctccacagccgtagccgcgccgagccgccgccaccgccagcttcgccaccgcaaggagaagcccggccgcctcttatttccccctctccacccctcgagcaccaacttcaccaccaacccgagatcgccgccgtgtttgccgtctccatctgtgtcgccccgcctccccggtcgacgccggactgcgccgtttcctccctcggatcggcaactccgagccgcaccccggccaccacttcctcgccaccgggaaccgctgaaatcgccctctccgcgccccggtcgtcccggtcaccgtccgccgcctcgcgcctgtggtatgccgccggaccaccgttgcctccccgaggagcccgccaccggcttccctgttgtcgtctcgccgtcgccgcccttggtgagcatccctcctctcctccccgctccctgtcgccgccggtggccgtctggccggttcatcgccgccgcgctccgcgcccgcgccgctgccggttgtgctgggcagccggttgccacctccccttgccgcgttgcgccaccactccctggcgtgcgtcgccgctgcccgcgtgcgccgccgctccccgcgccgtcgccggccgtcgtcgccggtggccgcgctgccgcgcgccatcgcttggctgggccggcctgagccgtgccgtgccccagccgcgccgcctcgtggccgcccgatcggctttgggccgatccgggccgtcggttcccgtggaccggcgatggaccgcctcggtggtcccggtccacggtggaccggcgcccttgtgtcgctgaccggtggggcccgcttgccggcgccgcctctcccccttgatgacgtcagcatccccttctcctttggaagaataattattaattgtgtcataaatcgtatttaattctagaaattcatttaaatggctcaaaacttctaaaattcatatctaattcattggaactccgaattgagccgttcaacttgcaaaattcatctaaaattgagctctacatgtttgtttactttttatgtactgtttccttggtttttattagagtttttcctcgttttgtgtgccagcgtgtagaatccgtcgtttcggaagtccgcgatcgtgaggaaaagagttcggaagattgttttgaagaagcaaggcaagtcacacattccccttgagcatgttaatcccaatttataaatgttttaccgtttgcaaataaacatgcatgtcttgctaattacatgggattcgggtattacctatctgcttgcttgtgccatgtttacttgatatctgtcctttgtcaaccttgggtaataaatcgactagctcatgttacttatgtgacctagctagaattgtatgcttagccatccttaattaccactaactcagttgatgggataattacagtattagacctttttagtatcagaatgagctgcgtgctcgagacatctggccatgcttcatggtcgtaattatccaactaaaatgcgactgaatggtgggctgtgggtgcatggtttttgtcgcgaccgggaaaattgccttttcccgaacgctagtgtatcaatccccgtcccaggaaaagccggggtacaccacacaaacatgatataaaagacacatctttattatatcgataatatttacattattacagaggcgcttcaggcctgacaatcaaaaataaacagcagcggactagcgggcctacggctccatcttcacaggcgctcaactggggtataagccaggactccacctaagacttcttctccaaagcttctcttactgaatgggggagaaagatagagcaagaatgagtacaaccacagtactcagcgagcacaccggagatgc

SEQ ID NO: 8230 - DNA, 14379 bp, Oryza sativa
tatatatatatgtatgtatatatatatatatatatatatatatatatatatatatatatatatatatatatatatatatatatgtatatatgtatatatatatatgtatatatgtatatatatatatatgtatatatgtatatatatatatgtatatatatatatgtatgtatgtatatatgtatgtatgtatgtatgtatgccagtgcatagacttgtgaggtgggtatgatttactacgtgaacttgtaaatcgtttattttggtgtataaacttgtctagtatgtgtaaatcaaagccaaaacatgtggtaactaattacactatgttggacgttgaataggatgttatattggcttacatgtcaagatgatattattgaatcaaatatataataagtcctgttaattataaaattaaaaatatatatagagggagtatataatggatagaaaataatagaacaaaataactacagtatgcataatggttgattttttactcatacgacatatctcatatcctcatgtgtgagtgacatataatcatactaagtcaacatgactggtcacaatataccgtttcggactaggtcgaatgcactagacaagttcgtgcaacataataagcattttacaaatttatatactaagctacgtctatgtgataagtttgtataccaccaacacagcatacttttttagatttgtatttatatatgtttgtgaggaagttacgaaaatatacgcggctcacagcacggcgatgcgggatagctgagccgcgtatattttcgtaatatacaggaccaacgacagagacggtcctgcgccctggtacggcagcaccgcatcggcctgcgcagtgcagcatcagggcaagtaccataataccacatatgttgcctctaagagtctcatattggattaaatgataagatgaaggagagaagtgaggagaaagaagatgagccacccctaaatcaagaaacaacctttacacaaatttcaagaagggtgtaagagtattaaagatattggtatttgtgtactatgggtgatatattgtataggttgtcttttagtttatgagtaaataaaatagataattttgaaggtagtagtcatatttatcatagtacttgtcctcagcatagcatcggtgccgcggccctacgcaggaccgataggagccggaaatgtgtgaggtaccggtacggtctcgtgtctcggcctcgtggaaccgatggtggaattgctgttttagttccggaaaatgcttctcatcgaacgcccgaaccaacgagaaaaatcggacggggagtctctgacacacatgcacctattcaacttgtatctctatctccaaacatgcacctttaacgatattcaaaacgaattttctctgaaattacttatccaatctacaatccgatcacaccgttgtattcgttgtaattaaatctttacaacaagatatcacatgattatattccgataaaaaataatcatatgtttcaatacgttaacactttttgtttcatacgtgatagggacatgtttcaatatgtgtcttcagcgtgtttcacaaaattcacaaaactaactgttactactctctctcctctctctctccatctcatgcatgcatacatgcattttagctagttttgaaaatgaattttctcttaaactaattatccaatctacgatccgatcacaccgttgtattctttgtaattaaatctttacaacaagatatcacatgattatattttgatgaaagaaaaatatatgtttcaatccattaacatttgttgtttcatatgtgatagcgatatgttccaacgtgtattttcatcatgtttcataaactttttaaatgttttagttgctgatattttttttcatcctatataacttgatgttccactcattagttaactggaacatttgattgactgattctttttttgagaatgctgcgcgccgggcgcccgatggcagaggaaaaatcggacgcctcgggctttctttcgctatttgctgaaacattatttttatataaggtgaaacaacacccgatttaaacgagtgaaacatttttgatctatttagtgaaacaattccgatatacctggtggaacatcgtgcaacatttaaaaataattcaataataagctaaaaaaatttcgtcggaatatatccatgtgtggttttgttttaaagatttaattgcaacgaatttaatgatgcaatcgaatcatgatttggataaataatttaagagaaaaatcagtttaaaatagtttttacacgtaaatcgggcgctgacgtcagcgtccgatttttcaccaaacatcggacgtccgaactggagttgcctcctttagttgtggttgcctgggaagtctttcaaggataacgggcggcagtactaaggctcttcacagtgcaatgagctggccagttgcttcacaactccacgcaggatggttgatggcgtggaggagagagggtgtgggccagagttccttcacatggttgctcggttccttggtgagcaacgagttcctcatcaaaaatggcttaaaaaatgcctgcaaaaaggactgagcatgcacaaaaccatcgggagacggaggggagaagaaaagcgaactgcaaagcgattccgtggtggggccggcctgaaaaaaattgagggtgggttacgcgtgcgtgcactgtggagagaggagcttcaaccacttttcctgggtttctttcatacgtggacatttgggttgcttgcccaggctcaccgcactgctactgccctaatgataatgcttgtcgcccgcgcgcgcccttggcccacgtgctacctgttggcccacccacttcttcctctctttttccacaaagatgttttatctagtgtacttataatgtttcactatttatagatctaatattgtagtgaattaaaatactcttttgcaaaaaaaaaacccacatattttggaaactctctattaagaaaatttggtttatttatgtatagatctaatgttgcagtgaacgaaatattcgattgcaacaaaaaacccacatattttggaaaccccctattaaggtaatttggtttattttttattccaccaaaaaatgttttacctagtgtaatcacaatgtttcactatgtataaatctaatgttacagtgaactgaaacattctttcgctatttgctgaaacattatttttatataaggtgaaacaacacccgatttaaacgagtgaaacattttcgatctacttaatgagacaattccgatatatctggtggaacattgtgcaacatttaaaaaaaatttaataataagctatttttttcgtcggaatatatccatgtgtggtcttgttttgaagatttaattgcaacgaatttaatagtgcaatcggattatgatttggataagtaatttaagagaaaaatcggtttaaagtagtcttgcacgtaaatcgggtgctgacgtcgagctgacgtcagcgcccgatttctcagccccggatcggccgcccgatccgtaggcgctccccagtactaatggtgtggcaactgatggcttggacgaaattccgcgtttaaacatgagaattgaatcgctgtgagatactaacctgcttccagcagtcccgagattgcaagttaggccctgtttaaacatgagatacgaatggtgtggcaaccgatggcttggacgaaattctgcgtttaaacatgagaattgaacagctgtgagatactaacctgcttccagcagtcccgagatctcaccttaaattttttttcgccatatcacatcgaacatttgaatacctgcataaatataggttaaaaaataattaattgcgaaagggcctgtagcctagtggttacaagagcctcagtagcacctgaggtcctgggttcgactccccataggagcgaattttccaggatttaacggcgctgtgctttcagtggtaggcgacgtacccgtcgacaacgaggcgcttatggtgacttcgtcagactccccataggagcgaattttccaggatttaacggcgctgtgctttcagtggtaggcgacgtacccgtcgacaacgaggcgcttatggtgacttcgtcaatctctccagaatttaccggcccagtcttcgaagatgctcagagggatagggtttgcgtgcgtgtgttcataggggtgagtgcgcgtgcgttgtaagtgtctgcgttgtactgtgtaattttcaaaaaaaaaagtttgcgtgcgtgtgttcatagaggcgtgcgtgtattcataggggtgagtgcgcgtgcgttgtgagtgtctacgttgtactgtgtaatttttttaaaaaaaaataattaattgcacatattgcgactaatttacgagacgaatcttttaaacctaattgtttcatgattttacaatgtggtgctacagtaaatatgtgctaatgatggattaattaggtttaataaattcgtctcccggtttgattctgtaattgggttttctgttagtgtccaagcacctcttacgacacgttatataatatccgatgtgacgcgctaaaacgttacatcctgaatctaaccatctagtaagttggaaacaagtgacctgttaaggctttttttcttctttgccgtgtggactgtcccgggccgtcgatcggtcccgtagctccacgtcgcgtcatgcaagctatccgcctatcccacgtctccacgccacgctatgaagcatgtacattttcgcaatttcccacaaacatgtactcactccatctcactttaagataaagataagaatgaagataaatatgaagattaagtgtttgacgtaaaataaggttgtaataacgtgtgattaattgagttttaattattttaaacttgaaaaatagattaatctaatattttagaacaattttcatatagaaagttttcgcacaaaacataccgtttagcagtttgaaaaggcgtaccatgagtgtcgacgtttgatgtcacgactacgatatttggacagtatagggatcgttggtgctaggatatacgcgagactgaggtaaaagagatggagacgaggatttgtatccaagttcgggtccctgagcggtcaggtaatagccctacatcctgttggccggagccgatgttgctttttatttaccataatcacaccagtacaatatgtgggtagcctatctaactgttgtcgacatgtcggtcggaaggtctgactcgtagtcgacaacagggtagccttcctcctcgaatccgtgcccggcgagatcagagatagcgctttcgtctctcctgacggtatccggagacaccgtaggggaatagccatgcctatccctaaagtcgatatccggcgtcttgtcttggagtatgttggcttctatgttgtggcttctatgtcgattgtgttgggtgttgattgtctcatatcatgggtgtcccatggtcggtgtccccctgtcctcctaggggggcttgtatttatacccataagtgtccccttgtccaagtagaactagagaaaccaatatagatacaatccgagtagtccttattgttttcatgtagtactctggttgtttttccttatcggaactcctcctatatccgaagattgtttccgtataggacatggtatgtggtgggtcctgccgagatttagtcaactattattaggtatgtggtatccaaaatttaatccaacttttgttggagaaaagaacaaggcctaagtgtaaccatgagttttcatgtccaattttgatcgtccgtttatttaatttttttataattagtatttttattgttatgagatgataaaacataaattgtattttgcatgtgacttatgtttttaaattttttcataaaaaatttcaaataagacagtaggcacgaaaaataacggctacacttaaaatgggacagagggagtatataaatgcaaatccatctattatatactaaaagtctattaaacttccacaaaacgctctcaagccagacgctctaataaattagaaaaatactagaaaatctgagaaaaagcaaaacaataatctcttaattttcacttaaatcgatgatccaatattataaaccgttagattaaatttcttaaaacaaattgatcgagttactcctcctcctccgctgcacaggcccacctttccttccgtttggtaagagtaagaacgtacatacatgtcattcctttttttcttttttccatttatatatagttgtgacaacaacaattattattattattaacgataataaattaaaatattggttactttacaaacatcaaatatatatatatatatatatatatatatatatatatatatataactcttttacaaatagacataaataaattacctctacaacatttggaaatgaaatttacacccattatattatattatatacccgttatattagactacttctaataaaagtatttatccattaattttttcttaaatcagcagacctattatttagaccatcatatgtatcttttgttaaaaaaacagtgcctcggaagacttctgtctgtctctctacgcaacgcaagtgggcacgtctttgccttccgaacgcatgacgaagcatcgtacctaaagcagctaaggtgatcacaatgctgcaactctactgctttgctaaggtaaagacataccaaatcatcaacggataatgattggtttttttttataacatggaaacaaaatcgaagatgtgatgtagagagaagaagaatcaaacaccgcgagttgaatataattgatttctctgtacatgtatataaatagagagaatacactcagtaccactgagtttatcgcaattctacagtctaccactgacttggttaagttccacaattaatataccatcgtgttttcttcaacttctgctctatgccatcaccatcacgagccgtcagttagaaacttagaattcgttttgtagtgttaattctctcgtaagagcaagtttaatagtatagccaactactagctctaattcatctatagccaatctaatagctcattcatacaatagttacatactacactattaatacctagtcccacctgtcatagacacactgcatcttggagtccgtgctacagctggctacaaatctgtagcccgctgctcttctctctcctgatttatctctttaaaatatatttgcagctggcttatagcttactattgtacctgctctaatgactgatatagcctttgtaaccctagataccactgcccctcgcctcacctaattccccatcgttcccctcacccccaccgaaatgcaccgccgcccatgagcctctccccatcgagatcccatggcgctgccaccgccgcgccgtcgcccaacggcgtctctactagcgacgacctggcactgccacaaccgggcaccacgcccccatcaccccaatcgcagacatcctggtggcgtcgtccccaggaccccagcaccgcagcaagcgtctgcccaccgcgcctccaacgccgccggcctccaggcgccaccgtccccatcgtcaccgatagcagtgccgcagcaaccatcgctcaccatgcctccaccaccgtgtcctggcacttccattcccaacgccgccgcaaccgccgcaatcctcccaccacgccccgaccgccccaatcatcgatgtcctggtggcgtcgtcaccggtgctgcggcaagcttctgccttccgcgcctccaccgccgatggtctcctggcgctgctgtccctagcgcagccgtccccatcgccgtcagcagcggcgccacaaccgtccgcccgcagcatctccaccatcgggacgcgccacttccgtccccaatgcgacagcaaccggacgtgggccgtgcctcccaggagctggacacagggaatgactccctggagctagctgtcgttgatgactgcatgccatgcctgttgctattgctgctccctcaattgtgtatgaactgcatgaacgtgtgttgactttctagttgactaatctaatgaaatattttggtattaaaccgtatggagttggctaatataatgaaatattttggtatgcactcctatatctataggagcttagtgtcatccatcatgttgaaaattgtttgattggatagctaaaatgagcaaaatgtgtgattttttttcctatctagttggctgaaaccatttgatggtttgcataccttttatgtgtggtgtggttgcttaaaagacaactaattaccccattgcgatggcagagagcaaaggttgaagaaaactcggtagtatattatggaacttaacaaagtcagtggtacattgtagaattacgataagctcagttgtactaagtggattctctcgtataaatataggacgaggctaaaacaaaaactaccatgtcacatacataatacacaggtaataatctaattagatgtgttaataaagaacttggtttggaaaaaaaaatttggaccccatgccccatgcatgagagaggagaagtgccatgttgcctaatatcactacaagataattaagatatcaccactaatttattacaacgaaaaataattcgtggtactatcgcaatgatatttttttttgcaaataactatactttgttgcaacgatatataatcgttgttttattcagtatttttgttgcaataggaaatgagctatcgccacaaaaaaacattactcttgcaaaaaaaacatgttttatcaccacacatttaatttttgtggcaatttgcatagtacatggtactttttactattttccattgccatgatcaacaaattcgttgcaataaaaaaaattatcatctcataatttaacttattcttttcatatggacacggattaggacaaattttatatgaaatttatagctctcgatgagatctacaacttaaaattttcatttgaaatcttttaaatactcgaattcatgattcaaatctcacttaggcagtctcaaatggaattgtatgtatttttaaacaaaattgatgcgtagatgagttggtcatggagagcgtgcgtgaggtagagatcttggatttgaatcctggtcatgacaagatatcaaaagaaaatagttaggatgagaaattaatattgaaacatttaatttggtacgtagaactaatgccacacatggagtggtggcaatagttatttattgcaacgatgtgaagtgttgcaatatatatattttgccacatccattttatggcaatatcaaattttattacaactaaataaaaatcattgcaataacctattaccacgctacttattaccacagctagcaacgattttaagattgtggcaaaatgtatctattaccacaattttagcatttcgatgctacaatttttttcatgaagataaattatttttctagtagtgatatgtaaattaaatatgatctatacgactatcattagatgatgggtgagtggaagatatataccaccgagaaataagcggagtgaaaataatgacaaatagtttacatctattatctatatgtgatggagtgacggcacgatgtgtcagcagtacaacaagtttttctttgattacgaataatgacaaagacatcgttaaggacaatatgtgcttatttgaatttccaaaagaaaaataaaagacaaatcattaaaaatgatattaattctggtgtaaatcatattaaatttattgattataatttaggcaaaattggttatatatcatcgaaagttcacgctttttgttttaaagcaccgaaagataccggttcactttaatagcacccaaagttcaccctgtttccatttttaacacttccattaattctcgatcgttttccgtccgccttgatcactattaacctagctacgcacacgatatgacatctctacccctcattgctatgcattctacttataattgtgaggggcagaaacatcatatcgcgtgtgtggctgggtcaatagcaatcaaggcggacggaaaacgactgaaaattgacagaggtgattcaatcacaagattttgagtttcttgatcccatcttttgtcttgtagctatatttgcgcggtatgcgtacaaatgatatgcatgataattcactggaggtagtttaatatttactcgatgtaaaagtcaaattaacttaatccatcttctattcggtgaatggattttgagatatgttaagaagtagaactcctaaactattttaaaatgatattgttgttcgctatctataagacaacttttgaacaaattataattttacttttcaatggtataaatgcccgcgtataagcgtgggccaccttcctagttctaaaaaaatgtatattttcgggaaaaaaaaacagattttctcccctaaaattgtcgcaagtattttagcgatttcgtattttagttgtttagctgattctagatatctccatgttgatgttttgaatcagcaataaatttttagggcttcgaaccggtgctaaaagcatatatatacggagacaaggatttagataggttcagactatttagataagaggtaataccctactcctattttagtgaattgtatccaccgagttgtattgattgtgttgtggttgttgccctggagaggctacttgggggatataaggttataataaggaaaacctggctggagtcagtatcagttttttaatctatgtacatagtagtatgcagtcggggttctatgccatgttttaagatgcaacgcaacatgacgatcaagtcctacttcattacatattgtatggatttgacctatcttctgcatcttagatatagatacgcagaccgtattgatatacgatacccatgttctctgcactccataaattaccatattaggccgcgaagctgtgagcaagttattccatcaacctcctttttttagcacaatggcaagctgctccaatgatgtcacggcgtcaccggaagacgtacgcgcctacaaatcgggtgtccaattttttttttaaaatcggacgctgtttcaccaagtagattgaaaatgtttcaatcttttgaaaagctgaaacacaaccaaatcaccttacgaaacattttgctacaacgtatgaaacaacagtttccaaaaaattgggcgttgtttcaccctatataaaaacaatgtttcagcaaatagcgaaaaaatgtttcaattcttagaaaaagtaaaacacggtcagatcgctagatgaaacaacctggttcaacgtataaaacaaacgatttaaagccattgcaacacttaaaccccgtgtacattaacaaaccacgtgtccagcaggatgaaataaacagtttcaaaatccactgcaacatttgatccatacatagtgaaacatcacgacactagctgaaacattgttggcggaacaaaaaaataaaacggatcctctttaatagagcgttttcgttatatccgggtggttgttgcaacgggcacatgcatgtggtgggggcgcggaggcgtagcgtggtgcggggcgcccaattttttctcctccatcaggctcccgacgcggaggattttcaccggatgactggtcgatcggttcatcctagagaagttcttcatcaacaatttaagctcgccttgtatgattttccagaaaccaaaaacaccatagtgaagaagaaatcctgaggtccgatccagttggtcagcacatgggcctgtttgcagttttcaggctttcaagatggtcttaaagttggtatgggaccttcaaatctattgtttcgcaattggagtcttcccaattttgtaagattgccgatagaggatggaataggcccaatgaagttgttgttttcaagaattagaacttgaaggttttccaacttttcaatccattctccgatagtaccagtaagaaaattataatctagtgtcaatagaattaaccgagaaagtttcccaatgcaatttggaactattcctgaaagtttatttccacctaatactaggttttgaagagttttcgatagattcccaatcgaatctgggataggtccagttaatttattttgtgctaatgatagagtttgcagagaactacagttccccaacgcatgtaagaatgcccagcttactctgtcgcttgcttcaaggtcattgttatcaaggtttagagcaagtagtcccgaaagcttaccaaaagaactgggcactgggccagtgaaaacattgtttgacagatctacctttcttagccctgaagcattgcccagggaagctgggatgctatcttcaaacatattatcttgcaagaaaatctgcaagagattggagagcttgtcaccaatgtcaggtgctaatgtcttgcctagcttattatcacgcaaagatagtacttgcagagatgagaggttgtagaagggatgtggaatttcgcctgagagattgttgtcagccaatgataagagctgcaaactggacaattggccaagctcactgggaatggttccctcgagttgattacttgcaatgaccatctgtcgaaggttagtgatgttcttgagggtcggaggaatggtcccagtgaaattattaacggaaaggcccagtttctttaaattggaaagcaaacttattttcggaggaattgcacctactaacgtattcttactgaggtctaaaaccgatagggtagagcaatttgtaagccaatctggaaaattcccttccaacgagttcatgctcatatcgaggatttcaagtttgtggagattgctgagaggaggtatctgcccagagaagtaattagcggacagatcaagtatacgaaggaaagtcaggtttccaacagagggggcaattgggcctgacaagccttggccggtgaggttgagcaccgtgactcgcccggggtgcttcgttgcgcatgtgacgccgttccactggcaatggggagatgttttgttccagctgttcagggctccagccgtatcgttaatggcttttctgaaatggagcaatgagagcatgtccgtgctgttttcggggacagttgcgcaacggatgccaccagctccgcgtagtagcactagcagcggcagcagctcaagaactacaagcatgctgtgtttcacagttcgctgcttagctgcaatcaaaaaagcataactcaatacatgtcagtcaaacggagggaagaatgcagtaggtcagccatacgattcccgtgcattttcttgaacgagcatgactcaaaattaaagtttttttttttttgggcgggggactcaaaattaaagttgattcgatctactgtgcatgcttatcgcctctaaagtcctataatatgttcatactgagaaaattgacaaccataattaaggcgcacgaagtgtaggaaatattaccgaagggaataaattaggttctaacctctagttggaggctgggagcaacacgctgttactgcctggaaagtggaaacgagtgtgagttgtatgtggttggctcaggcccgtggcgcccagaggtttaagaacagttgtgccgcagatttacaaccacacgcttaaattcgttctgcgattccttgtccgatatcatatacgttgccgtcgcctgaccgcaatacagaacaggccaaagctgacgactttggctttacaagatcaagcttcgttggtcgtgaactcgtgatctactccctctagacgccattgccgtccgagcaatcgtattcctgtctagactctgcattttgttccatcacgttgatgtggagctcgaagatgcaaataattcttctttttttttagaactaagatgcaaataattcgcatagacatttgggtcgccgttactaggccaacaagaggacacgaacaggcccaacaaaacgggctatgaatggagggaggcatgtggcccattgaaaggccacaggcccataatgtcacagtctgctactcatcgctaccagttcgccacgaagaaactagggctttcttctccagtcctccggttcctccgcaatgcacgcccgaagcgcggcggcgcgagccgtcgccggagggcgacggtgagacgccgcccgcgaccaaccagccaccgcccgaaggtattccgtggttcctagatctcatcagtctttactcgtagaacagtcagggtcgtcctggatgggaggcgggtaatcttttaccctggggcagctgcttgcggggttgatgttgtatttgtaaacctgtaacct

SEQ ID NO: 8231 - DNA, 20213 bp, Oryza sativa
tgttagatagatctctctccccttgagcccaacggctcaagggggccttgaccgcgccctgatcgggggcgcccagcccaatggctggtgggcccccgtcacactgcgccatataaaagaggggtggaggccggcacggcacaaggtacgagattcaccgccgccgccaactccaccctacaaaccctaatccgatcgagagggggcgcagccagtgacgggaagcgccaccgccgcgccacacctcatcgccgggacatctacgaccgtcactcccgcagccgtcatcgtcgtcgacctcaccggcgccgcatccacgacaaccgagcgccaacgacgacgatggccggcacttcttcatcctccaacacctcaaccggtcggtctatctaaaccctctcccgttttcaatctctacaatgtcattcatcaaacccaaatagaaccacccgactagatctaacctaggtgatcctagtgcaaagtctaacagttggaagacattatttctatcgcattttcactaaatttgtatttgtatatcagttttatggtgcaagaaagttttatcacgtgacatgaacttgtgaactaggactacccaaagaaaaattcctgcctatgccactgggcaagaggtgtaagcaccgataaaagttttcccaaagaagcagaaacttgtcccataaactgtttgctgataaagtgaactaactacgatatgctctctaattaactatttcatctactgtactgtaagacatatacaaatatgtagcgtctcttgttaccgtctgctcgttcggtaaaattgacgaccggaaacaagataagcagtgcttacagaaataccactcaccaatatgtcaatacggaacagcagggcgacttgtccttgtaattgattttgctcgagccgagtattacttgcttgcgttgtggtatgtacaattggctcgagaccctggactcgggcctttaaaacacagttctgtagcaccgttacatccacaggtcccgtttctcctactgtgaaaaatgccctgccgtgtcttgaccgttttgtacataataagaggataagacactgactcctttggtgtctactccgatttccatgtcctctagccatactcttcttattggcatcaccgcgtgctagagaatcaaagcaagcagtagagacttttatcttcgcagggcagtcgcggcacggctctcgccattgctgcgctgcagtccgcagctgtctgtctcttctcacgccttcaggcgatgaagcgagtcttcggcgttgctgcggttccgtcagggttcgccgtgcgcgcgaaagcgcacacactgacacacggagtttgtgcgtaagccagtgcccaagtgggccagaaggcctacaagtagtgatgcggcccagtaaaagaaaactacccatgtgggcttggaaaaagtacaccaaagatccctcaacttgtcatcgagttacaaaatcgtcccccaaccacaaaccagatatgcgggtccctcaacttacaaaactgggttgtcatttggcggttttggtcccgattttatctaacgtggcagctgagtcagcatgagacctacgtagaccccacacgtcaggacgaccacgtcatcatctctctcccctcatctcttccttccccctctctttctttctcactttcccctcgcgccggctgaccatcagggcgaggcgggatgggcggtgcggtggtgcggggacgcgacggcagtaggccgggcacaggtgggcgccgcggcggtgggcaatggtcaatccagatgtggctggggcaccgaagatggagatggcgtcatcaagatgtggctggcaccgaagatggagacgccgtcggccatggtgcgccatcaagagtggcttgtcgcggatgatggcgtagcagagcgtgcccttcctggggttcatggcgtcgtcgtcgttggggttggtgaccatgttggcgttgcggccgaagccgatgtcgctgttggttgttgcgcaagtccgggtagcaccgccagcaatggtgccgcacgacaggtagcccaaacgcctcctcgccgtgctgttcctgatccctgatgatgatgaattccagtgttaaaaaactccatcttttaatcacatcatgaatcaatcaaccaagatcgtgttcaccatttcagtgctaaaattttcagttttaattatcacatgaagcaatcaggcatcttgttcatgagtgacaagatgggatttcaattcaggcacagcacagagagtgtgatcatcaacgcgcacaattctaccagcaggtgaagaagatactactagtatgtttgcaatgcgaaacagccatcggatcgatcagtagtggttggcggtggggcagagaggtggaggcaaccgtcaatcgccctgagcaatttatcctccacctctgggtgcttggcgatgaggtagaccaccggggagatggtgaacgacgtcgtggctgacctgatgagggggtgctcgtaggtgagcatgctgatgtaatccgacgtgagcagctccctcgaggatttgttcgactctctcgccgcgagcacgacggacaggaagtccttgcgcttccgcagtgcgccaggtcgcgctccatcgccgccgcctgctcggcgacgagcggagggtccatgcgaagcccatcgccgcggcggcgaacgggatcccgcctccaccttcgcgcctaccgctgtggcctgcggcacccgacctgccaccgccgcatcgcccatcgccggcctccctttcccgccttgcctcgccccgccggccaacactatgagaaaagtgaggaagagagagggagggaggagggagagaaggggggggggttgagagatgatgacgtggtcaccctgacatgtgggacccacgttgactcagctgccacgtaggaccaaatcagggtcaaacccgctgagggatctactgcgaccggttttatatagttaagggatcccatatatcttttattgtttgaggacgttttttatcccgatgataagttgagggaccttcggtgcactttttcctgtgggctttaacattggctaaactatagctggccaaatgggccgggccaaacgggcggcccggggcacggccgaccctgtagcaggcacggcccggcacggcctgctacagtaacgggccgtgccggcacggcccgtgtagccgtgccgtgcttgggccgctggccgagcccgcgggccggcacggcacggcacggctactgtagcaggccggcacggcacggcccgggcggcccgtcaggccgaaagcgccagcggcgcactgacagggcgggcggcggtcgaatgggaaggcgccacgtggcactaacggctatttgaccgttcaaatttgaaattaactgttgggaggctaaaaaattcataaaaaattcgaaaaaattccaaaaaatctcaaatttcgccctataaatagggcatgaaccccagccatttctcctcatcccacactcctcatcttgtgctctcaagtgttttaagtgctctctttgttctcaagtgtgcatttttttttattttgacaaaatttgctcaaattttgtcaaaaatcaaaattagtttcgtagttcaacagtttgatcgcagaggtttgaagagctcgcggttggaaagatgtaagtaatattcaaatttgtgtattatttgtattgtgtttgtgaattcaataaatattcgaaaatttgtttatgtcggtttaaattttcagaatggatccgaactttccataccagtcgccgtcgttcaccttgggtgatttcgaccccaactacatgtcggggtttgacggtacctccggatcggctccaactccaccatctgtggaggaggtaccggttcatacgactgtcgttgaggaggtaccggttcaggcggagacagcttcggaaggattttccggaaccgcgagcggaagtgttttgacacacaccggctcgaagagatcgagaacctccggtgtgtggcaaagcttcgacgagataaaggaaacatgccccgacggaagggaggtatcgaaagcccgttgtagaatatgtaggcaaattttatctgctcgttcttctggtggtacaggtcacctcaagcgccatgcggagtcgtgtgccaagaagcaaggaatacaactccggcagcagcaacttatgctaaacccagacggtacggtacgcagttgggagtacgatcccatggttgctcgggaatctcttgtccggttaatcgccaggcaagatttacccctgaactttggggagtcccctgcttttgaacattacattcagcaatctcataaccctaggtttaaagctgtgagtaggcaaacatcaactagagatttagagaatgtttatcacaaggaagcaactgcacttaaggaactgtttagtacatgtactttctctgtttgtgttacttcagatatatggagtagtagagctagagaggattatcttagcgtagttgttcattttgttgatgatgattggcaattacaaaagagagttttagggcttaggttaatagatgtctcacatacaggagaaaacatagctgaaagaattagggaagtaattaatgaatttaatcttgctgataaaatatttgttgtcaccctagataatgcatctgctaattctagagctattgaaatattgcaacatttattttgtgtgtatgctcaatcttttctactccatcagcgttgtgcatgtcatataattaatttgattgttaagactggcatgaagagggtaggtgaccacatcgatgctgttcgtcaagcaatcgcgtggttaactgcttctaacccgcggattgctgcatggaagaggttttgcaatgcggccggtgtggaagctcgtaagtttgccaccgatgcagagcatcggtggaatgcaacgtatttaatgttaaaagttgttttaccttatagtagtttactttctgattttgttcagtcacgtggtggcccaagaaacagtgacgggtcttcagtactgaacgagcatgtttgggcaattgtccaaaaattttaccaatttctagaaactttttatgattgtactctaactttgtcacatgtttattatccaactgctaatataattttgcacaaccttcttgaaattgctactttatttaaagaatacgaaaatgatgacgttctaactgaacctgtctttcacatgaaacaaaaatatttgaaatattggaaaaatatacctatgttgtatgctcttgcttttgttttagatcctaggtgtaaattaaggggattgtctgctattttatcacttgttggagatactataggtgtagattatagttctttttatactgaggttagacgtaaattatatgaggtttttggaagatatgaagtaaagtttcaggaagttcgccagcggagaccccctcctatccccactacaggtaagaagaagatacagtggggtaggatttggggtggatcgtcttcaagttcaatccaaggtggtggcagttcgtcggctacaagtggagacgcctcttcgcatgttgtggccgaagagttgtccggttatttggacagcgacgccatccaccacgaagcacaagatttcaacgtcctcgggtggtggaatgaccacaagataacatatcctgtgctttcaaaactagcacgggatgtgttgacggtgcccgtgtcgacggtgtcctccgaatcggccttcagtctatgcggccgaatcatcgaagaccggaggacgactctgcgcagcgaccacgtcgaaatgctactaagcgttaaagactgggagcttgctcgacaacatgcccaatacactgcggacaaccaagaattggccgcccacttcgagcaactctacctggatccagaccaaccccagtagaattttgttagaagtagttctgacctttgagctgtactcttttctttgtcatggttttctcattttcccctatgagtttttacatgacaaagtttttaacgaggcagcatgtatcattgtatcctgtaatgatataaacattaataaaggtcattactatttttaacaaattcttttgcaatattttcgcaagtgtggatttacctttaaattatttcaaaataatgaatcacaatctatatttttaaatttttcaacacaacaaaaaaataccattttttctttttttttttaacattagcaaatcattacttttttaaaaaacttttatttccattttttaaataccattttttcattttttaacattagtaaatcattacttttttttaaacattttatttccatttttaatttttttttccttatacatttcctttgcttttttttttttaaaaaaacactgtgcacagtgcactgcaggctggcggcctgccttcacgggccgccgtgccccgaacggcccgtgggccgcgggcgtgccgtgccggcacgggcacggcccggccatccacgggccgtgcttgggccggcggctcggcacgtgggccggcacggcacggcccgtttcatcagccgtgcctaacgggccgtgccgaaacgggccgtgccggaaccgtgcccgtgccgggccgggccgtgccgcccgtttggacacctataggctaaaccagtccacaaggagcctaatagagccccatagcccatccatcgtcgtggcgaccagcaaggctgccctatctttgctccgcttccaccgttccacttcatggcaaggcaagcgccgcggcggcgcacgtcgtcggagggcagagcgaggaggcgcacggatcggcacccgtagtgggagcattgtgggtacaggtatccgagggttttctaaatctcatataatcctcgagttgttactgattaggatctgcaggttgggattgggatttagggatggaaccatctctggttgcgatattccttgcttctcagtgaaaagtgtggattagtagtattgttccatgaaatctgacattagatgtgtagattatgatttatgtgcttataaatcgccatgataagctgtgcataaacagaatcacctagcttagaaccttcacaatcctaaccagccaaactgtaaaaaccgtttaccaaaatggtgactccaaaatcaaggttagtgcgtagtgcacaccatccacatccatatgttgcaatacagaatagtagtttctcgcatctcccggatatacggagggccaatttatcatgttttatgcacatcgcattcaaagcctacaagagcacaaaattacacaacttccatcacacactgtaactctttcctgcaaagcaaatcctcccgcttggtcgcttcagcataggatgttctaattgcaagcaacttgatagctatttctctcatgttcattcgttcttttgggatcagaggagtgcaggaaagagccacttgcactacagacaacaagcatacatagaaacaattttctttcttggtcactgcttgattgaagcccttgtattcttcttggagtcgagcatcaattatctgtggtatctgctctgggaagttcttctccacaaagttgacaatgttgagctcgttctcaaacatagggtctgttggtcttttacctatcagcatctctagaagtactattccaaaactataaacatccccacaggtcgatgcatggccacattgcgcatactctaaaagaaaagacaaaatcacactaattaatacattattatgtataagtattaatgcagaaaacagattgcctttcatgaatttaaggtgtaacaagaagcatatatacctggagctatatacccgatggttcccttcaatccaatagagctatttggactgtaatgtccaagtgaggtgaatctagattcaagaatgaggcttgaaatgccgaagtctcccaaacatgcattcatatcattgtcaagaaggatattcgttggcttcaaatcacaatggacaatagacctttcacattcgtggtgtaaataggataatgcattagcaatgtcaacagctatatttactctttgagataagctcaaacattttgaagcaacactggtgttttttttatgcaaccacatgtccaagttcccattaggcatgtaatcataaatcagagctttgaaagcatttccgctatagtctattgttgaacatgcagttaggacaggaagaaggttgcgatgtcgaatgcttcttaagatctcacattctgatacgaaccttttgtctgcgcatctcatctctaggtcaaaaactttaattgcaacttttattttaaccagacttaacttcgctctatatactgaaccgtagcttcctcttccaattaagtttgactgtgagaagttccctgtagcttgggctagatccttgtaagaaaccctagggaactgctttccaaaagaaagcaacgatagatatgttcttcttggtgtcttcttcacaaggtatataaggcatatcagtactgtgagtgacaagaaaccaaatattggaatcaacaatctggcccaattgctcttcctttctgttctgtgagaaacttggtggcacgatggcatgtggagatccatcacacctccgcatagtgccctattgccttcaagataaacaaatgtagcatttctgaataatccattccttggtatttctccttggagattattacaagaaaggtccagcttgctgagtagaggtagatcccccaatactgctgggatggtgcccgataagcagttatgggaaagatttagtatgctcaagccttttaggttgccaaaagaaattggaatggttcctgtgaagaagttttggtccatttggatggtcactaagttttggcacatctccaaagcatcaggtattttcccagtaagcttgtttgatgtaagttttaggtagatgagttgtgtaagattaccaatctccagaggtatggtgccttcaagattgttgtaggtaagatccagctttaagagtagcggagggcttcccaaggagggtggtatgtgaccttcaaatgcattgttttccagatagagctctgtcaaatgtgtaagattaccaatattgtatggaataggcccagtgaacttattgtttccaagacacaaatactgcaagtatttaagatttccaatccatgggccgatggaacctgtgagattgtttacatctaacgtcagttgaattaacctggagaggtttcctatgctcggtggaactataccagacaggttgtttcctcccaaaattagaatctcaagatttgttggtaggttaccaatcgaatctggtatgactccatgtagctgatttctggctaatgacagtatttctagagtagtgcagtttcccaaagcattcaagaatgaccagctttcactgtcttttgctctaagtttgtttgcctggaggtccaatttatggatctttggaagctctccaaaggaggtaggaatcaggcctgtgaaattattaaactgaaaaactatttcttctagcattgaagcattgcctaaggaagctgggatataaccttcaagcatgttatggctcatgtagagtattttcagattagtgaaatgatcacccatgttatttggtagagtcccaccaaactgatttccgctcaactctagagcttgaagagaggacaaattaaaaaggcttgctggtataccacctgatagcatattatcccctagccccagcactgttatattggaaaattggctaagttcatcaggaatgtttcctccaagttgattcagctcaagatagacctggtctaaataggtaatgttacccagagattgagggatggcaccagttagattgttgttgttaagggccaaaaaaactagattgatgaggatacctatttgcctgggaatctcacctcgcagggagttatgatagagatgtaattccttcaggttggaacaattagtgagcgtatctgggataattccacctaacgaattgtagctcagattaaggacttgcatcttctggagattgctaagatcaggcatctggccggagaagttattacttgacagatcaagagtacgaacaaaagtcaggtttccgagtgaggcggggattgtgcctgacaagccttggccggcgaggttgagtgctgtgactcgcccggggtgcttcatcgtgcatctgacgccgttccactggcaatggggagctctcgtgtcccagttgctcagggctccagccggatcgttaattgcttttctgaaagtgagcaacgagagcatatctgtgctgttctcaggaacagttgagcaacggatgccaccaactccgtggagaagtagcaggagctcaagtacaaaaagcatgctgtgttaatttcacagttcgctgcttagctgcaacaatgaaagcataactcagtacatgtcaaccggaaggaagaatgcagtagatcagccgtatgactcccgtgcattttcttgagcgagcatgattcgttaaagttgattccatctacttatcacctccagaagtccagagtcctatagtatgttcatattgagaaaattgatacccataattaagccacacgaagtgcgtaggaaatattaccgaagagaagaaattaggtagtaacttgtagttggaggctggagcggaacaacacgctgttactgcctggaaacgagtgtgagttgagtgtggttggctcaggccccgtggcgcccagaggtttaagaacagttgtgccgcggatttacaaccacacgcttaatttcgttctacaattccttgtccggtaccatcatatacgttgccgtcgcctgaccgcaatacagaacaggccaaagctgacgactttggctttacaagaccaagcttcgttggtcgtaaattagactcatcagccgcatcccttctttgtagctgcaccccccccccatcccccacgcacccgctttatttttcctttcttattgtaatctcttagcctcttgggctattgaacagtttttccctctattttaatacaaatacaccctgcagggtttaaaaaaaaaagctccggagcgacaaagctacaggagtttggaattttgggagatatcacctagtgcttttttccgtttgcaggttggcttttggctgaccctgtacatattttctcttgtttttctgctcctctattaatataccaggcaaagcttttgccctcctttaaagaaaaaaaagcttcgttggtcgtgaactcgtgatctactccctctagacgccgttgccgtccgagcaatcgtattcctgtgtagactctgcattttgttccatcacgttgatgtggagctcgaagatgcaaataattcttctttttttttagaactaagatgcaaataattcgcatagacatttgggtcgccgtcactaggccaaccagaggacacgaacgggcccaacaaaacgggctatgaatggagggaggcatgtggcccattgaaaggccacaggcccataatgtcacggtctgctacgcatcgctaccagttcgccacgaagaaactggggctttcttctccagtcctccggttcctccgcagtgcacgcccgaagggcgcaggagcggaggcgcaaaccgtcgccggagggcggacggtgagacgtcgcccgcgaccgaccagccgccgcccgaaggtattccgtggttcctagatctcatcagtctttactcgtggggcagtcagggtcgtcctggatgggaggcgggtaatcttttaccctggggcagctgcttgcggggttaatgttgtatttgtaaacctgtaacctgaactatcttctaaatcttaataaacttcgaccggctttgcgccggtccggcaaaaaagagatctcatcagtctttactcactcgtgattagccgctgcagattctgaatttgaattaggaaattgattttagtttggttaaaattgtgctagggagtttatgtagaatagtggtaatgttccatccatgttagttggtatatggattaagatctttgttcatctccatggctacttgtacacctactattatggccacaccattacaccacccatctgagatacttatgtacttttatgaaatccttgatgatacatcaaatccaaatccatgatgtttaattcatgatagcagaaaaaatattttttcctcgcattaaagatatcaggttcatgcaaaaatcatcatctttgtgcatttatcgacaaacctggctgttacacacgcttcatggcacgctataaatcactttagcgaaccatgactagctctcttgcctaattgcatcgacatatgaagtttgaatcgcatgcaatctaatggctacttctctcatgttcatacgttttgttgggatccaacacgtacaagaaagggctaattgtgcaagagaaaccaagcattggtatgttgcattttctgttttagttgttgcgtgaatgaatcccttgcattcttcctggagatgaacatcaatgatatgtaatatatgatctggaaagttcctctccacaaaattggtaatggtcagctcattctcgaacatagagtctgttggtcttttgcctattagcatctccataagtactaccccaaaactataaacatcaccgctggttgatgcacggacactttgagcatactctgacaaaagggattaaatggtacttaactacttattagtgcaatttgaatctttatatagcaccatatgtggcaatgaaatttacctagagctatgtatcccatggttcccttcacagcaattgaactgttacaactagaattcccatctgatgtcaatgaagaatcaagaacaagacttgcaatgccgaagtcccccaaatgggcactcatatcctcatctagaaggatattcgtgggcttcacatcacaatggacaataggccttccacagtcatggtgtaaatagaccaaagcatcagctatgttgacagctatgcttactctttgatccatggacaaatgtttgcgaactacaccagcatgtccatgatgcaaccatttgtccaaattaccgttatgcataaactcataaattagagctttgaaatctttacctccattgtctatcgtggagcatgcagttagtacaggaagaaggttccggtgccgaatggttcttaaaacctcacattctgatacaaaacttccgtttgcacgcctcatctcaagattaaaaaccttaatagccacttctattttggcttgacttaacttccctttatatactgaaccatagcttcctcttccaattaggttcaactcagagaagtttcctgtagcttgagctagatcgctataagaaactttagggaattgcttaccaaaagaaaacataaataagtaggttcttcttgatgtcttctttccaagagttataacataaatcaacatggtgagggacatgaagccaaatattggaatcaataatctcacgatattaggcttcctttctattttctgtgaaattgaagcgcacaaaggcatatggaaatccactgctcctccacaaagcctccagttgccatcaagtgaaacagctgtaacattttcaaatattccatttcttggtatttctccatggagatgattgtgtgaaagctctagcttactgaggagctgtaggccactcaaagcagttggtatggtccctgacaaactgttataggaaagatttagtacgttcaagctttttagattgccaaaatatactggaatgtctccagtgagaatgttttggcccaattggataactaccaagttttggctttgccccagagcattaggaatttccccagaaaacttgtttgatgaaagatgtagttcgaccagttcttgaagattaccaacctcttcaggtatgctaccttggaggttattgtagctcaggttcaatattgagagttgcgaaagatgtccaatgttgggtggaatgatgccttcgaatttattattttgcagcgagagcattgtcaactgagtaaggtttccgatggagggagtaattggtccgatcaagttgttctcacggagaaatagaccttgtagatttttcagatttccaatccattctccaatttcaccactgaaattatttttaccgagggatagtctgattaagttaggaaagttgccaatacttggggggactacccctgatatgttatttaccgaaaatattaaattttgaagattgattgatagattacctaccgaatgtggtagggatccctgcagattattttcagctactgagagcgttgttagagcagtgcagtttgtcaatgaatgcaagaattcccatccttggtttccatttgcttcaagcttgttgtacgcaaggtttagtctagacaactctgaaagccttccaaaagacgtaggaatttgcccagtgaaataattcgatgacaaatctatataccacagtcctgaagcattgcctagcgaagttggaatctgaccttcaaaattgttataatccaaggtggcctgttggagcctagggaaggcatcgccaaagttctttggcaatgccttgcctagcatattcaactccaaacttagcaactcgatacgggacaggtttagggtcgatgggatttcacctgatagcgtgttattacctataagaagaatagatagatttggcaattgccaaatcctgttaggaatgctgccctctaaataattgtttataagcctgataaagtttaagtgggtgaggttttgaacagatgctgggatgatcccagtgatattgttagctgcaaggtccaagtattctagcttggtaagggagcctatattaggaggaattacaccatgcagcaaattaccagagatgtctaatgcccttaggttggaacaatttatgagttcattgggtatagccccctctagtgcgttgatactcaagttaagggtgtccagttgctttagatggttaaggagaggaacctggccaaagaagcgatttgaggacaagtcaaggatactaagagatgtgaggtttgcaagagaggaggtgattttgcctgccaagcttctgtcggtgagattcagacctgagacgcgccatggccgtgtagtagtgcagatgacgccattccaccggcagaagtgggtgctagtgttccaagagatcaagactcctcctggatcttcagtgatacccttcttgaaatctatcagcgattgtagatctgtgttgttatcgcggacagttgagcaatggacgacgacattgttgccaactccataacatagcagcagcaacaccagttgtatgaacacggcgagtttcgtgggttgctcttgctcggaacacatatcacctgcaaaacagtaagaatgaacagggatattatgtccattttcataagatgaacatcgctgagccagtgctgcagtgcatagggcatactaccaatgaagaatcgaagataaccggtactcagctcgaacaacgcgtggccaggttttggctaagatgaataccaccggcttgggcagttgggcccctggacaatggccttaaaaacacaagtcttcagcagtgtcacacatctagcgccttgctctgctctgccgtgtcttgaccgctcctactgatcagaatcgaagatgcctactcctccggtattactcggattttccatctccagtagcagtagaccagtattccgtccgctttccaaaattttactacacgcgatgcggagtgtcagccactcagccgtggcactccactgccgactgtcttcactcttcaggcgctgcccgcggttcactcaggaaaactggactttttcctagagaatttcagcatgcggcctgttgtatcttacggcccgtgcccggccgacgaacggccgactaagaatgggccagattaacgacaaaacggcccagaaaatcagaattaaatcaagggagcaacgctgcagcatcgcccagcccagaaggacactgcctaccttcatcgacggctttgcctgaccaagctccgccgccgaccaccgcactcgatctaggtttgcaggctgtgacgcgcgcggtcgccccgtcgccagatggcggagcgtgaggcctggactcctagatctcatttgtgatagccgatgcgtatctgcagtttgggatttggatcaggaacctggtctttgttcggttgaaattgtgctaaggtttttatccatgaaacttgacgcctggatggatggatcaggattatgatatttgtttagccccacgacagtttgtccaaaacaaattgcctatacttgaaacgatccttaacgagccattagtatagaacttttggattctgaatggggcaccagggagagcttagtagcttatgcaatcatagccagatgtagcagtaaaatagcggcgcaatttatctctctcaacgtgagagaattaccatgtttatgcctatgcctacgatactggctcagatcatggtatcactgcggtgattggtgaaacctggctagcttgcattcggttggccgttacatcatatgacattttaatcgcatgtaacctgttagctacttctttcatgttcattcgttcccttgggcataggcgtgtacaagaaaaagcaacttgcaggagggacagcaagcatgcatggataaacgccattttcttctactgctgttgcttcaataaatcccttgcactcttcttggagatgaacatcaattacgtgtgctaatcttatccggaaggttcctctcagacaaaattgagagtgttcagtccattgttaaacacgggatccgaaggtcttttgccgggcactatttctagaaatactattccgaaactgtagacatccccactaattgagcgaaaaaacgaaaaaaaaagaacgaaaattgatgttttacactttgagtacaatgtaaaagctcactttttagagtaaacaatagattgctttacatgatttcaagatgtgggaataacggagcaatatatccaaatagttcccttcaatccgattgaattgttaaaacttgaatctaaacctgaatggcaagccgatgtttatgtactagaatttttttctcgaaccacatggtcccgaattcccaattagtgaaacactgtagcactactgaatacacaagggtattactcctcggaatttattgtaagacatatctagtttagtgaggttcaaatcatttggagaaattgaaggggcctgacaaattgttatgggaaaactccttagaagatggtcggaatgtttcctatagaactgaaattagcaagggaccagacatattggtccatttgaatgatcagtaactactgagtactgacattggcccaaggtttaaggaatttccccactaaatttgtttgacgaaaggtctagtcgtgagagttgtttaagattaccaaactcaaaaggtatgctcccttggagattgttatagctaaggtttagtatcagcaagttttgaagacctccccagctaggtggtacagaaccagttaagtcatttttcgcaatagacaaaaacaccaattgtgtaagattgcaaatggagggtggaattgtcccgacaaagttgttcatttggagatttaagcgttgtagcttggtgagttttccgatccattcttcaattgtaccggtaagattactttcgtctagcgagagttgaattaaatcatgaagttttcctatgcttggaggaacaattcccgatagcttgtttccacccatcagtacatattgaagatttacagaaaagttaccaatcgaatttggtatgactccctgtagctgattattagataatgaaaacccattgagagaagtacaatttgccaatgcatggaagaattcccagctttcgctgtcatttgcttcaagcttgttattctcaaggtttagataggacacacttgaaagcttcccaaaagagcttgggacatggccacttaaatgattgagccttagatccaattctgttaactctgaagcattgcctattgaatatgggatgttacctttgaacatgttgtttcctaagtataggagttggatgtttggtagggcgtcgccgatgttagatggcaatgtgctgcctaacatattggacgtcaaggataacatcgtaagagaagacttgttagggagactttgtgggagttcacctgacagattattttggtttaggtacaacaccccgatgttttgcaactgccaaaactcgttaggaatgcgaccgttgagttgattttctgaaagatcgacatactgtaaactggcaatttttccgagggcttccgggatgatcccagcgagattgttctgggaaaggtccaaaccaagtagcatggaaagattccatatggtaggaggaatcctacccgttagattgttgctagagaggactaaggcggtcaggctggagcaatttgcaagtccatctggaataattccgttcaaactgttttgactcagattaaggacttctaggtgttgaagatcatttagaagaggtatgggaccataaaagttattatcacggagaagaagctttcgtaggaacgttaagtttccaagagaagatgagatctggcctgatagactttttctagtgaggttgagccccgtgacgcgccaaggcctcgcctggctgcagttgacaccgttccaactacagaagtggatgctggcgttccaattgctcaaggctccatttggatcgctggtgatgccctgcttgaacccgagcagcgcctgcagatcgacgctgtaatcatcatggttaggtaggcacctgacgttgccaaatccgcaagtcagtagcagcaatgccaacagtacaaccatgttgctttgcacacatgaagctttcgtcacctgcaaaagataaaaggcatatatgtataatcgttcaagtagattagcagaccttattatgtataataaggtccgaggaacttattgtctcctctgcagctgaccataatcgattgaacgatcatacggttcacatcgaccttatcttttttctttttcgaatggtcagccgttgccgacgttttatataaagaagaaggtgtcctattttaaagagaaaatgggaccaaacctggtagtgcacagttcattaaggaaaagtgggcaaaaaccacaactactcatatgtaagcaggatatgcgcctaccctaagtaatcttgcaacaagaaataagagaaacggcatgtatgaaatactaactgacaagagattagcagacctcttcctcgttctgacatgtcaaaatttcctcggacctgttctgctagaccttaatacagttgtacttggctcaggcaccagcgccatggggttgggtttaaaagagttgtatttcactgtcacgtccgcaagatattattctgttcatcatgcatgctttgccgtagcttgaccgcttttacagatgtgacactcgacttcatcagaatagtaaacgatttctcccaagcactttgtcctcgtgctggtgttgctatctagtaacaagatttacgaacaaggctccgtcgtttcgtttattcgatatttacaaataaaaaataatttttgaataaaacttttatatacgagcaaaggctgaaaaataaactttaatgaaaaaacccccaaaatcaacttcaaatttaaggttggaaattcaaattttggctgataagcataagtataagtataagcgaaaagataaaaccgatatttactatctagccagggacaaaaacgtccgcaaaaaatatttaaatgaaaaatgctttacaaatgcaagaaacaacgaaaatggcattagaactaatgcccacggtttgaaagtgggcattcgagcaaatatcatttaacgattacatcctagttgaaatttctcgttatttaccacctcttcctaacttatattcttttttgagtaaaatgcaccagcggtccttaaacttgtcaggaggtttcacttagatccataaacttgcaaagcgcacattgaggtccctaaacttggtttattata

SEQ ID NO: 8232 - DNA, 20511 bp, Oryza sativa
ctccatgtgtttctcatttatatgacccaagcgacaatgccaaataaaagtgggattcaaatcattagacgttgcctttttgcattaatgttatagactaaacatccatcaagattcacaatgtataagccattcatcatgggtgcatggaaatagaaaatgtcattataatagactgaacaaccattgtccacagatctaaaaccataaccctcttcttgcaaacaagaagcagagataacgttcttacacaaagctggaatgcaataacaattatttaattccaaaactaatcctgacggtaaagataatggcatagtgccgaccgcaatagcagcaactcttgctccattgcccacgcgaatgtccacttcgcctcttgctaagctcctacttcttttcagcccctgcaacgatttgcatatgtgagcaactgacccggtatcaaatacccaagaatcagtagaggaagtagcaagattaatttctataacattaatacctgaggtggaactctttccatcctgctgcttctgcttgagctgctctaggtatttcatacagtttctcttccaatgacatgtctccttgcaaaagaagcactctgcatccttagcgggccctgtcttttgaaccttggtcttagagttgctagtacttgtgatctcatcagagtttagctttctcttttgaccacttttcttgttgttgggcttgcacttatgcataaccatcacatggttggagtttttcttaatgctttcctcggcagtctttagcatcccatgcaattctgccaaggtcctgttcaggttgttcatgttgaaattcattatgaatggctcaaaactgggagggagcgactggagaatcaaatcagtagtcaactctcggctaaggggaaagccaagcttatccagactctcggtgtaaccaatcattttgatcacatgtgggctcactggattaccttctgcaagcatgcacgcaaacaaggactttgaggtattaaacctctcagctcttgcttggtcctcaaacatgttacgtagtttcgtgattatcgtatgagcatccaatgcctcatattgcctttgaaactcaggggacatagtagcaagcatgagacagcttatatcaaggtattcattgcatcacctttcatgctccctacgttgagcagcaggagcattgttgggcaagtcagctagaaaaggctgtgtaagcataaactctttgtgctcttgcctgagaacaattctcaggttgcgataccaatccatgaagtttattccagtcaacttctctttctcaagaatagaccacaagttaaaattggatggtgcaggagctgccatgatctataatagaaatatatgcatgcaaaatcagcaccatgtttacatttaacctttcattaaacaatttaacaaaagatactcccactatgtattgtgaaataaaattccctctagtaacatagtgagtcaagatcctcattttattagtgtctagtaagctttggcatcacagctagacaactatcaaaataggtaagcaacaccttgctaatcacatcatatgtgactcttgtgctattggggtgacatctccatgtccaacccaacctatgccccaaggtccaaaactgttttgataaccttgtcaagtaaaccaatgatctccgcatatagatgtccgatatctatcctattttatcatgataaaaagtgacactttgctatggcaaacccatcacttatgatcacaaccgtaataggtgcaattattggaagagcataaattacttaatttttctgagggaatctatcctaccatatcatatcaaatatataacagcaataaagtaagatagatataataaaacccaagcgaaatctaaggggcaacgcacacggcggtcccgctagccggttagcgggcagggggtcgaggggagagccgtcccccgcgggtgaaaaccttaacggcgtaatcaaattatgccgaaaccgagtcaatctcattggcttgtttttctcattggcgtgcggttccagtggacatcggactatccgatgaacacactcgcgctcggcgttggtgagtactaaacattctagtgaagtcaccaacatacataccgattgatctcatcaacccatgtggctatcggttcatctcatgttccgatcacctaagaactcatatacaacataatacatctcatctactacatccgcatatcaattatatgcaatgatctagatcataaactatacaaggcggctctgataccactgttgggatacgcgtaggctacgatagcataaatcaaaattttctatcgcgtaaaccaggaaccatgcaagtattagatcatagatcgttaccactcgatgcgctgtgcagcggaagaagacgctgagaagtcgaaggaactctcgcgaagtagcgcgtgtcgatgtagaggaagtagtcgatcgcaccggctcggccttctcctcctcgtgcgttctcctcgccgtgcagatgtgctagcacccgcgcgcggctagggttttgctcgggtagggaagtgacggctagggtttctcacctccaccggtcacacccctcacgaatatataggatccatcactcgggcctccaaggcccgtaggactactattcggatccctatccgaattaagctcatattggatctctatccaatcctcttattccggcccattaagtgtgcgaccctgtaggttcatgtatacttggctgtaacctgaaaactccttttcggtccacgcgtcaacagtggctcgtagcagaacttattgacccatcgggcatacataaagatcatatcggctgaacctctagtatatacttgtatgaacccctttgcctcacgatatcgattaagctcaaggctagatatgtgccatcctctaatagctcaatcattcactcgaacctgttgatagactatataacttatgattgactcctcaatcacctttggcatggccatacacttccataatctacaacatcgaggggtccagagatatctctccataggaggggcaaatcccatcttgattattcatatcccactacatgtttcatagcatacccgaaaactacttttataactacccaattacggagtagcgtttagcagtccctaagtaagctattacacatgttgagaaccatgataatctcaggtctaaggattcaacaccaatactcaatgagatcactgatgacacaacacatatggctcttgcagtgtctcatgttgggtctatccaacatgttcatcaacatgtgtccacattattaatttggtatctctataccatgatccatgagacatgatcatgaattaatacatgtgctgatcatataaacatatttattccacatatgatatttgatcagggatcccacttgggtctgcttttcacaaggcacaatctgtttttatggttttagacacatagtcatatcatttgtagttccagaacaatttctgagcacaatctgatagtactatgaccatttgtttactaaaggttgttagcttaactatgttagtatccccgcaataaaaagcttaactagttagtagattattactgcttttagtggtgtatcgagaaaagatcaatttctctcttactattaattagtgaagaattggaatcgtaatatcagtacaagcatcaagcatctacaaattcaaaagttggagtcttacactgatgaagggatgcaacgtctgctaaactcgtgttcatatactaaaacaagaaagctggagaacctgtggcagcatcaggaacaccttcttcttcaagtaagtgatcttacttgcattatccagcaaacaattaattttagtatctttctattgtcaacaagagttaatttcatgtaatctttaccattgaatattgttttaatcatcacagcttactagccttccaagtagtacaatgtcttaatgatcttaactaaagagaaccctaaaaaacaatagtggtataaaatttattgagcagcaaatgcttcatcatgtaaaaactattatgcaagataagatgacaagatttataccatgaaggtgggttgtgaggtgagctagttgagtcattagcttcagataaattcatagctcaatggcttttctactgaggatcttagtagcaattgggacaactcaagtttttagggaagctgaaagtttgacatacgtgctgctactttgaccaaattgactatattccagtctagtgtggtgaagaactatgatggtcatccgatgtaatcattgaaacaaaacagaatctcatctttcttatgaatttgagtcaacttttctgtctcaccaataatctccacaggaacagcttccatcgctgaaacaatggaaccgatgtgcatctctaacagtaatctgtctgaaagttatggcagagatgattatgatggcattatgacagtctccacgtgtccttagatttttcatcacaagtataggttctccttctactgtattaatcaaaccaaatgctagtgcaagcttcttgctattgtgccttagccttgtctcccctccggcagcatgatcctttgccaaggcccatatcttatctggaacataccctgcaagcttcatcttctctgacatcacctccaagaatttgtacacgtctttgatcctaggatgtgagatatcattggcaacgaaaatatgtactattctgccaagatctatccagctgcagccaggcttctttctgattccccgatttctcaatagtttccggatttgtgcagcctcctcccatttgccaacagtggcataaatatttgagagcaccacatgtgttgatgcactgtaaggagtcaaattgagaatctctttggctgctcttgctctaagatccatgattccatgtgtcctacaagcactcagcgaggaagtccaaccaattgaactaaggttaaaaggcatttctttagtcaactcctcagccttctcaaagttcttggcacgggcaagtacgtcaaccatgcaagagtagtgttcttcgcaaggttcgatgccatatttgtgcttcatttagtaaaaatactcccaacattcaccgactttcctagtgtgggcacatgctgacagcactgaaagggaggtgcgacttggcgtaccgcgtgtgcatggcggcgccgaggaacaggtcgcctgcggccgcgctgtcgctcaggacggcgatgaactgagccgcggccgcggtgcacagaccggaagtggattttgatcctcgttgtttggatgtagggggtgtttagaaacaagggtgaaaagtcttggcgtgtcatatcggatatacggaacgtagtctaataacaaaacaaattacatattctgtctataaactacgagacgaatttattaagcctaattaatccatcattagcaaatgtttactgtaccaccacattgtcaaatcatggagcaattaggcttaaaaattttgtctcgcaaattagtcgtaatctgtgcaattagttatttttttaagcctatatttaatacttcatgcatgtgttcaaacgttcgatgtgacagggtgaaaaattttaaggtgatatcaaaattttagggtgggatctaaatggctatgaaaaaattgagaagatatatttacacgtgatatatcactccacaaacatgcatgtaaaaatttaacttttacatctcgcaacgaaaaaaacaaatttgactctgaatatacgttaactagttgcggttaatttgttttttttgttacgagatatagaagttgaatttgagcttgcatgtttgtggagcgttatatcacagaccacgggagcagccaaaagcccatcattgcatcgccaagttgccgctagcccgcgacacactgtcgtggcatggcacgtccactgtttgtagtgtagcacgcctacgggcactgaagccaggatttggcgattggatttgggggtgttgaccatgagacgtgagaactcgctaatggcttgatggacagtgatgtggggaacgagatccagtgatgtgctattcatcagtagcgttggatgcttgggggacggtggatcgaagagctactgccctctgacgtagttttcccaacgtcagaggatcgtgacgtggacgtgaggtcggtatcatgtcacaataattagcaactagagaaagaacacaaaatctacgggcaagtctttctagatcatactaatatatgcaattgtgcatctctactccttaaaaattctggattggtgatggtgaaaccaaagcaaacataggatccaacgtacgtcgacatgattggagcgagagcgacgaaaaaaaaaaaaagtacatgcgatccggaacggaaaaaagcgtaaaaagcgtcgacgccccgcgacccgcgccccgtcccgcgagtcccgcgtcccacgcgtccctcgaccgcaccgcctcctagccgccgtcgccccttcctccgcgcgccctccatcgctgctgccccaagcaccctcctcgccccctcatcgccgccctcgaccgccgacgccccgcgcgccctccaccgccaccgccctggaccgccgccgcctcctcgccgccatcgaacgccgacgcccctcgccgccctcgaccgccgctgcctcctcgccgccctcgaccgccgacgaatcctagacccacgcccggcgtcccgcgtcgcgcgccgccctcgaccgtcgacgctgcgacccgtgccgcctcctcgccgccgtcgtcgcgccccgcgccgccctcaattgccgacgaaccctagacccgcgccccgcgccgccctcgaccgccaccgttgcgcctcgccgccgatatctcccacccgcgtcgctgctcgccggctgcttcgtcgatctgctccgcgccgcccgaacaactacgactgcgccaccgggagaccaacagccgccgttggctgcttcgccgatctcctccgcgtcgtcgggagaccgatgcccgctgctcttggctcactctccccaatccgcgccacctccgccggtcacgatcgccacggaggtctatccgtcgcctccgcctccgtcctcgacgccacagtctccctctataggtacaggtcccctcctgcctcaccccaacctccccccccctccctcttctctctctacccaaccctaattactcggcccgcagtccattgccggggtaggcctcgccgccaggccccctcccttctgccacatgaaaatctgctcaattttttttaccagtgaagcatgtatatcataaaggtgctgaatatagtagagaatcagatatcataattagtggaaaatcatacattggcctaatatatacagcagaggtcccaaattaacttttcagtcaaacaattgcaataatcgagtaccatcgctcattatctggagtggtttggcgatgtagaggccgggtttatcccattttctaaaaaaaaaatgtctggagtggtgcaatcttccccgaagcactataatgcttgcctggtgaattatgtgaagaatcctctgaagtagtggcacatcaaccttcttcgcttaactggaacaataaaacagcaatgggattttgtcagtttcttcagacatcggccaacattgttcacttctgtaaaattgctaatcatggtttattttaagtttattacttaggattagcagaagttaatttattggactgcttcaaagtgagtctgcctggtgtgtacaaatttgcataaaactgaatatgaaggagcgcaagtcatgaactgattgatgctccaggaaaacaataacagcaattaacagtttcactctccctaaaaaaatacagcaactaacagtttcagaggccctcctttatgttcatgaatcaaatcaaattgattatttatacaatttatatatctgcataatttgtctcacaatgatcatgacattcaagttattgctacttatttcagtatatttaaactgttgtcgcagataaaaatcagactttttgctctcatcatgcaaagaataatttcttttattctttactgctccaatgatacttcggttatttttctacttagtcaagttcttataaaatttgggagtgcatctctgttgaacccggccgacccgaccctgcaacaacgcctcaccaaccgtcgcccatctctgcttggacaacatagtcaactgccatctgctcatttcacggtataacccagcatttttcccatccttatttattttcctcctctcttctgatcttgtgagatttttttcttcatctttattgtgggtatgtctctgcaatattctttgagtacatctagattcacatagacctttgatccagtgtcctgtgacatgtccaattatatattttgggtaccatgtagatcagttattaattctacgatgccagaaaattactgggcttcacattgaaaggctataaatattattctatttcttccctctcatcttaattgtgtgtgacaaatactttgtgtcatgactggtccttagctagatataattaatgcatggaatgcttgattggttcatgaactggccttaaattgcagtcaagatccatccatgtgttacaagcagatgtttcgtgaatacttttgctaagctctgtactgttcttagctcgaagacttttgctatgctctgaatactttcactgtttgcatatacactatcgctaggagaggatcaactgtatctattgtttgcggaacagatatggcatagcgtgtagattttgatgctatcacatttcgtcttcagtttgattaattaaccattcccctgggaccattgctgactgtcctataaataactgtactgacatattctctgttgctgaaaagaaaaaaaattcttgctgatatggtcttctttgcaacctggaatggtcagtttaggaacctggaatgttgtccttgcacaactaacgaagtaatgatatggtcttgatttgcaggataaggagactaggagagtgattgggaggatctgctacttctttgtcggatctgccacttcttgcaatcagcaaacatacgtaagaaagtgcctttagctaattgatctcttcaaactcctatctaaacatgaacaataagtcctcggccttgagtgattagggaatgtcatatatatatagcatttgaatgaacttagcttcagtcttaagactcttggtgcgattacaaactctgaactcaaatggagaacacctctctttttaggtcaacattctgaatctgcattggcaacatgcaggcatctttgaagggtttctcaatgggtctatgagggcaccaattacacactaataatttagcatttaagctgtaggaagcctgtcgatctcctgtcatgtatacagaaataggagctttgaagtcttgtgcatctgaagcccagaatacatgaagctcctatgctgagtttttatcatcactatgaatttctaaagatgccctgtacacttgaaagtttactgctgaattttcgagcttttactattgttctaaaattcttgagatgtactatcaggactcgaaagttgagtgtctcactccattgcatcttgtttttaagatacttaaatagaggagcaattagaacaatgagatgccattcaatcgtttgaactattttgtcacgtgaggaaacctggggagtagtttgatattcttttttgttcactattttctctctatttttgatctatcaaacagatgcataataagatgctagcctcgtcatcaatgaaacgtgtgcactgcatatttctgttggttgtttcacaaattcataatatttgatctatcatctcatttattttcagaaatggttaagattgttgggggctccacaccatcaagtacaaaatcaggttagccatgtgcatgttattgactcaaatgatgcactctttgcatgctaatttcgcccatgtcttcctttcttatgccctcttgcaaatatataatttttttgagaaatttaatgatttactattaacaaacgcccgattattttttctttttttaaaacgtgatcattttgctcataaaatgtgacctattttaagcaagccatgctttagttcctttttaaaaaattgcattcaaataacagtgcattagcacaaaaatgtgccgttgtttgctgggctatttttctctcaaaggtttagaagtgacaaattaaaaatcttggactattgaagtcatatacttggaggatgatcccctggtcaacgacgtagtaatatgcccgtgcatcttgttctttagatacagatcttagctaggatttgggatgaaagcaaaaaaatatgcgttcacatgtataagggtcacagaggaccaattagaacaatcagatttatatccctgggattcatgttctgggcagaaattctgtttaaatctgcaaatattattttataccatattttgaaattagataggatgtggaacttcctgctactattggtgtttcagtaatctgtattggcaatacagttgttctcatggaattaatatgtttgcatctattcatataatctcttgtccaataattttctgtacctttctgcgatatattgtgatgtaactatagcagttgttcactgattaatacaccttctaggtctgcactttgaatctttatgtggagttccaccaactgaacttggccactaactgactaactatgattttgaatggtattgattggatgtgtgatggaatcggttcacatttttgtcctgtacaatatgagtgtgatgtgtgaactgttagatttctgtgatttgattactggcacaatgtgatgaaatcggttgaacttctttgtcatgtgtggaaacctggggagaatttgtttgtctatattttatacactcttgtaaaatttaattgtgaattgagattgtaaatatggtgctctggaaaaaaaaactacagttagctatggatttaaattaatactctcttcgtttcatattagaagtcgttttgattttctgcagtcaaacttcttaaaagtttaattaagtttatagaaaagtctatgtacttagtagctattcagcatttatttaataaaaaaatgtgggacccacctatcatactcttcttcccctcttcctctctctctcctctctcgctcttcctctctctctcttgcagcgcgcacggcaaggacgggcggtgggcgtgggcggtcggtgaggatggcgcagggacgggcgatcggtgaggacggcggtgcggatgtcggcactcaagacagcacgcacggtgcggcggcaggaaggcgtttggcgttgtggtccggaagggagcagcggcggcaagggacacggaggcagcgaccacacgggacgcagaggcggcggcggcgaactccgcctccagccgccgcctccgcctccgccactggtcgggatggcgctcgggatgagggtggtggctggtggcggaggaggctggaggcggagctcgggatgaggcgaggctacggcagcgaggtcggcttcgcaagcacgacagaggaggcgaggcgacaatggaagagcgtggctgcggaggaagcgaggcgaggcggcggcggcgatggcgtcgacttcttcattgacaacggcccgatcgaccactacgacgacctcgccaatcgcatccatgaccccaatggatctccgatgccgttgcccctgtccaggagcatctccgatggcttccccgtgctgtagaacacgaagtagagcacgaactggatccacgtcactcggtgcagtcgctcaccgtcacgttgagctccgggaaggtgtcggccatggcggcgacgaggccggcgcgtgtgccgaggtacaggggcacaacgacgcggaggaaggtgtcgttgggaagggacggcgccacgcgctgccacttgatgaggaggttggtggcagactagtttcttgagcggtggacggtgaacaccgtgacggtggccggaacggggacaagccggagcttccaggacaagacgatcccgaagtttccgccgcctccgcctcggatggcctagaagaggtcctcctccatggcggcctgtcgaggagccttcccttggtgtccaccatggtggcgtcgtggacgtggtcgaaggcgaggccgtgtgcttccgcagcatcaggtcaaagccaccgccgctgaggtacccgctgatgccgaccgtcaggctgacactttcggggaacccgaggcgggaggtcttgttggcgatggcgtagtacacctcgtcgagcatcgtgccggagccgacccatgctgtctggccacggacgtcgaccacccgctgccgccgccgctcgacccgcgccgacggcccgagagagagggggcgagagagagacaagtgatagagtatatatgaatttatataaatatttcccattgcaacgcatgggtacctaactagtaaatttaatatgtccaatgaccttttataattataaggattatatgatgtttcttgatgtggttctggacgtctttcaacacacattttctgttcatatatgtctatatgaacagtagaatatatctaaaaaataccattttaaaataaggtcgctatattacaccaatttaattgactaatcaatttaaacaagtaatctaagtaagaactattgggcagcttgtcaatgacatttattagatttttctcttaattaataatgtaaacaagtaatctaaggaagaaatattgggcagctagctagctgctttattttgcagctaatcccatgacattatatgctaaactggtggctaattacccagggtggggtggcattggggtgccatgccaacccaacaccctcgatggcttcaccactgtttacaggctacttgaacactctgatttttttttctcacaaatcagatgctcttccctgcaagatatgcatacgcacggtgagtgcccttagcgctattatgctcatacaaactcccataccatatattgtttagtagttatacccctacgtgatatactcctatctctctatcaactttctaaacaagcttttgaatcattttttttcttctaaagtatttatctaatatatattctgattgtacccattatatttattgtaaataaatctttacaacaaaatatcacatgattatattttgataaaaaaatatcaaacattataaaatacttactaaaacatcaaaaacatcgagtgcaacttttgtaaatgcattagtgaaacatcagaaagtgctattgaaacatcatcgaaacacatagagggttgttgaaagttgaaacatttctctctaacgtatgaaacatcaaattttaacatatgaagcatgtaattttctttgattagaatataataatgtgaggtcttgttataaaaatttaattataataaatataataatgtaattcgattgcacatcagataaatattttaagagaaaaaattatataaaccatactagcaagtagcaacttacatgcatgtatgcagaaagagagagtggttgtggctctgtgcatgcaaagaaagagagggagagggatggatgcatggcttttaatgctaacagaaagatgcttcgtgacctcgctccaagggcagcacccgatttattctccgggaatcaggcgtccgatagaaagcattgtcctcgagaaaaagggagaaatagttaaaaacatacgattgaattcaagctcaaaacagaagattgtttgattggattggaaaaatgtagcaattggatgggacagatagagtcataggaaactttccgtgaggtgggaccttatgttaaaaatcttataaaacttgtatggattgcggtattcctgaggaattttataggattcaatagttttcaagtttcaaaggatcatatagaaaaaagatgaatcttaaaaagaatcctatgttttccgttcaaattaaaggggcacgtattgttttgctggggtagtatcgttctgcaagaacaatgatggtgaggaaggagaaggatgactccgttttcaagtagtagaaaaataaaaaaaaatagaaataaaaaaaatctctctcacatcagatttggtggttgtagcaatttggactcatcctttccccttgccaaattttcgtaattggttactatacttgttttttaatataggacattgtcaacttttattcaaatttgactaataatatttattcaatcacttaattaataagtaactaaactggaaaagtatcactaaatttgccatcaaaagtattataaatgtgcattatatatttgtttatttgcataaatatttcaaagagaattaatcaaatgaattaaaaaatcaacttgcattatatgttaaaaacggaggtagtatcatttagagaaaaaaaatgtatagtatttcaattacaagtacaaccctggaaagtaaggaggggtaaatttacgaatacttgtttgagtagtcttacctctaaaacaaaatatttacattttccaattaagtaaactagtagagcattaatctaagtctttcaaacaatagtactatccaagaagttcacccacaactttttacagtaacacatcgtcctaaatgtctttcatttactgcacagacacatctttcatttacccctcgaatatttccagcaatcgagcctcaaggtgctcaacattgaacctcgcagacttttgcttcttgtccgagtagctctccaagtacattcggtacaatgggataaccttctgggtgatcttctcacgcagcttctgtcgaatcacaggatccgtgaccttccatgtcttctgcacattgtaggtcatctcaaaacgagaattgaacttatcgaacaattgctggggccataaaattttaggaattcgagttattatgaatgatgacatcacaggtgtccaagaagcttcgacatagcttgccaagaactgatcaagttggacatggcgttgcaagcaccagctttctcctagaatcagcttcagatcagtataattgttagcttgctcaagcacgaagtttatattgttcagaaggaacaccagttgctgcccttggagtgccaaactcctagagttcatgtccaacataaactccaaggatgagatcagttgagtcactacttgaccaaatttatctggattatcgtttagcatcatatggactttgtccttttgttcaaccagcaaccgcataagacccataatatgctgtgtaacatgatggacacccgtgttagaaatgaccaaatgttgtgacctgagcaaaccatttagttcaaccaacagcacaagaaaaactgctgacaatccatttgtaagcctttcaatttccattaaaatgggacccttagtttgacccaagaacaaatctaagatttccatcttggcatactccaatgcctggaacataatcaacagattgaccattttggatggaaaatgcttaactgatgcatgagtatccctgcaggaaggatcatttggacccacctgaatgcagattgcattagcatagttaagcagcttcatgactgattccttagcgattgcagagaagtagtccacctttagtgaactgaatgttccatggtctttctgattcaactgcgttcgcatctcatctagaacactaaagacagtccgcattgtcgatgtccagaccttcaatagcaattctgtggattcctccatgtggttacccaaaattttatcaatgtcaagaatttcaatgtacctgttccatattagtcaagatcacaaacgaaataaagtttacaaaacgtataaataatcaagttaaagaaataggtagtacaatttaattactgtatttgcctaggtacaattatttggggctgcaagaacttgtgcaggacaaacgattgctgcaatcaatcagctagcagaaacaaaaagatcaagcaaccgatcaacagaaatactgaatcaataaatatacgaacctgaccagatgctcactgtgttgatcgaaagctcctcggagcatctgttcgtgtccgaccccaatcatgaaatcagcaatcttgttgaggatggacactgacttgaggtcaatgtgactggccgtaactgacgaagcttggccacttcgcactgttctctcctcactgagtgccatgtaatatccgtcaaagctcacaccgtttgggccgctgctaccgccggagcaggagcgagaggtactcatccatgaggctgacgaggcagagccagaaccgtcgccgcctccgcggcagctggacctcgcgagctcccagatagatgtaggtgtgcaaccgagataacttgccagagcgtcaggtttccagatcttgaggtggcacaactccactgcaagggagcccatggccgtgacgaggagggattttgcgcggttgtgcagatcaccgtacgccaagacggggtgctccaacatctgcagcaggttcttggcggcggcgaagtagtcgtcgagccgtcgccggtggtcccggaagaactccgttgtttcggggttcttgcagattccgaagacgattgatctctcgatgtcttggaggaataagcgcagcgtctgctcctgctcgcgcgtcgccgccgccgcagacacctcttcgctaaattttcacgcgcagttgatttcagtgtttctagaacgtagtaatctgcagttttgcacgttggagttaggatcacgggaaaacctgctgtgctgcggcggcagatgggaggaggaggaaccatggaagcatggcgagaaggcgccgagaagagcggctccatggacgcggcgctccagatcgcagcggggggccgccgcgccgagcccgccaagatcatcagggaatacatggtagtcgagtcgtcggtggtcttgctgcgctggagaaccgcgtgacgaggctcgttcggctccccggcgccggctggtcgccgcggcgaggcctcgcctggttttcgcgtccgttgacatgtcaatctctcatgatctcatcgagcccagccttggtgatttttatttctgttacttgcacaagctgaatgcttccaccatagtttagccgtttagcacctactccgtccatttcatattatataagtcacttttatagtcggccatatgggccgtccgacacagcatggtctaggcccgcctgggccgaggttaattgggctagcacggcccaaccgacatgccgggccatgctgtgccagcccacgtgctgcacacatggcccagtcacggcccaatacgactccagccgtgctaggccggcccgaaggcacgacagtatatcgtgcttctccatacaataagtctaattttcatccctaaactctatgggctatgttcatatagctggaaaataagtttattttgtattcctcttttatttgggccatgccttctatggttatttaagtatatttttcgtccctatactattttcttctatcgtgccataccgggccggcccaccatgctgagggtgtagcctaggcacgccccgactgtcgggccgggtcagcacgggcgcgaccccagtcaggccgtgtcatgcttgggccgggccaaaatggcgtgccttgggataggccacggatctcgggccatatggccatctatagtcactttgatttttttttcccagttaatttttttaagtttaactaattttgtagaaaaaaactagtaacatccacaatataaaattaggttcaataaatgtaacatgaatatgttttaatagtatatatatggacctgcacaccaggaagggagagatgtttttttggcgaaaatgggggatgaaatttctcaatgattgtaccctttcttgatgggaggtgattttaacatatacatatatagctcagataaatctaatgggattgtagatgagagaaggatggaaatgtttaataagttcatcaatgatcatagtcttcaagagtttcatagggttggtggcaagtttacctggacaaataaacaaaattgtccagttatggtggtccttgacagagtctttgcttctaattcatgggataaaaaaaaatccactcaccttagtttgttctttattaagggtggggtctgatcaccgtcccattttgctggacaccagagaggaagacagatgcaaaagcaattcttttagatatgatatgggctggttccaacaatagggttttagggatcagctgaaggggtgctggcctatgagacttcagaaaggggttttagattactggcatctcctgatgccttgcatgaggagatggttaagagggtggggtgccaacatgttgagtgatacaaaaaagagaagaaaaaagattgagcagagactgattgaaattgattcaaaggctgatgaaagggatctatttgaacaggaatggatagaaaggtatgatctggaaaaaagaagtagagaagatttatttctaggaggagatttagtggcagttaagatgggggagagaaatggatcttacaggggatgctaacacactgttctttcatggggtggctaatgggagaaaaaaaggaagaaacatttttttttcacttcagaatggggaagatataatttctgagttctctcaaattcagaaacatatatgactattataagaatctgtttggaagggaaggatgcaggaatgtgcatttgagtgaacatgtatgggagacgggactgaaactttcggaggaggagaaaacaaacatgataagacctttcacaatgcaggaggttgatgaagtgattaagggaactaggggcgaacgcgcgcgttgcgcgcagcacttgtttggcagtgctggacagaactgaatgtgcagccactatgttgtatagtatgttgctagcgaaaggatgatggcctacctgcgactgcgcagacaattaggagagaggtgcatgggctttatgggcctgcgagtatggacatagaggctgtatatgggctttttaggtttctgttttgggatgccctatttctgccttttttgtacggctgatattcattcgttccattgttctcatcggaagttccgctgcctttgctccgctgtttggtggtgactggtgcgtgcaccgatgcgtgtagatccgaaggatttttgttgctggagcgtgatctagggcagttgaaggtggaggttaggctgcgattttggggaacgtacagggaggagtggaatctggggtgtcgcatcaccgcgtcaaggtttgtaaggtttttcactgccagtgaatgggatgataggatcgtttggtgttttcatgtagtttatttgcaacataatgtctcggtatgtagtatggctgatgtgtgtgttttttttaatttatttcatcgactgtagagagcaacttggattcacatagctctagcgctatggtactgactgtagcaacactagtgcgatgcgagtattagaaaaatgtaaatgcatttaaccaatcctatatccttttgtttaagtcacaagatggtgcgaagttgtttggtactaaggaggggtcagttccatacacaaaagattgccttcttagatgtagcaatgttgagtgataagtttgcactcaatagcagaggaaagattgaaggcatatggttttaaaatgtaatccggaactgtggctgggttataaatggctagatagatgttggtattttataagaagtgtttgttgatatgattggctatgtcttgtatgggctattgaattttatttatctatgatatcattgccggtagaatggagaatgcttcagttgttaatgctgatgtggagtggcgcgatgagtacggcatagacactgaagattggatgtccctgagcatgcgagccacccaacgaaaatggagagtctggtgtcatcgttctgcgatgcacaaacctataggtttgatgcagagaaaaaaaagaatattgcatttgtgggtttgcacgcagcatagaatcaatcccaagatataaatatcttaagctgaagtatgaaactgctgatggggttcgaatcaaattgttcatgctggagctagaagcatgtttatatgctgaaccacagatgggccttggcaacgaaggttagactaccatcaaactgtgaagctaatgcatatctaaatcaattgttaatagatctgtttatgcttttagaagtaatctgttgaaattataggtgaagaccatgagctatacgaagatccggatgttgtaagagaagcctttgaaaggcaagctagactgcaacatattgcaagtattattgatttgttcatttgccagctgatttacatctgaaatttcgaaatgtgaatcta

SEQ ID NO: 8233 - DNA, 1075 bp, Oryza sativa
tctagatactccacgaatttaaagcgaataataagcacgaaggagaagaagttcacaaacctaaagtctcatgactgtcacgtgttgatgacacagctgctaccagttgtaataaggggtatcctcccagacaatgtccgggcaacaataacaaagctatgtgctttcatgaacgcaatttcacagaaggtcatcgatccggatagattagaagccctgcagaatgatgtggtgcaatgtcttgtcagctttgagttgatatttccaccttcattttcaatataatgacgcatctgctttgtcaccttgtcaaagagatcggtattctcggtcctgtgtacctacacaacatgtttcctttcgagaggtacatgggcgttctgaagaagtatgttagtaaccgtgctcatccagaggcaagcatcaccaaggggtatggaatagaggaggtcattgaattttgcgtagaatttatcgaagaccttcgcccaatcggggtacctgaatcacgccatgaagggagactacggggaaagggaactctcggaaggaaagcaataacgacggtagacaacaatttattccgtaaagcccatttcactgttctgcaacactcttcattggtagctccttacatcgaggagcacttggctctagttcgcgccaggaacatcggtaagtccgatgcatggattacacggcatcacattgatactttccccgcgtggctacgacaacatctcatgggtaacgagtcgatcaaccaacaacttgccttcctggcgaggggaccgtctgggtcgatcgcgacattccagggatatgagatcaatgggtacacattctacacgagagcccaagacatgaagagcacgaaccaaaacagcgctgttcgtgtcgatgccatgggacacgatggaacaactgccacgtattgcggtgccatcgaggacatatgggaacttgactatggtcctctcaaggttcctctgttccggtgccaatgggttaggttgactggtggaggcgtaatgattgatgacagtgggatgacaactgttgaccttaacaaggt

SEQ ID NO: 8234 - DNA, 10870 bp, Oryza sativa
tttgtgcggtgttctacagctaaaaccacaaagtcgtgatgtcctgtagcaaaatttgcctaagaaaaagtatacgaagtacatatacggggaggagagattttttggatagatccaatcgaccaaccaaatttatctacgacagatctaatagccaaaataatgggtccatcaatttaactggaaatcaaaggttggatgtttttttttttgaaatttctaggattttttaatttagtgccacatggtgatatagtaatgtttggaggatgtccatgtggtggcttgagagagtttttaggaaagtatggacttttagtatataactaggaaaggtagcccgcgcacatacgtggtgttttcgctaataatttgtttgggattaatttttctctgttagttatgaatttcctatagttatccttgcaacatataaattctaaacttaaattacctacaattgagttggttcctatgtatcatttgtagcgtgcacatatcttttagaatatttttggcatattttatttttggagttccaaaactttaagtaacattattttcttgtatacaatagttgtcattgtggatttaaggatatattaactaaagatattttgtgttgaaaaatatggttaatagcattgtttcatataataaaaagattaaagtgcactggcggtcatttaactttgcgcagctgtgtcaagccggcccccaaactcgcaaaacgggcatttaggtgcctaatcactgttcgggtttcactctagtccaaccgggcgctgggacatgcatcattttgcagtaagccccttgactgttcgtgtggctctctcatttctccccccattagcccacgactgttcgtgttcctcggcggcggagacgaatccgaggcgaggacggtggagctcagagaagcggagtgcgggttgaagccagccacgctggagttgtccgcagcggctggttagaaggatgttgccgcgattgcgagggaaaacagaagggccaccgtcatacggtgagtccatcttccctttctacttgttatttgctaggtttgtggatagtcgtcatagttgcagggcttcaatttgacgaaggaatggatcttagggtgtggattgttgtttatgatgtgatttgttagggttctccatcttctgatgaactgtgttaattcctgtcgataatgtaggtcctgatagtgatgcattcaccattgagttgcaccatggaggtttttttgctgggtgcggtcatcttaggtcttatgttgatgaaaaaattgactggtttgactggattgattgtgatacatggtctgccttatggtttgaggatatgtttgaacaactgggctacgatagtgtgacagacattaagttttattggttgtttaccagggaaagatcttagtgatgggctgagggtaattgcaacagatgaagatactaatgtaatggtcagtgtagttcgcaaggtgagaaatctggttgtgtatgttgatcatataggcagtatgaacagtgttgactgggatgactatgttgctaatcctgttaattagttgcctaaggttttaagtccacagaaagttgtgtatgagaaaaacccagcacaaaagagtagaccaagctggaccaggccaacaacctgatggagatgaacagcaagaatctgatggagatgaacaacaagaacctgatggagatgaacagcaggaattgtttgacagtgactatgatcttagtgatggagatgatgacttattagaggatgctgttaacttggatatgccaaaggttagaggcaacaagaaggcaaagcgaagccatttgaaggctattgagatcagagtacctactgcagtagatgatgatgcagacacagaggatgatgccctggatcttcctgagtctgatggtgaaggagaagagagaatgagattcaattcttggaaccaagaggacatgaacaacccagctttctctgttgggcttgtctttccttcagttgagagtgtgaggaaagcaattacagagtactctgttaggaacagagtggaaatcaagcttcctaggaatgataagaaaagagtaagggctcactgtacagatggttgcccctggaatctatatgcatcttgggatagcagagtgaattcttttgtggtgaagacatattatggaaaacataaatgccagaaagagtgggttctgaggagatgcacctctagatggctggcagacaagtacatagattctttcagagccaatgagaagatgagcgttactagttttggtagagtcattcaaaaggactggaatttgacaccttcaaggagcaaggtagctagagcaagaagactgatcatgaaagtcatccatggtgatgagatcaagcagtatgactatctctgggattatgcacaagagatcaggaggagcaatcctggcagctcactgtatctgaacttagcaggaaatctgtttagtacttgcttcattgctttggatgcttgtaaaagggggtttttggctggttgcagacccctcatatgtattgatggatgccatatcaagacaaaatttggaggcaaactgttgacagcagtgggaatggacccaaatgattgcattttcccaatagcaatggctgttgtcgaggtggagtcatttgtttcttgggagtggttattagagacattgaaatctgaacttgggatagataacacatacccttggaccataatgactaataagcagaaggtaacccatttgctacttgaatatctcttgtctgtattgtctgcaagtgtactgactaactgatgcttgtttctctgcagggactaattccagctgtcaagaaggtattccctgacacagagcataggttctgtgtgagacacctgtactctaactttcaagaaaagttcaaaggcgagattaggcacctaaatgcccgttttgtgagttaggggaccggcttgacacagctgcgcaagttaagggaccgccagtgcactttactctaattaaaaataaacttctatttactcctgctcccactttttttatatgcttagttattttctatgaagaaatgaattgaaactaaattaagagcacaattataataatataattagtatgtgtagttaaacatcatagaccaaagtacacttttgttaggtcaactattattatatagtatatttttattgcatgaattttgtttattattatttgtacttgttcctgaattaatcaaacttagtatatggaatatcacataccatgtgtatttaatagactcatgatgtttactcattctgttcttttacttatttagggcattaatgaaagaacacacagcagagaatttcccaaacactatagtcaaagcctctagccagatgtgtatttcggatcacacctagtgtttggtacagattggtacttcaattcctaaggcctctattttcagattagaaaacttttgggtggagcttgagggattttttgagctactgaattcttcatggataaattatggttgctggaatgatgaagaagaaaggcaaattttgctacagatatcgcgacttcatggttttagttgtagaacaccgcacatactcacttttgcgggaaaacactttttaaacatggttatttgtcactggacgcatctattaaaatattaatttttggttgaacaggagagataaatgcagtgaaagattaaaaatacccctgagcccacttgtcatattcttcttcctcctcaattccccttttctcccatatccacgctgccgccgccaacggcgtcctaaccacgggattccgtaacgacgaccgtgctaggctggtgatgttagagtcgacaggatgtgcggcatcttgaggcgatgcggcccactgtggggagccctcaccgccatgggaggaggtggtggctgctgctcctgctgcgattgcgccgcaccatgtcctcctgctccaccttggatgtgcaccctaccgacccccgcaaaccggtgctgctattgccaacttcgtcccctgcattgcatgctgccgtcgatgctccctgcatcctcttaccgcgcttcacttgatctatgccacaactgccaccgccgatgtcatcgcttcgggcatgggcgacgtcacgcggtgtccccgcaccgccgccgtcctgaccgtcctcatggccgcaccgccacgcttttgtcatcgccgtgcactccacccgctggtcgcgacaccactcatggcttgcagtcctcatcggagaagagagaaaagaggcagacagaggatgagatcaagaagaagagagcggatgaggaagacaaaggatgggcattttggtcactccgcataaaattatgggccccctatcgcctcgtcagcacaaatgcattattttaatcagtgcggtgtccgttgtaaaataaccacgtttagagcgtgttttccctcaaaagtgagttcgtgcagtgtcctacaactaaaatcacaaagtcgtgatgtcctattgcaaaatttgctaagaaaaaatatattacagttaaacttaagtgtttgaggaaggcacttaagaagtggagcaaaacattgtcaaagctaaatagcttgataaaaaactgtaattaagtggtggattctgttgacaaattaatggagtcaagatatttaacagtaaccgaatggaacttctgaaagctgatcaaatcaaaagctttgatctacatacatgaagtacaaacagatctactaaataaagatgtaacatatttttgtatatggttgccatgcaaagaatggggtctatgtccaaaccacatacgtctaggatgataatgcataagcacgaagcagaaaaccaatccaaatggctaaagtcatgtatggaaaagaaataaaatataataccaatccaaatggctaaagtcatgtatggaaaagaaataaaatataatgtattctctggtacctcggccttacgctaacgctagattccgaggcttcgggtttcctcaactttgaggttgagtgagtccctcgtcgccaagaaaataagagcacaacgactagggcccaactattgctttttttactaatagttagcggttgtcctcgtacctaatcttattccgtttaactacccgagattagactcgagggtgggtaagatccggagcgaggttgtccacgagctgaggcctctcgaagaatactttcgtgtataacaaaatatgagtaatattgatctcaatttatttgtataattataaattaaataacagttttaaaaattaaaaactggagattttgtttaaaagttatgctcatttaatttaactgtttatagaagtgctagctctaaaatagaagtgctacgcactttagtacttacgtgaccactttgatacgtacacgagggagtgaggtggaggtgatcgtacgtacaggaggaagggaggtgttggtggaagggatttatttttcaaaagatttaatttaatggttaaaaatattgggtccactaaattgaaaatcaaagctgagatgttttgcttttttcttagattttttcggatttcctctaatttattagagtgacacatgatggattatgagcgtttataggatgtgatgtggcggtgtacactggtggagaaaacgtttgtagtcccggttcgtaaccccctttagtcccggtttccaaaccgggactaccaatccgggactaaagatcgctatctttagtcccgggtgaaataaccgggactaaagatcgatctttagtcccggttggtactaaagatgtctcagccacgtggccggctgagccatctttagtcccggttggtgactaaagatcgagctgacctttttttttttgcatggccctgttgctgcaaggtttatatatatatatatatatatatatatctttcttatatatgtttcaatacatatgtacatgaataatatatatgtatttatacatatatatatatatatatatatatatatatatatatatatatatatatgttatgcaaatgcatatgtatatatatatatatgaccaaaatatatatttacattatagaaaatgtgtacacatgcatattgaaacatagtcatgtattaattacaatccattatatgtcctagctagctatgatttcgacgtagtagtagtcgctatctcagaagataatgacctatgaattgtatttctgtcgtagtagaatttacccttgggatcaaggatttattcgttgatgaatcccatgagttgttcttgaaccgccgcgataaattccttgtgtgtgatcaagttatccctcatgcgaataaactatataaatgtatgaaattgattagtaattaaacaaaaaatcgatacgtaatgaaattttgaatttatttgtacgtacatcgagctctcttgtggtgatgatttggtgtgcaaggcagtggcaatactcgcacacatagtagtcgcacaagttagttccctgcttttgctttgcgcactataaataaatgacaaacgacgagagatctaattaatatacacttgtatgtatttgaatcggagaaatataaatgtagagcatgtgtactcacaggaaatttgaacttccgcctaagtctttctctccatttgccacggaccaaatgacggaaccgataccaagccctacatggagtttaaagctatgattcgtagtagcaattaactataacaagattcttaattaacataggaacttatgacagtacctgtctataagttcgaaaaccttgtcaaacgtagactcttttttatccattgagtcatatacgttgacggtgcaggcctccaggtcgaagagtaaaagcacccagtggaatctgcaatgtgcgtgggatgcattacatatgaaacacttagaatgttcgtatgggaatgaaatttggtattggaagacagtaaaattaaactaactctctgttgtacggcaacagtatgaacgtcttgtaatgttgcgccttcaggagatggacgagattgtcctctgtggcttgcggatattggtcgagcattgcgacatttacttttcgagggtcgatgaatccagtatcgaaaacccccgccgtcgggccctttgaatctccattctacaacgataaaagggaagatatattatatatagtctacttatatacaaggacctaattaattaaaggaaacgtagtaagaaatctaattgaacgatatacttacaaaatccagtaactcataatagagacgtcgagggcgtccagctggtatatttcgtagattcccttgaaattgatccagagaatgtcatctccttgcaagaagtccgtgtccctgatcctcgctctgatcatctctctaccggtggcgctcatctccatgtacagctgatggaacttgtacatttgtgtgggtaaggactgcagcagctcaggcttgacaagcggtttaccgagttcgtacatgtatttcacttccgccttttcgattggtgcgtctcgtagcaattgatccgtagttagcccggtgtcattaataaagtcttgtatttcaaaatcttcaccggtcaccaacggctcgatctcctggtttggttgctctccaagctgagggactggtttggactttctagaagatgctttcttgaatgttcgctcatagtccgatagctttatggcctccttggcaggtgcagacatacccctgaagaagttcttgacactcgggtctataggaatgttcttttctggacttcgaggcttcaattgtctcctgacttctgatgccacgtaagcgtcaagctcctcttgcgtgcaatcgtaccctgggtccttgttcttggcggcgtcaactttcgccttctttgttgcccttgtgggggcaggcggtggagcttagggggcccttgacttggaaggtgccaaaagaggagcttgcggaggagtcggtgtaggagcctgaggaggagtcggtgccggagcctgaggtggagacggtgctggagcaagaggaggagacggtgcaggagcctgaggaggagatggcggagctggaggagatggtgcacgagacgccgcttatcgcctagggaggatgatgtaccgcttgcgccatagaataatggcgtggcttgtgtctcgtagatgcgtctcaccgtctcctccagggtaatccagctcgaggtcctcgtacgcgccttcgaccaactcaacttcgactttggagtatcctgctggaatcggcctgtagtggtaagtacttgaagggtccgttaggatggccatgcccgacgccaccttcatgtggtgagaggttatttattagtaatcaacatatataagaagcaactagcggaatggccaaatctaaaatctataaactacgagcttacctttattgataagttcttgaagggaatatgcagctcacatggtgtccgctgagtgatgtcatcaacggggcaggtggtttcgtcctgggtttgcatggcgtccatgctctgtgatcctacctgccccgttgaggcgcagctgctacgatttcctcacgggctcaccattgcaggaggaatggtcggctggggatcatgggactgatatgcggccatgcgttcatcaaccttccttgccacctcctcttgcatgccgagctcgtagctcgataccctgaactcaagatctgcaatcttcgcctcggtatctctcttgctcctcatccgactcctgtacgtgtggatgtcctccttgaacccaatcttccaaggaatcacccctttccctcgtgttcgtcctagatgctctggagtctgcagggcgagtgacagctcgtccttctctatgtccggtcagaacgtgccctgagaagaggcttccactgcgtctgttagtcgacgcgcagccttgcgtatctaatcgccgaagaccagggagccatcagctgggttgagcgttccaccatgagcatagtaccagaacttcgattgttccggccaattagcggtgaccggttcgatacccctctcaagcaagctagcctccatctcctcccacttcggcatcgcgacgctatagccgcctgaccccaagtggtgatggtacttcttcttggcggcattttctttgtttctttccatcatcgcctgcccttgttcacctgtcttatatgcaacgaactagtcccagtgatcccttagctttaggaatgtgtcgaagttcggtgtctgccccttcaggatatatttctggtacagatctcccttgaagctctgaaactgttctgccattttcttcagagtccacctttttactttgtcctctgtacccgcgggaagggtgaatgtctcgagcattgtggtccacggcatctctttctccgaatctaggacaaagctctcatgatctccgcgtgcccttgttctgcgccagtacaccgtactgacaggcacgttatcccccacaacccaaccgctgtgacgtacatagttcttggtggcttctgccagggcactaggtcggccgtcttagtccacttccgttatgatgtgccgaccctcaagcttcttcgcggcacctcgttgcctgcgtgccctcttctgtccagcggagggttgacttccactagcctcctcctcctggttcccctccacatccctctccatgtgcccctcctggttcccctccacatccctctccatgttcccttcctcattcaaatactggtttggatcctcgttcccctcttcttcgttccagtactggctgcttcaatccgctattgtatcgtacaatatatgttcctcatcgcgattagccatctgttcatacaggaaacagttgctaagtcatgagacatttatgttttaataatcttatatgctaataatcatatatgctaagtcatatatactacgtctaactgtcgtatatgggaagtcataaatgcttagtataactgtcgtatatgccaagtctaactgtcgtatatgctaagtctaattacaaatctaataatcgtatattaaaacaataataatcttatacgaaaactcaaataatcttatactaaaactcaaatagtgatatatgctaagtctaggtgacgtatattataggaccctagctagtcaataattatatactaagtctaattacaaatataataatcttatattaaaactcaaataatcttatactaaaactcaaatagtcatatatgctaagtgtaactgtcgtatattagaaccctacacaatcttatatgctaagtccaattacaaatctaataatcttatactaaaactcaaatagtgatatatgctaagtctaggtgacgtatattataggaccctagctagtcaataattatatactaagtcttattacaaatctaataatcttatattaaaactcaaataatcttatactaaaactcaaatagtcatatatgcgtagtctaactgtcgtatattagaaccctacacaatcttatatgctaagtcttgttacaaatctaataatcttatattaaaactaagtctaagtgtcatatattaaatctaatagtcttaattgcattacaaatataacaataatatatataattacgtcacttgcctgcgcgaattccttcgagggctagctaccactccggcttgagggacgacgacgacaacgtcttttctgcaacatacaaaaagatgtattaggataaacgcgaagtaacatatattgcatttgacgttcacgtttcgttcacaatcgttcacattcgcgttctcgttaaggtcacg

SEQ ID NO: 8235 - DNA, 1910 bp, Oryza sativa
aaagatattttcccactatttcgaaatttttttaaacccggttagggttaagaaccgggactgctgacaagcgcactgaatattaatttccattacatatgtgtttctaaaatagaaaataatgcattaaaattatttgaagtagaaaaattaatgacaattacttcgaaaaattattgttgtctgtaataaattaagtggataaaacgtaataagcaaatatatgatttaaaagtaataaaaattctaataatcatatatacttagcatatgaatgatattaaattgttaaaaactctaattaacatatgtatatacatacgccatgcatgatttagaattaataaaaattgtaataatcatatataattagcatatgaatgatattaaattaattgttaaaaactctaattaacatatgtaaatgccacatgcatgatttaaaaattttaaaaattcgaatagtcatatataattagcatatgaatgatagtaaattaattgttaaaaactctaattaacatatgaaaatgacacctgcgtgatttaatacttttaaaaattataattatcgcatataactagcagcatatacatgatataaaagtgttaaaacctctaataatcgtgcgtaattaacatatgccatacaacaattgatttatatggataatcaatacatccaaaatagtttacatcgtgtacacaataattacggcaatacatcggcggtgacggttgaccgcacgtactttctcctcactattgttccctccttgtgatcgctacgtgagtaaggggtgtcttcatttgataggaggatgatagggtcaatcgtcaccgtgaaagggggttgcccatccaactgatcgtaatccttgtctgtcttgtcctcaactccgacgatttttcttttgcttgggagaaccacgtgatgcttaggctcgtcaggccctctgcccttctttcctttgctagacatgtccttcacgtaaaagacttgcgttacaacattggcaaggacaaaaggttcgtccgaatatccaaccttgttaaggtcaaccgttgtcatcccactgtcatcaatcattacgcctccactagtcaacctaacccattggcaccggaacagagggaccttgagaggaccatagtcaagttcccatatgtcctcgatggcaccgtaatacgtgccagttgttccatcgtgtcccatggcattgacacgaacagcgatgttttggttcgtgctcttcatgtcttgggctctcgtgtagaatgtgtacccattaatctcatatccctggaatgtcgcgatcgacccagacagtcccctcgccaggaaggcaagttgttggttgatcgactcgttaaacatgagatgttgccgtagccacgcggggaaagaatcaatgtgatgccgtgtaatccatgcatcggacttaccgatgttcctggcacgaactagagccaagtgctcctcgatgtaaggagctaccaatgaagattgttgcagaacagtgaaatgggctttacggaataaattgttgtctaccgtcgttattgctttccttccgagagttccctttccccgtagtctcccttcatggcgtgattcaggtaccccgattgggcgaaggtcttcgataaattctacgcaaaattcgatgacctcctctgttccataacccttggcgatgcttgcctctggacgagcacggttacgaacatacttcttcagaacgcccatgtacctctcgaaaggaaacatgttgtgtaggtacataggcccgagaatacggatctctttcacaaggtgacaaagcagatgcgtcattatattgaaaaatgaaggtggaaatatcaactcaaaactgacgagacattgcaccacttcattctgaagggct

SEQ ID NO: 8236 - DNA, 4737 bp, Oryza sativa
atagaggagaagtagttatgcttgcaatgcatatataggttagaacaataatattccactagtattgggtatactaaccttttgcagagaataaccataaagtggaggagaatcgacatcacacagacgataaatcaatcggacgatgtcgagaatcagagttatgtatgaatgggccaagaactcagaaatgacacgaccaattgggccaaaattcacaagtctgcaaagagaagaagtccaggaggtcgccagccgaagatgggctggtttgggccagcccatggttcacccccatctccactgttgaagccagggttcggcgtgaacgtctaggattgcatcctaatgacggttggagggcacttcggacaattccccttccacaaccatcataacactggtggagaaaccctttgtagtcctggttcgtaacccccctttagtcccggtttccaaaccgggagtaccaatccgggactaaagatcgagctgacctttttttttttttgcatggccctgttgctgcattgtttatatatatatatatatataaaccatgcatatatatgtttcaatacatatatatgcatacatatatatatgtatatatatatattatattatattatatgtatatacatgcataatatatatgtatttatacatatatatgttatgcaaatgcatatgtatatagatatatatatgaacaaaatatatttacattatagaaaatgtgtacacatgcatatagaaacatatgtagtcatgtattaattacaatccattatatgtcctagctagctacgatttcgacgtagtagtactcgctgctagctcagaagctaaggaccggtgaattgtgtttccgtcgtagtagaattcacccttgggatcaaggatttcttcgttgatgaatcccatgagttgttcttgaaccgccgcgataaattccttgtgtgtggtcaggttatccctcatgcgaataaactatatgaatgtatgaaattgattagtaattaaacaagaaatcgctacgtaatgaaattttgaatttatttgtacgtacatcgagctctcttgtggtgatgatttggtctgcaaggcagtggcaatactcgcacacgtaatagccgcacaagttagttccctgcttttgctttgtgcactacaaataaatgacaaacaacgagagatctaattaatatacacttgtatgtatttgaatcggagaaatataaatgtagagcatgtgtactcacaggaaatttgaacttccgcctaagtctttctctccatttgccgcggaccaaatgacggaaccgataccaagccctacatggagtttaaagctatgattcgtagtagcaattaacataacaagattttcttaattaacaaaggaacttatgacggtacctgtctataagttcgaaaaccttgtcaaacgtagactcttttttatccattgagtcatatacgttgacggtgcaggcctccaggtcgatgagtaaaagcacccagtggaatctgcaatgtgcgtgggatgcattacatatgaaacacttagcaagttcgtacgggaatgaaatttggtatgtaggaagacagtgaaattaaactaactctgtgttgtatggcaacagtatgaacgtcttgtaatgctgcgccttcaggagatggacgagattgtcctctgtttcttgtggatattggtcgagcattgcgacgtttactttacgagggtcgatgaatccagtatcgaaaaccctccgccgtcgggccctttgaatctccattctacaacgataaaagggagtatattattttctatggtctacttacatacaaggacctaattaattaaaggagacgtatagtaagaaatctaactgaacgatatacttacaaaatccagcaactcataatagagacgtcgagggagtccagctggtatagttcgtagattcccctgaaattgatccagagaatgtcatctccttgcaagaagttagattggtgcgactcctagcaattgatccgtagttagaccggtgtcagtaataaattgttctatcgtcatttctttaccggtcaccaacggcttgatctcctggtttggttgctctccaagctgagggactggtttggactttccagaagatgctttcttcagcgttcgctcatagtccgatagcttgatggcctccttgacagatgcagacatacccctgaagaagttcctgacactagggtctataggaatcttcttttctggacttcgaggcttgaattgtctcttgacttctgatgcaacgtaagcgtcaagctcctcttgcgtgcaatcgtaccccgggtccttgttcttggcggcgtcaactttcgccttcttcgttgcccttgtgtgggtaggcggtggagctggggggcccttgacttaaggtgctggaagaggagcttgcgggggagtaggtgtaggagcacgaggaggagtcggtgcaggatcctgaggaggagtcgatgctggagcctgaggtggagacggtgctggcggagcatgaggaggagacggtgcaggatcctgaggaggagatggcggagccggaggagatggtgcacgagacgccgcttgtcgcccagggaggatgatgtaccgcctgcgtcatagaataatggcatggcatgtgtctcgtagatgcgtctcaccgtctcctccagggtaatccagctcgaggtcctcgtacgcgccttcgaccaactcaactttgaccttcgagtatcctgctggaatcggcctgcagtggtaagtacctgaagggtccgttgggatggctatgcccgacgccaccttcatgttgtgagagattatttattagtaatcaacatatataagcagcaactagcggaatggctaaatcttacctttattgataagatcttgaaagtaatatgcagctcacatggtgtccgctgagtgatgtcatcaacgggacaggtcgattcgtcctgtgtttgcatggcgtccatgctctgtgatcctacctgccccgttgaggcgcagctgctacggtttcctgacgggctcaccattgcaggaggaatggtcggctggggatcatgggaccgatgtgcggccatgcgttcatcaaccttccttgccacctcctcttgcatgttgagttcgtagctcgatacccggaactctaggtctgcaatcttcgcctcggtatctctcttgctcctcatccgactcctgtacgtgtggatgtcctccttgaaaccaatcttccaaggaatcacccctttccctcgagttcgtcctggatgctctggagtctgcagggcgagtgtcagctcgtccctatctctgtctggtcggaacgtgccctaagaggaggcttccactgcatctgttagtcgtcgcgcagcctctcgtatctgatcgccgaagaccagtgagccatcagctgggttgagagttccaccgtgagcatagtaccagaacttcgatcgttccggccaattggctgttgccggttcgatacccctctcaatcaagctagcctccatctgctcccacttcggcatcgcgacgctatagcctcctgaccccaagtggtgatggtacttcttcttggcggcattttctttgtttctttccatcatcacctgcccttgttcacctgtcttatatgcaacgaactcgtcccagtgatcccttagctttgggaatgtgtcgaagttcggtgtctgccccttcagtatatacttctggtacagatctcccttgaagctctgaaactgttctgccattttcttcagagtccaccttttcactttgtcctctgtacccgcaggaagggtgaatgtctcgagcattgtggtccacagcatctctttctccgaatctgggacaaagctctcatgatctccgcgtgcccttgttcttcgccagtacacagtactgacaggcacgttatcccgcacaacccaaccgctgtgacgtacatagttcttggtggcttcggccggggcactaggacgtccatcttcttccacttccgttatgatgtgccgaccctcaagcttcttcgctgcacctcgttgcccgcgtgccctcttctgtccaacggagggttgactaccactagcctcctcctcctggttcccctccacatccctttccacgtgcccctgctggttcccctccgcatccctctccacgttcccttcctctttcaagtactggtttggatcctcgttcccctcttcttcattccagtactggctgcttccctccgcgattgtatcgtacaatatctgttcctcatcgcggtcagccatctgttgatacaagaaacatctgctaagtcacgagacatttatgttttagcaatctaagtcatgtatgctaagtgtaaatgtcgtacattagaaccctacacaaccttacgtgctaaatctaattacaaatcgtgatataagctaagtctaggtgacgtatattatacaaccctagctagtaaataattatatactaagtctaattacaaataaaataatcttatattaaaactcaaataatattacatgctaagactaaaatagtcatgtatatgctaagtgtttcgtgcgtatatgctaagtctaattaagactacaatagtcaactgatcgtaatcctcgtcagtcttgtcctcaactccgacgatttttcttttgcctgggagaacc

SEQ ID NO: 8237 - DNA, 9494 bp, Oryza sativa
ccggcagcgtggcgagctagaggcgggggcgcggcagtggcagtggtgacggcgtcgtcggcggtggcggccacgtcgaagtcagtcgtcggcggtgacggttcaccctggtgtggtagtggcgtcggcaacgaactaggcggcggtggtttggagagagagagagatcgagatcgagagagagagaggcagcagcggcgtttgcggcggaggcggcgaggaccgccaagcaacggcgagagacgacggcggcgtcggctcggggttgccctaggcagtggtggcgaaggagaagccgatatcgatctcaatggaaaaacgtctaagtgttggtggagaagacgagggcgcaccgggaatatatatacccccagatctttactcccggttctaagaacaaccgggactaaagatctctttagtcccggttgttcttacgaaccgggagtaaagatatctttactcccagatgttctcaccaaccgggactaaagatcttttcccgctatttccaaattctttttaaacccggttagggttaagaaccaggactaaagataatagcactgaattttgaatttcattacatatgtgtttctaaaatagtaaataatgcattacaattatttaaagtcgaaaaattaatgacaaaaccttcgaaaaattattgttgtatgcacatgaatgatttaaaattgttaaaaattctcataatcatatataattagcatatgcatgatattaaattgttaaaaattctaattaacatatgtaaataccacatgcatgatttaacattaataaaaattctaataatcatatataattagcatatgcatgatattaaattgttaaaaattctaattaacatatgtaaataccacgtgcatgatttaaaacttttaaaaattctaataatcatatataactagcatatggatgatttcaatttgataaaaattctaataatcaaacataattaacatatgccatacaacaattgatttgtatggatattcaatacatccaaaatagtttacatcgtgtacacaacaattacggcaatacatcggcggtgacggttgaccgcacgtactttctcctcactattgttccctccttgtgatcgctacgtgagtaaggggtgtcttcatttgataggaggatgctagggtcaatcgtcaccgtgaaagggggttgcccatcaaactgatcgtaatcctcatcagtcttgtcctctactccgacgatttttctttttcctgggagaaccacgtggcgcttcggctcgttaggccctttgcccttttttgctttgctagacatgtccttgacataaaaaacttgcgttacatcattggcaaggacaaaaggttcgtccgaatatccaaccttattaaggtcaaccgttgtcatcccactgtcatcaatcgttacgcctccaccagtcaacctaactcattggcactggaacagagggaccttgagaggtacatagtcatgttcccatatgtcctctatggcaccgtaatacgtgccagttgtaccatcgtgtcccatggcatcgatacgaacagcactattctggttcgtgctcttcatgtcttgggccctcatgtagaatgtgtatccaatgatttcatatccctggaatgtcgtgatcgagccagatggtcccctcaccaggaaggccagttgttggttaatcgtctcgttacccatgagatgttgtcgcagccacgcggagaaagtatcaatgtgatgccgtgtaatccatgcatcggacttaccgatgtttctggcgcgaactagagccaagtgctcctcgatgtaaggagccaccaatagagatttttgcagaaccgtgaaatgggctttacggaataataaattgttgtataccgtcattattgctttccttccgagagtcccctttccccgtagtctcccttcatggcgtgattctggtaccccgattgggcgaaggtcttcgataaattcaacgcagaattcaatgacctcctctattccataccccttggtgatgcttgcctctggatgagcacggttactaacatacttcttcagaacgcccatgtacctctcgaaaggaaacatgttgtgtaggtacacaggaccgagaatacggatctctttcacaaggtgacaaagcagatgcgtcattatattgaaaaatgaaggtggaaatatcaactcaaaactgacgagacattgcaccacttcattctgaagggcttctaatctatccggatcgatgaccttctgcgaaattgcgttcatgaatgcacatagctttgttattgttgcccggacattgtctggaaggataccctttattacaactggtagcagttgtgtcatcaacacgtgacagtcatgagactttaggtttgtgaacttcttctccttcgtgcttattattcgcttgatattcgtggagtatccagacggtacctttatgctctccaagcattcaaacatactttccttctctgccttgctaagagtgtagctggctggactcaagtaatggcttcctttctcctttggttccggttgaaggtcgccgcgttgttccatatgcttcagatcattacgtgcttccagtgtatctttcgactttccatatacacctaggaagccaagaaggtttacgcaaaggttcttagtgaggtgcatcacgtcgattgcatggcggacgtccaagaattcccaatagagtaactcccaaaatatagagttctttttccacatcgccgtgtgaccaccttcgctctctatgggctggctgccaggcccctttccaaacactactttaagatctttaaccatagcaaacactgttttcccgctgcgatgtttaggctacgtacggtggtccgccttatgttcaaagtgcttgcctttcttccgtaccgggtggtttgctgcaaggaatcgacgatgaccccatgtacacaaccttcctacaatgcttaagatacgtactttctgtttcatccatacagtgagtgcaagccttgtaccccttgttggactgcccggataggttgctaagtgcaggccaatcgttgatggttatgaactacagcgctcgtaggttaaactcctcctgtttgtcctcgtcccacacggggacaccttccttcttccacaacagtttaagatcttcgaccagtggtcttaggtacacatcgatgtcgttaccagtttgcttgggggcatgaataataatcagcattattatgtatttcctcttcatgcatagccaaggggggaggttgtagatacacatagtaacgggccaagtgctatggccgctgctcatctctccaaaaggattcatgccatccgtacttaaaccaaaccatatgtttcgtgcgtccttttcaaagtctttaaattttctgtcgatgtttcgccactgcgaaccatcggcggagtgtctcagcatcccgtcctgttgacgctcttcaacgtgccatcgcatcattctagcattccccttgttcctgaacaaacgccttagccgtggtattatagggaaataccacatcaccttagcaggaattctcttctttgttagctgcccgtcaacttctcctggatcatctcgtctaatcttgtatcatagcgctttgcaaatagggcatgcttctaggttctcgtactcctcaccacgatataggatacaatcattcggacatgcgtgaatcttctgaacttctagtcctagagggcagactatcttcttagcctcgtacgttgtctcgagcaatttgattccctccagaagaatgttcttgacgagtttcaagaaatcgccaaatgccttgtcactaaccccattttttgccttccattgcaataactccagagtggtatccaactttttgtgcccctgctcacaacctaggtacaacgaagttctgtggtcctctaacatcttgtccaatttatgggcccccttttcactttcgcagtcctccttggcgtcctacaacatctgaccaagatcatccgcaacgtcgttaccatcagcatccctttcctcctcgcccattcgatttccttcaaatccaacatactgagcaaagtccggaatattgtcgtcttccacttcatcttcttccatttcaacaccttgctctccgtgggatgtccaacaattatagcttggcatgaaccccgactcaaacaagtggaaatgaatagtcctggatgcagaatactccttctgattcttacacttattgcatggacaacaaataaaacccctttgcctgttagcttcggccactctcaaaaaataatgcacgccgtcaataaactctttggaccgccggtcagcgtacatccattgccgatccatctaaataaaatgaaaaaaaatcatacacaaataattattcgtataataatgacagtcatacaataattataaaataattacaaactctttcaacagtcatacaataatgacaaatcattattcatacaaaaattatgaaatattacaccaaataattcttatttactatttctaaagttttaaactaatattaatgtgttgtactgcttttaattttcattttagtttgttttctattgtttaagattaaccttcactatattttccttctcaactattttataaaaccttctttagcaaataaactaaatttctatatattctttcttccccacacaaattttctctctcatcaacttacaacaaaattttggagacaaaaaggtgtgcaaaacatagctccaaatgtaatatgacaaaaaaaacattggaggatgaagttgctaactttttaggcacctccgatttgtatataatcaccaaaataaattcactagaaattttggcatgacctcccctcttttctgaagaaattttgaagcttgctcgggctggaggaggaagaagacatatatatataggggtgggactttagtcccggttggtgttatgaaccggggctaaagatcgccgggatctttagtcccggttggtactaaagttatgatatttagtcacagatcccggggggcctgacaagccctgacagcatttgaaccaggactaaagatgatctgttaccaaccgggactaaaagatcaaatatgcccgttacctttttttaaccgggactaaagatcatctttagtcccggtttttgttgcaaccgggactattgtggagttcggccgaccgatgaaagatggtttctccaccagtatgttacgggcaacatatcacagtagtaataataataataataataataataataataataataataataataataataataatatatgagagacattattattttcatatgtataatagttagttgtatatgagatatacgtacgtacgtacataaaaaaacgtaatggctgggtggggtcaggtttcggtattaattttttctttaagataaatataatgagtactctaaatctaatggttgtaataaataaagggttcaccaaatttaatgaaaatcaacagttatttcttagagtgctacatcgcgacttacaatcgattgtagaaagtttcattgagttttagtatataaaaaaactaggaaggtagcctagcttgcgcattcgctcgggcatgcatcgttgtttatctttgagatacttataagagttataagagtgaagtattaactgcataatacttgacacgcttaaaaatacaatttctccataatttttcatcagcattgcttacataattttttaatcctattagttagctttacaccgcacaatattttattcaatttaattcatccatataagaaattataattttgaccatctaaaagaaggtagacttggttgtttacacaacatatatataaaaaattaagtgtaaattatatgtaaggtgttttttaaaaaaaaacaaatgctctctgcattcgtgtcacatcctgatttttgtttcaggatttataaattatttaataaattaataatagaatttatattaaatgatctttaattttcaagtgaagctaaatgtgggaaataaaatttcctaaatataaagcatggatggatttaatttttattaaattctccatgattaagtatactctctgaaatattctcggatttttcagagctcaattcctaaatgatacaaagaacagttcagtaattatttgatcattaatgatctaattatatttgttaagagcttttcttgtttaaaaatccttaaattataaattgttgtttaaaaggaattattagaaatgatcttaaaagcctaaaagagaagatctaattttaatttgttaaatctcaatataaaatggggccagataaaatttcattaaatactttgcttaattctataattcctagatttttctgggatttatttgagctaaggaagtatttttaataaatggaattgcatttcatgaataatttaaattgaaaaaggtttttaaaagtctcttttggctttgggccgaaagtcggcccaaaaccctctctctctccccggcccagtcggcccagttcgccacgccccttcctcctctctctcggccgctgacaggtgggtcccgcctgtcagacttgtcttcctcctcgcgccgccgctgccggccaaaaccctagccgagccgtgcaccgccgctttccaattcgctcgcccctttcccgatccggtgaaatcaatagaggggaaatgatcttctcgatctcctcttccttttctcttttggaatcatcgcctaattcggtttggaaatccgtggattcgagtttgattcggattcgtttttctctctcgaaccctagctttccttctcgccgtcggtcgccgtgggcctccgtcgccgctcgctagcccctttaaaaggatccccggtgcctcctctacccgccgccaccctcgccttcgtctctcgccgtcggaagcgccctagcgccgtgtgaccacgtgccgcagtcgtcgccgctgctccagtcgtgcgccgccgtcgttctggtcgtcgtcgtcgctcggggaggtcgccatcgtggtcgccaagtcgccgccgtcctcgtccgcctcttcgtcgccgccggagaccaccggagcaccgccgtcaccgtcgacccgaaaaccgccgccgtttcttcctcgtcgccggcgccgtccgttgctcttccgccgccgttttggtcaccggtgagttcgccgcgtcgccctctacccgttggtgtcctccgtttgcgtcgtcgcgccgtcgttcgccggcgagcatgcgttgccgagccgccgccggtgctgacgtcatcgctgacgtcatcgggaccgtctgctgtggcccggtcgtggactgtttgatctcggccgttcgttttggataagatcgatctcggccgtccgttcccgtgaaccactgccgtgcacccggtccaccgcaaaccctagccgctgacgcaataaaccccttttccttttcaaaaataattcattattgcgtcataattcaattaaaatctatataagtgttttaatccgatttaatctttaaaaattcataactaattcattgtaactcagtttaatgtggttcaagttgcaaaaattatataaaataaagatctacatattaaaattaaccataaattgaattaagtttatttaattctttttaaatgggctttaaatagatttaatcttgtaaaattcataataaattcatatgaagtcagaatgaggccgttcaagtctcataattcatttaaaattatgatctacatgtttgtttactttttatgtattgtttatttggtttttattagtctttttctttgttttgcgtgttagcttgtcgtttccgtcgttgcgaaggttcgtgagtacgccggaagtattcaagaagattaattgaagaccgattattgcaaggcaagtcacacagatcctaaacacaatactttgagcatgttgatcctatatttaaattctctatttatttcaactgtgcatttagtttcgaatgtcactgggtggtgtgaatctattcctttgttatggcctgcttgcattgattactttattctttgataccttgggttattataacttgactagttgagctatatatattggttcagctagatattagatatgattgcttagccatgcttagaaacattagcacactattgggattacttatgactcattattatttaatgatggcttaatgatagttcacgatggtcaatcgtgattggttaattaattacttgccaactaaaacttgataatggtgggttgtgagcacatggttttgagagtcgtgctcatgacaattaaggaccggttcgcgagctactattgtgaaacattaatcgtgtcaaccacaagccagcgtgggcaacggctttaccttttgtatagcatggttcattgcggagcaccagactgagaagtggtggagataagcccacgggggtcgctggggagtccatgccttgtttataagggggtgactatgatccgggaacggtgcactgtggtgggttgtgttatgcaaggggtaatgtcacagctcctttccgaggtaccgtggtggtactgaggcacatggtgacatgttgtggggctgtgtcttgtgggtacagtggtacacctctggccagagtaaaactattcgaatagccgtgcccgcggttatgggcgggttgagcaatgtttttcgtgattagtctcacacctctcacaataattattgatgctataactagtaataatttgtttagctcctggtttggagttagatctgtacagccgggtatggttgttcaggatggttgggcctgtgcagcatgggtgtgctgttcagtgttgattaaaatttctgattaactactccactgttttatttctcttaaatgttttgctaaatgctgcttttgcaaatgagcctatattatgccatcctttggtacccttgtgcacttgcatatttgctgtgtggcttgttgagtatgtcatatgctcattcttgcaataatcaatcaacctcagttgaagaaaaaggatctaaaaggagaagacgtttggcttataccccagttgagctgcctgtgggagtggagctgaagccatcgctagaccgttattccgctgctgttttcttttcttttgtaagtgtgtaacgttattattatgatggatttgtatattaaattgtcagtttgtgtacctcggctgattcctggacgaggattttatgcacaaattagttcggaaattattagtgaatttccgggcgtgacaattcgcgagtgcatgaaaggaaaaaaatattggttagttttttgcgggcgcatttctaaactgataaatggtgttttttttttcaaaaatgttatatagaaaagttgctttaataaatcatattaatccattttctagt

SEQ ID NO: 8238 - DNA, 683 bp, Oryza sativa
atggactttggtagtccatggttgatgatgagagcgccgtttgggctcatttgcttatatatttcagaattatatacttgctgtccataaattaaaatgatgctagagtaacttgtccttacttattttactcattaatttctcaataaaattagctttatgcaaacgttgaacctagagacccactataggctagaaagcttgcatacttctctctcccttatgtatatataattttgggtaagacttgcgagtacaatcttgtacttaacccggtgtctgcaatttcaggagaggattccggttatgagttatgcttcttgtgtggtcattgctctgctgagggtggcgagggcaatgagtgatctcttgcagcttggctcttgcccggttggtttgccctagtggggttgtggcaccaccgattttatcttttgcctatgaactctaattgagacttctgctgctatatttatgtgttgtatgttgggatcttggaccctattatgtgtcatgtacctgctgcactttaaccctattatggtacttgctatgtttattaattgcttgcgatgaaagtgtgaggctagtcgcattcctacggactagctaagcatgagtaacgggttttgatcgcttgagataatcggggatagtgccttggatcgagtcactggggtatg

SEQ ID NO: 8239 - DNA, 3069 bp, Oryza sativa
tctaaaagcataaacagatctattaacaattgatttagatatgcattagcttcacagtttgatggtagtctaaccttcgttgccaaggcccatctgtggttcagcatataaacatgcttctagctccagcatgaacaatttgattcgaaccccatcagcagtttcatacttcagcttaagatatttatatcttgggattgattctatgctgcgtgcaaacccacaaatgcaatattcttttttttctctgcatcaaacctataggtttgtgcatcgcagaacgatgacaccagactctccattttcgttgggtggctcgcatgctcagggacatccaatcttcagtgtctatgccgtactcatcgcgccactccacatcagcattaacaactgaagcattctccattctaccggcaatgatatcatagataaataaaattcaatagcccatacaagacatagccaatcatatcaacaaacacttcttataaaataccaacatctatctagccatttataacccagccacagttccggattacattttaaaaccatatgccttcaatctttcctctgctattgagtgcaaacttatcactcaacattgctacatctaagaaggcaatcttttgtgtatggaactgacccctccttagtaccaaacaacttcgcaccatcttgtgacttaaacaaaaggatataggattggttaaatgcatttacatttttctaatactcgcatcgcactagtgttgctacagtcagtaccatagcgctagagctatgtgaatccaagttgctctctacagtcgatgaaataaattaaaaaaaacacacacatcagccatactacataccgagacattatgttgcaaataaactacatgaaaacaccaaacgatcctatcatcccattcactggcagtgaaaaaccttacaaaccttgacgcggtgatgcgacaccccagattccactcctccctgtacgttccccaaaatcgcagcctaacctccaccttcaactgccctagatcacgctccagcaacaaaaatccttcggatctacacgcatcggtgcacgcaccagtcaccaccaaacagcggagcaaaggcagcggaacttccgatgagaacaatggaacgaatgaatatcagccgtacaaaaaaggcagaaatagggcatcccaaaacagaaacctaaaaagcccatatacagcctctatgtccatactcgcaggcccataaagcccatgcacctctctcctaattgtctgcgcagtcgcaggtaggccatcatcctttcgctagcaacatactatacaacatagtggctgcacattcagttctgtccagcactgccaaacaagtgctgcgcgcaacgcgcgcgttcgcccctagttcccttaatcacttcatcaacctcctgcattgtgaaaggtcttatcatgtttgttttctcctcctccgaaagtttcagtcccgtctcccatacatgttcactcaaatgcacattcctgcatccttcccttccaaacagattcttataatagtcatatatgtttctgaatttgagagaactcagaaattatatcttccccattctgaagtgaaaaaaaaatgtttcttcctttttttctcccattagccaccccatgaaagaacagtgtgttagcatcccctgtaagatccatttctctcccccatcttaactgccactaaatctcctcctagaaataaatcttctctacttcttttttccagatcatacctttctatccattcctgttcaaatagatccctttcatcagcctttgaatcaatttcaatcagtctctgctcaatcttttttcttctcttttttgtatcactcaacatgttggcaccccaccctcttaaccatctcctcatgcaaggcatcaggagatgccagtaatctaaaacccctttctgaagtctcataggccagcaccccttcagctgatccctaaaaccctattgttggaaccagcccatatcatatctaaaagaattgcttttgcatctgtcttcctctctggtgtccagcaaaatgggacggtgatcagaccccacccttaataaagaacaaactaaggtgagtggatttttttttatcccatgaattagaagcaaagactctgtcaaggaccaccataactggacaattttgtttatttgtccaggtaaacttgccaccaaccctatgaaactcttgaagactatgatcattgatgaacttattaaacatttccatccttctctcatctacaatcccattagatttatctgagctatatatgtatatgttaaaatcacctcccatcaagaaagggtacaatcattgagaaatttcatcccccattttcgccaaaaaaacatctctcccttcctggtgtgcaggtccatatatatactattaaaacatattcatgttacatttattgaacctaattttatattgtggatgttactagtttttttctacaaaattagttaaacttaaaaaaattaactgggaaaaaaaaatcaaagtgactatagatggccatatggcccgagatccgtggcctatcccaaggcacgccattttggcccggcccaagcatgacacggcctgactggggtcgcgcccgtgctgacccggcccgacagtcggggcgtgcctaggctacaccctcagcatggtgggccggcccggtatggcacgatagaagaaaatagtatagggacgaaaaatatacttaaataaccatagaaggcatggcccaaataaaagaggaatacaaaataaacttattttccagctatatgaacatagcccatagagtttagggatgaaaattagacttattgtatggagaagcacgatatactgtcgtgccttcgggccggcctagcacggctggagtcgtattgggccgtgactgggccatgtgtgcagcacgtgggctggcacagcatggcccggcatgtcggttgggccgtgctagcccaattaacctcggcccaggcgggcctagaccatgctgtgtcggacggcccatatgggct

SEQ ID NO: 8240 - DNA, 6488 bp, Oryza sativa
agagggcagtagctcttcgatccaccgtcccccaagcatccaacgctactgatgaatagcacatcactggatctcgttccccacatcactgtccatcaagccattagcgagttctcacgtctcatggtcaacacccccaaatccaatcgccaaatcctggcttcagtgcccgtaggcgtgctacactacaaacagtggacgtgccatgccacgacagtgtgtcgcgggctagcggcaacttggcgatgcaatgatgggcttttggctgctcccgtggtctgtgatataacgctccacaaacatgcaagctcaaattcaacttctatatctcgtaacaaaaaaaacaaattaaccgcaactagttaacgtatattcagagtcaaatttgtttttttcgttgcgagatgtaaaagttaaatttttacatgcatgtttgtggagtgatatatcacgtgtaaatatatcttctcaattttttcatagccatttagatcccaccctaaaattttgatatcaccttaaaatttttcaccctgtcacatcgaacgtttgaacacatgcatgaagtattaaatataggcttaaaaaaataactaattgcacagattacgactaatttgcgagacaaaatttttaagcctaattgctccatgatttgacaatgtggtggtacagtaaacatttgctaatgatggattaattaggcttaataaattcgtctcgtagtttatagacagaatatgtaatttgttttgttattagactacgttccgtatatccgatatgacacgccaagacttttcacccttgtttctaaacaccccctacatccaaacaacgaggatcaaaatccacttccggtctgtgcaccgcggccgcggctcagttcatcgccgtcctgagcgacagcgcggccgcaggcgacctgttcctcggcgccgccatgcacacgcggtacgccaagtcgcacctccctttcagtgctgtcagcatgtgcccacactaggaaagtcggtgaatgttgggagtatttttactaaatgaagcacaaatatggcatcgaaccttgcgaagaacactactctgcatggttgacgtacttgcccgtgccaagaactttgagaaggctgaggagttgattaaagaaatgccttttaagcttagttcaattggttggacttcctcgctgagtgcttgtaggacacatggaatcatggatcttagagcaagagcagccaaagagattctcaatttgactccttacagtgcatcaacacatgtggtgctctcaaatatttatgccactgttggcaaatgggaggaggctgcacaaatccggaaactattgagaaatcggggaatcagaaagaagcctggctgcagctggatagatcttggcagaatagtacatattttcgttgccaatgatatctcacatcctaggatcaaagacgtgtacaaattcttggaggtgatgtcagagaagatgaagcttgcagggtatgttccagataagatatgggccttggcaaaggatcatgctgccggaggggagacaaggctaaggcacaatagcaagaagcttgcactagcatttggtttgattaatacagtagaaggagaacctatacttgtgatgaaaaatctaaggacacgtggagactgtcataatgccatcataatcatctctgccataactttcagacagattactgttagagatgcacatcggttccattgtttcagcgatggaagctgttcctgtggagattattggtgagacagaaaagttgactcaaattcataagaaagatgagattctgttttgtttcaatgattacatcggatgaccatcatagttcttcaccacactagactggaatatagtcaatttggtcaaagtagcagcacgtatgtcaaactttcagcttccctaaaaacttgagttgtcccaattgctactaagatcctcagtagaaaagccattgagctatgaatttatctgaagctaatgactcaactagctcacctcacaacccaccttcatggtataaatcttgtcatcttatcttgcataatagtttttacatgatgaagcatttgctgctcaataaattttataccactattgttttttagggttctctttagttaagatcattaagacattgtactacttggaaggctagtaagctgtgatgattaaaacaatattcaatggtaaagattacatgaaattaactcttgttgacaatagaaagatactaaaattaattgtttgctggataatgcaagtaagatcacttacttgaagaagaaggtgttcctgatgctgccacaggttctccagctttcttgttttagtatatgaacacgagtttagcagacgttgcatcccttcatcagtgtaagactccaacttttgaatttgtagatgcttgatgcttgtactgatattacgattccaattcttcactaattaatagtaagagagaaattgatcttttctcgatacaccactaaaagcagtaataatctactaactagttaagctttttattgcggggatactaacatagttaagctaacaacctttagtaaacaaatggtcatagtactatcagattgtgctcagaaattgttctggaactacaaatgatatgactatgtgtctaaaaccataaaaacagattgtgccttgtgaaaagcagacccaagtgggatccctgatcaaatatcatatgtggaataaatatgtttatatgatcagcacatgtattaattcatgatcatgtctcatggatcatggtatagagataccaaattaataatgtggacacatgttgatgaacatgttggatagacccaacatgagacactgcaagagccatatgtgttgtgtcatcagtgatctcattgagtattggtgttgaatccttagacctgagattatcatggttctcaacatgtgtaatagcttacttagggactgctaaacgctactccgtaattgggtagttataaaagtagttttcgggtatgctatgaaacatgtagtgggatatgaataatcaagatgggatttgcccctcctatggagagatatctctggacccctcgatgttgtagattatggaagtgtatggccatgccaaaggtgattgaggagtcaatcataagttatatagtctatcaacaggttcgagtgaatgattgagctattagaggatggcacatatctagccttgagcttaatcgatatcgtgaggcaaaggggttcatacaagtatatactagaggttcagccgatatgatctttatgtatgcccgatgggtcaataagttctgctacgagccactgttgacgcgtggaccgaaaaggagttttcaggttacagccaagtatacatgaacctacagggtcgcacacttaatgggccggaataagaggattggatagagatccaatatgagcttaattcggatagggatccgaatagtagtcctacgggccttggaggcccgagtgatggatcctatatattcgtgaggggtgtgaccggtggaggtcagagaaaccctagccgtcacttccctacccgagcaaaaccctagccgcgcgcgggtgctagcacatctgcacgtggcgttccgtccctgtacgtgtggatactggtagaggcgccgctggtttgcggtgctgattggcgtgggagtacggcgaagagaacgcacgaggaggagaagccgagccagtgcgatcgactacttcctctacatcgacgcgcgctacttcgcgagagttccttcgacttctcagcgtcttcttccgctgcacagcgcgttgagtggtaacgatctatgatctaatacttgcatggttcctggtttacgcgatagaaaattttgatttatgctatagtagcctacgcgtatcccaacagtggtatcagagccgccttgtatagtttatgatctagatcattgcatataattgatatgcggatgtagtagatgagatgtattatgttgtatatgagttcttaggtgatcggaacatgagatgaaccgatagccacatgggttgatgagatcaatcggtatgtatgttggtgacttcactagaatgtttagtactcaccaacgccgagcgcgagtgtgttcatcggatagtccgatgtccactggaaccgcacgccaatgagaaaaacaagccaatgagattgactcggtttcggcataatttgattacgccgttaaggttttcacccgcgggggacggctctcccctcgaccccctgcccgctaaccggctagcgggaccgccgtgtgcgttgccccttagatttcgcttgggttttattatatctatcttactttattgctgttatatatttgatatgatatggtaggatagattccctcagaaaaattaagtaatttatgctcttccaataattgcacctattacggttgtgatcataagtgatgggtttgccatagcaaagtgtcactttttatcatgataaaataggatagatatcggacatctatatgcggagatcattggtttacttgacaaggttatcaaaacagttttggaccttggggcataggttgggttggacatggagatgtcaccccaatagcacaagagtcacatatgatgtgattagcaaggtgttgcttacctattttgatagttgtctagctgtgatgccaaagcttactagacactaataaaatgaggatcttgactcactatgttactagagggaattttatttcacaatacatagtgggagtatcttttgttaaattgtttaatgaaaggttaaatgtaaacatggtgctgattttgcatgcatatatttctattatagatcatggcagctcctgcaccatccaattttaacttgtggtctattcttgagaaagagaagttgactggaataaacttcatggattggtatcgcaacctgagaattgttctcaggcaagagcacaaagagtttatgcttacacagccttttctagctgacttgcccaacaatgctcctgctgctcaacgtagggagcatgaaaggtgatgcaatgaataccttgatataagctgtctcatgcttgctactatgtcccctgagtttcaaaggcaatatgaggcattggatgctcatacgataatcacgaaactacgtaacatgtttgaggaccaagcaagagctgagaggtttaatacctcaaagtccttgtttgcgtgcatgcttgcagaaggtaatccagtgagcccacatgtgatcaaaatgattggttacaccgagagtctggataagcttggctttccccttagccgagagttgactactgatttgattctccagtcgctccctcccagttttgagccattcataatgaatttcaacatgaacaacctgaacaggaccttggcagaattgcatgggatgctaaagactgccgaggaaagcattaagaaaaactccaaccatgtgatggttatgcataagtgcaagcccaacaacaagaaaagtggtcaaaagagaaagctaaactctgatgagatcacaagtactagcaactctaagaccaaggttcaaaagacagggcccgctaaggatgcagagtgcttcttttgcaaggagacatgtcattggaagagaaactgtatgaaatacctagagcagctcaagcagaagcagcaggatggaaagagttccacctcaggtattaatgttatagaaattaatcttgctacttcctctactgattcttgggtatttgataccgggtcagttgctcacatatgcaaatcgttgcaggggctgaaaagaagtaggagcttagcaagaggcgaagtggacattcgcgtgggcaatggagcaagagtgctgctattgcggtcggcactatgccattatctttaccgtcaggattagttttggaattaaataattgttattgcattccagctttgtgtaagaacgttatctctgcttcttgtttgcaagaagagggttatggttttagatctgtggacaatggttgttcagtctattataatgacattttctatttccatgcacccatgatgaatggcttatacattgtgaatcttgatggatgtttagtctataacattaatgcaaaaaggcaacgtctaatgatttgaatcccacttttatttggcattgtcgcttgggtcatataaatgagaaacacatggagaagcttcatagagatggacttctacactcgtttgattttgaatcatttgagacatgcgaatcttgtttacttggcaaaatgacaaaggcacctttcgcgggtcaaagtgaaagggcaagtgaactattgaaactagtacatactgatgtatgtggaccaatgagctcaactgccagaggtggttttgggtacttcattacctttaccgatgactttagtagatatagttatgtctacttaatgag

SEQ ID NO: 8241 - DNA, 7418 bp, Oryza sativa
atctggagcgccgcgtccatggagccgctcttctcggcgccttctcgccatgcttccatggttcctcctcctcccatctgccgccgcagcacagcaggttttcccgtgatcctaactccaacgtgcaaaactgcagattactacgttctagaaacactgaaatcaactgcgcgtgaaaatttagcgaagaggtgtctgcggcggcggcgacgcgcgagcaggagcagacgctgcgcttattcctccaagacatcgagagatcaatcgtcttcggaatctgcaagaaccccgaaacaacggagttcttccgggaccaccggcgacggctcgacgactacttcgccgccgccaagaacctgctgcagatgttggagcaccccgtcttggcgtacggtgatctgcacaaccgcgcaaaatccctcctcgtcacggccatgggctcccttgcagtggagttgtgccacctcaagatctggaaacctgacgctctggcaagttatctcggttgcacacctacatctatctgggagctcgcgaggtccagctgccgcggaggcggcgacggttctggctctgcctcgtcagcctcatggatgagtacctctcgctcctgctccggcggtagcagcggcccaaacggtgtgagctttgacggatattacatggcactcagtgaggagagaacagtgcgaagtggccaagcttcgtcagttacggccagtcacattgacctcaagtcagtgtccatcctcaacaagattgctgatttcatgattggggtcggacacgaacagatgctccgaggagctttcgatcaacacagtgagcatctggtcaggttcgtatatttattgattcagtatttctgttgatcggttgcttgatctttttgtttctgctagctgattgattgcagcaatcgtttgtcctgcacaagttcttgcagccccaaataattgtacctaggcaaatacagtaattaaattgtactacctatttctttaacttgattatttatacgttttgtaaactttatttcgtttgtgatcttgactaatatggaacaggtacattgaaattcttgacattgataaaattttgggtaaccacatggaggaatccacagaattgctattgaaggtctggacatcgacaatgcggactgtctttagtgttctagatgagatgcgaacgcagttgaatcagaaagaccatggaacattcagttcactaaaggtggactacttctctgcaatcgctaaggaatcagtcatgaagctgcttaactatgctaatgcaatctgcattcaggtgggtccaaatgatccttcctgcagggatactcatgcatcagttaagcattttccatccaaaatggtcaatctgttgattatgttccaggcattggagtatgccaagatggaaatcttagatttgttcttgggtcaaactaagggtcccattttaatggaaattgaaaggcttacaaatggattgtcagcagtttttcttgtgctgttggttgaactaaatggtttgctcaggtcacaacatttggtcatttctaacacgggtgtccatcatgttacacagcatattatgggtcttatgcggttgctggttgaacaaaaggacaaagtccatatgatgctaaacgataatccagataaatttggtcaagtagtgactcaactgatctcatccttggagtttatgttggacatgaactctaggagtttggcactccaagggcagcaactggtgttccttctgaacaatataaacttcgtgcttgagcaagctaacaattatactgatctgaagctgattctaggagaaagctggtgcttgcaacgccatgtccaacttgatcagttcttggcaagctatgtcgaagcttcttggacacctgtgatgtcatcattcataataactcgaattcctaaaattttatggccccagcaattgttcgataagttcaattctcgttttgagatgacctacaatgtgcagaagacatggaaggtcacggatcctgtgattcgacagaagctgcgtgagaagatcacccagaaggttatcccattgtaccgaatgtacttggagagctactcggacaagaagcaaaagtctgcgaggttcaatgttgagcaccttgaggctcgattgctggaaatattcgaggggtaaatgaaagatgtgtctgtgcagtaaatgaaagacatttaggacgatgtgttactgtaaaaagttgtgggtgaacttcttggatagtactattgtttgaaagacttagattaatgctctactagtttacttaattggaaaatgtaaatattttgttttagaggtaagactactcaaacaagtattcgtaaatttacccctccttactttccagggttgtacttgtaattgaaatactatacattttttttctctaaatgatactacctccgtttttaacatataatgcaagttgattttttaattcatttgattaattctctttgaaatatttatgcaaataaacaaatatataatgcacatttataatacttttgatggcaaatttagtgatacttttccagtttagttacttattaattaagtgattgaataaatattattagtcaaatttgaataaaagttgacaatgtcctatattaaaaaacaagtatagtaaccaattacgaaaatttggcaaggggaaaggatgagtccaaattgctacaaccaccaaatctgatgtgagagagattttttttatttctatttttttttatttttctactacttgaaaacggagtcatccttctccttcctcaccatcattgttcttgcagaacgatactaccccagcaaaacaatacgtgcccctttaatttgaacggaaaacataggattctttttaagattcatcttttttctatatgatcctttgaaacttgaaaactattgaatcctataaaattcctcaggaataccgcaatccatacaagttttataagatttttaacataaggtcccacctcacggaaagtttcctatgactctatctgtcccatccaattgctacatttttccaatccaatcaaacaatcttctgttttgagcttgaattcaatcgtatgtttttaactatttctccctttttctcgaggacaatgctttctatcggacgcctgattcccggagaataaatcgggtgctgcccttggagcgaggtcacgaagcatctttctgttagcattaaaagccatgcatccatccctctccctctctttctttgcatgcacagagccacaaccactctctctttctgcatacatgcatgtaagttgctacttgctagtatggtttatataattttttctcttaaaatatttatctgatgtgcaatcgaattacattattatatttattataattaaatttttataacaagacctcacattattatattctaatcaaagaaaattacatgcttcatatgttaaaatttgatgtttcatacgttagagagaaatgtttcaactttcaacaaccctctatgtgtttcgatgatgtttcaatagcactttctgatgtttcactaatgcatttacaaaagttgcactcgatgtttttgatgttttagtaagtattttataatgtttgatatttttttatcaaaatataatcatgtgatattttgttgtaaagatttatttacaataaatataatgggtacaatcagaatatatattagataaatactttagaagaaaaaaaatgattcaaaagcttgtttagaaagttgatagagagataggagtatatcacgtaggggtataactactaaacaatatatggtatgggagtttgtatgagcataatagcgctaagggcactcaccgtgcgtatgcatatcttgcagggaagagcatctgatttgtgagaaaaaaaaatcagagtgttcaagtagcctgtaaacagtggtgaagccatcgagggtgttgggttggcatggcaccccaatgccaccccaccctgggtaattagccaccagtttagcatataatgtcatgggattagctgcaaaataaagcagctagctagctgcccaatatttcttccttagattacttgtttacattattaattaagagaaaaatctaataaatgtcattgacaagctgcccaatagttcttacttagattacttgtttaaattgattagtcaattaaattggtgtaatatagcgaccttattttaaaatggtattttttagatatattctactgttcatatagacatatatgaacagaaaatgtgtgttgaaagacgtccagaaccacatcaagaaacatcatataatccttataattataaaaggtcattggacatattaaatttactagttaggtacccatgcgttgcaatgggaaatatttatataaattcatatatactctatcacttgtctctctctcgccccctctctctcgggccgtcggcgcgggtcgagcggcggcggcagcgggtggtcgacgtccgtggccagacagcatgggtcggctccggcacgatgctcgacgaggtgtactacgccatcgccaacaagacctcccgcctcgggttccccgaaagtgtcagcctgacggtcggcatcagcgggtacctcagcggcggtggctttgacctgatgctgcggaagcacacggcctcgccttcgaccacgtccacgacgccaccatggtggacaccaagggaaggctcctcgacaggccgccatggaggaggacctcttctaggccatccgaggcggaggcggcggaaacttcgggatcgtcttgtcctggaagctccggcttgtccccgttccggccaccgtcacggtgttcaccgtccaccgctcaagaaactagtctgccaccaacctcctcatcaagtggcagcgcgtggcgccgtcccttcccaacgacaccttcctccgcgtcgttgtgcccctgtacctcggcacacgcgccggcctcgtcgccgccatggccgacaccttcccggagctcaacgtgacggtgagcgactgcaccgagtgacgtggatccagttcgtgctctacttcgtgttctacagcacggggaagccatcggagatgctcctggacaggggcaacggcatcggagatccattggggtcatggatgcgattggcgaggtcgtcgtagtggtcgatcgggccgttgtcaatgaagaagtcgacgccatcgccgccgccgcctcgcctcgcttcctccgcagccacgctcttccattgtcgcctcgcctcctctgtcgtgcttgcgaagccgacctcgctgccgtagcctcgcctcatcccgagctccgcctccagcctcctccgccaccagccaccaccctcatcccgagcgccatcccgaccagtggcggaggcggaggcggcggctggaggcggagttcgccgccgccgcctctgcgtcccgtgtggtcgctgcctccgtgtcccttgccgccgctgctcccttccggaccacaacgccaaacgccttcctgccgccgcaccgtgcgtgctgtcttgagtgccgacatccgcaccgccgtcctcaccgatcgcccgtccctgcgccatcctcaccgaccgcccacgcccaccgcccgtccttgccgtgcgcgctgcaagagagagagaggaagagcgagagaggagagagagaggaagaggggaagaagagtatgataggtgggtcccacatttttttattaaataaatgctgaatagctactaagtacatagacttttctataaacttaattaaacttttaagaagtttgactgcagaaaatcaaaacgacttctaatatgaaacgaagagagtattaatttaaatccatagctaactgtagtttttttttccagagcaccatatttacaatctcaattcacaattaaattttacaagagtgtataaaatatagacaaacaaattctccccaggtttccacacatgacaaagaagttcaaccgatttcatcacattgtgccagtaatcaaatcacagaaatctaacagttcacacatcacactcatattgtacaggacaaaaatgtgaaccgattccatcacacatccaatcaataccattcaaaatcatagttagtcagttagtggccaagttcagttggtggaactccacataaagattcaaagtgcagacctagaaggtgtattaatcagtgaacaactgctatagttacatcacaatatatcgcagaaaggtacagaaaattattggacaagagattatatgaatagatgcaaacatattaattccatgagaacaactgtattgccaatacagattactgaaacaccaatagtagcaggaagttccacatcctatctaatttcaaaatatggtataaaataatatttgcagatttaaacagaatttctgcccagaacatgaatcccagggatataaatctgattgttctaattggtcctctgtgacccttatacatgtgaacgcatatttttttgctttcatcccaaatcctagctaagatctgtatctaaagaacaagatgcacgggcatattactacgtcgttgaccaggggatcatcctccaagtatatgacttcaatagtccaagatttttaatttgtcacttctaaacctttgagagaaaaatagcccagcaaacaacggcacatttttgtgctaatgcactgttatttgaatgcaattttttaaaaaggaactaaagcatggcttgcttaaaataggtcacattttatgagcaaaatgatcacgttttaaaaaaagaaaaaataatcgggcgtttgttaatagtaaatcattaaatttctcaaaaaaattatatatttgcaagagggcataagaaaggaagacatgggcgaaattagcatgcaaagagtgcatcatttgagtcaataacatgcacatggctaacctgattttgtacttgatggtgtggagcccccaacaatcttaaccatttctgaaaataaatgagatgatagatcaaatattatgaatttgtgaaacaaccaacagaaatatgcagtgcacacgtttcattgatgacgaggctagcatcttattatgcatctgtttgatagatcaaaaatagagagaaaatagtgaacaaaaaagaatatcaaactactccccaggtttcctcacgtgacaaaatagttcaaacgattgaatggcatctcattgttctaattgctcctctatttaagtatcttaaaaacaagatgcaatggagtgagacactcaactttcgagtcctgatagtacatctcaagaattttagaacaatagtaaaagctcgaaaattcagcagtaaactttcaagtgtacagggcatctttagaaattcatag

SEQ ID NO: 8242 - DNA, 26936 bp, Oryza sativa
agaatgagaaattgaagaaaaagaattacgcaatcaagttgcaggagttcaatagtatatgcagtacttgtcatatgagggctgaaaatgcttgccttggaactgaggtttgttaaatgatctctccaaactcatgctagaattttttgtggtatgttttttctacatagaatccgtattttagattgtgaacgtttccaccaacttgataaatttgagcatcggatattgggaacatatttctttcggtattccccatatttctttcggtatttcctactgtccatcttggcttctgagctgattttttcatgccggcaggcaaagggtgctcttcggtaatccctatcccaaaagttacctaatgatttctaaaataggaagtacattatcttgttcataaggctcacatcaactcgtataaactggttcctgtttcacagcaatccctactagtacagtagacttcattttttttctaattcaataaatcacatatatttgtactatcacttaaactactagttagtacaatattttttatagtgatagtagtactcgtaaattaagaatcgagatcatttctaccggtaataatactgatagtagatatattattagtagagggctagaggccacagcagaggtacttaaaatctacatataacctatcaaatagccccatccatttccatgcgtgtgcgttacgactagctaggaacacacgtgggtggacgtggacctgcgctaacacaattaaccgggttctgcgctgggataggccactacacaatgtcaaaacattacagccgggcggtagtcaggcaatatctttgtacagataatcggatgatataacttatcgacgaaccaacattcggcaattccaattttgttgaccgaaaagcagtaggaaattgtctaaatttttcctgataagctatcgatcggcatttaaacttcacattaatagccggttggcaaaaacttgtcgacaccagctcactcaacaaaaaaataactatagtcaatgggggcaaccgttggaatttctgtttcatacctaattcattccctgggcatatgatctaaaattcatagaactacactactattggaaacatatgacaagtgcggaatgtaggatcaataattctatagatatgttcatctcttatttcccaatcactgtgtctaacaaatctgaacaactgttcagtttgtttgtagtgatgtatacttttgcattgcagttgagtcagtacacaaagttctagttcattccctcatcattcctgctagagatttgatgccatgaaatgtgaacttatgtgcagattcaacgcctttatgcccgtgctacaaaccaggagactgaagcacaacctgaagaagtggaccttccattcccccctacagctgggtctcaggaaggagcaccactcaaccaagatgaaccagcaccaccgtccaagtaggcctcgttggcatggcttctttgatctctcctcttatgtccctgtggtattcccagtgctttttaacaattgtggctgcgtcaatatgttgatgaactatggaaataccaacaggagcagaagtgtgggggatcaggaggcttggccggccttagcctttatatttatgcaatggaattaaaaactagcaataaattcagtactatgtgtgtgccaatcccaaaataaaattatgtactacagttgagcacctaaactctgcttaattggaagatggtatatcttctctattaattacatttcggacatgctatatggtattccattttgctcgttcagttgaagtcgttttttacttcttttgctattgctaagtttttctttcgaggactattgctaattttttttttagctagctatgtgctaaagcgtttgctcttgagaattacagtagtccaatcctaccaaattatcactgcttgtcttactagtgttggcaatcttcagagataaacccagcgctgatcatcttcaagtttcagagtcctgtgttgtcacttacggcttgtttggtaacttgagggaaggggattgagagtttccacgagggaatgagattaagatgggaatttgatttttcatcctagactcttgtttggaagaggtggtggaaattgatatggagtttagttggagattaggtcattaatgaaaacggatggctgagatttatttaggcgaagtaaaggaggaattccctcccaattaccaccccctacccaggtattgaaaaggagggagttcattcctcaattcctcatccccagcccactaaaattcccatgtctcccaactaaacaaaagagttaataacttcatccctctaaactcccaatccctcctaaaaactcccccaaccaaaacgggccatgcgcgtctgttgtcgttccaattttttcgtcgtgtcagtttggagtctgttatcttcgtgctagttcacgccgggagtttgttgcgtctttgtagcgttgtacatgcaccacaatcgctcgtgtgggatggcatgaagtcgaagtgctcgatcgtgtgcgcgcgatcgttggccacttggcctctcggccacttcttcattcagtaacaaataaaaggagagaaaatcggtaagcagcatgcaagtttgctgcataaaacttcatcgtgagttggtaattcctctctcgcgtgtgtttgttttcgccttgggaattctccgctccaggtcgccggcatcaagggacgctggcaagatttgggatcagagccatgacggcccgacgccgaccatctagaggagctctcctcgacggcagcgtccgtatctctcgctctcctccacgccatggtcgccgcctcgctgacggtgatcagcagatggtggtccagcgcattttgaaggaagtgagtggccgactcaatgatgtgaccattactactattgatacaactattcctcacatcatagttcaaccgaaagacatcaagatcaaacagtccaagttcaggaatccaattcagcttcctgctacagtgctgaattcaaacggccatgaaatgtgcatacgagctccgttttgggtatctgagtacttgatggtaagctcttggagttctcttttcaacgaattcaaccttatctccgaatcatagaaacaatgtgttgcgtcaacattgtaatgggactatggacttataacttcgtctgggaccctggcccatgtagggtgtgccccaaccatttagttaagaatcgacacctataattgtggacataggtgccgataaattggtgtcggctaaaaaaatcattacctaaaataaattcccaaacagtacctatgtctgtttatatagtagtgagaggttgttcagcaactatgcctgtttctgcagtagtgagaggttattgggcatgctctagcaacggcaaagcgatagggtgtgtatacggttcaattcgaaatgaatagtgtagggaataatagtatacttcctctaacggtcatcaccacaattattttatcactaactacttcaatttaaaacttagggtgaatagctcaagtggtcctccaagtttcatccaaggctcagtttagtccttgatgtttcaatctattcatattagtccttcaagttttcattttagttaaacttatccttgaacccacttagaagccacatggccaaacataaccaataattcttttgataaatgactcttatacccccacattcacatatataagagaaaaaattgcatgtaataaatttttttatagataatgcatagtaatttatgtaaagcaaaaataaattacgaactcgcaagtgtatatgatagtcattgcttaagtttcatatgcacatattgaaataatgggaagtacatatgcgatattgtttgttcatcttagttttctcttttctagtgtatagttgtatacaaattaagggtaaaaggggcattttctaatgtaaatattgacaagaaatagacatatgacttattatgtgggtccaagatgattttaagccaaaacaaatacttaggggatctatgtggacaaaatgaaacttaaaggaccaaattgagccttaaatgaaacttgagggactaaactagctattcaccctaaaacttataaaaagcataggaaagttataatggttttaaacgtattttgaagaaaaattgaataattgatcatcaaactttgaacacatcaacttcacctattccaaagcatcacttattcatgatttcatggtgtaacactactggaatcagatttaatatgaatttttatcaattgccaataaaaaagatacttcctgcgtaaaaaggtattttcgaatggagggatggaacctgtaccgtaacttataacgctcccgatcaacactttggtgtggtaggtgccagcgcggcagcacgccaacgtaccaccaaccgatttgacgcagggactaattaagacaaatataattcaaatgtgtacgccagaaacacactacttaaaaaacgatttttttacgagaacccataatttttataaatggagcataactcttaagacacctgtataaaaaaattgatttttccatacaaaaatgaaatgagcccatttttgcatgcggatcacttaagagcccacatatgaaaatcgatttttccatacaagcgtcataaggagccatatgcaaaaataaaatttgaaactagtttatctcactcatatgaacttcaaattggattattctttttcctaattttttctaaaatcatgctatatcatgttattgtgttcttactgctattattttagccattttttcttgtgactttgtttatcaattaaaaatttgaatttcaaaaaataacaacttctaataatattttgaagcagtaaataatttcatttgaaaaagtcatgaatataaaagttgtagaactcatcaagatatacaacttttatttttatcatttttatatccaataaagtgatagtaagattgtttacagaatttgcatatctctcttttagtttataaaaccatacgagatatacgtaaaattcgtgaacaatattactaccactttgtaggatgaagaaatgactaaaataaaagttacagatactgatgagctttgttgttgatgactatttcagttgaaattatttagtattcaaaaatatagtttgaagttgtcatattttgaaattcaaattcaaattgttgaaacaaagtcatatagaaaaatgaccaaatcaaaacttgtagatattgttgtgttatacaactttgttgttgataatttttccatttgaaatcatttactatccgaaaaactatttgaatttattatattttaaaattcaaattttatatagttcaaccaaactcggatggagaaatgaccaaaagaaaaattggtagatctcactgagttctacaactttgtttttaacaactttttcacatgagttcatttagtattgtaaaattcgattcgaagtctaaagagccgcatgattttttttgcatgcggaccacttaagagacccgtatgcgaaaatcgatttttacatactagcctcttagagagtcttctacaagtccaacttacctcctatttccctctcaatagttcaaaaattttcaactctcctctctcttcgccggccaaccttatattctcgtctctctgactcgcctcttcacctactatcctttcttctcgatctaagccggcggtgggcagtggggcgcaacagcgggcagttttggctgcgagcgacggctgtgccccgcacggaggccggtggaagaggtgcccgacgactcccccgcgcggatctggggacgacgggccttcccagcgcggattcggggacgaccactcttcccccacgcggatccggcggaggtgccctcccccgcgacgacgatgacctcgacaacgatgacgacctccggcgacgcggatttcggcggcagcggtgggcgagggccacattgagggcgggcgtgggcgacggcggcggccctcccccgcccggaaccaccgaccaccgcccttccccgccctgattcgccagcggcggtccttccctgttctaatctaccggccgccgccctgccttgcccagatccgcaggctgtcgcccttccccgccccgattcaccggcggtggccctcccggtgccctctcgccatgatgcgagagaacgatgacgtcgacgatagcggcaacggctcgaggacgacggcgaaggcgactgaaacttctatttttttcgcgatttttcccttttcgcatgcggccggcttaagcggccgcaagtaaaaatcgtgatttttgcagaccttttcacgcacgcgggccgcccaaccaccgaaaatgcttcttgcctgtttgcaaaaacggttttcattgttgtgatgagaagctcttttgatcctttctatcccacgaaaaaccaacttaatactgaatatgacacatattaatactatgaatctgaacatatttatctgaacatatttttatctagattcgcgttgtatttatcacgttcggttaaaaatgagtatagaattaaacccggctctatcaatatataacacaaatttcttgccttctctttaaaaaagcatatatagaatttactttagacttgtattgtacataccaaagggatccctaccgtatacgcgtaatatactcgtactgtatatgtctaccatgtaaaatgtaaaatactatgtaattacatctggtcgccacataccgctgcgctagctcattctacaccgccgtcgtccgagctcacggccgccgctgttacctgtctgacttgtctccggccacacaataaaactgagccggtgacctcaacgcgcgcggccgcgccactcaccacgaggctagtcagaactaccatacagctcatatgctaacacaagaacagaaagggaacaaaacaataagcaagagaagcacggacgggagcctactactactccagccgcagcatgcggcggaggtcgcgcgtcgcggcgtcatcgacggcggctgtgacggcggccttcctgaacgggaactgcggcagcggcacagagctcggctcgggggacacggagaacgccggcccggcgtacacctccaccgctacaggcctcgcggccgccttcctggcggcggaggagcccctgccctgacgtctccggcttcccgccgtcgtcggcttggtcctcgcatcgctctgatggttgttggccgtcctctggtgcgtggcggcggtggcacggatcctccgctgcgccggggaaggcaggagcacgttgtgcgggcgcagcacctcggtggccatatcaatggaggacgaggagaagaaagaagaagaggaggaaaaggttgggagtacagaacttggaagttgaaattggattggaggggtggaatggatgagaagaagaatgggtcttataggatggagaagaggattggagtggattcggtatttcggtggacgcgttgttgtggtggtgggctccgcctccgccggtgtggtggactttgacggtttcctcctcatttcgcctcagcagaaagctggtggagtggtgggttgtgggataacggcaggttcgcgtcggtttcgccggtcaaagctggaagccccgattgctctgcgtttcttggtgtacccgcccaatttgcacaccagattgttacattttctctttttgcgtttgtactccctccgtttcacaatgtaagactttctagcattgcccacatttatatagatgttaataaatctacacatatatagattcattaacatctatatgtatgtgggcaatggacaatgctagaaagtcttacattgtgaaacagaggaagtaggttagtcctagaccataagagcatgctataggttaactataatgacatatcgagaagataaaagaggagagaaaaatagcgagctacaaatttatagctagctataacacagactctaagacgcaatatgtatatgataggtagggtcaggtattaatagtgtacaatatatttatatgtaactagtgtatgaattagctacaacatcatccaaattaaaaaaataagtggcatgaataataattagctataacaacatgcttaccaacctcgaacatatctgttaaagtcattgttaaagtcatttttagtctgtagtgatgcacgaataataagtatcagtagaaaaatgactttaacagctgtgtttggggttggtaaacatgctgctggggaaatatgaaaaggctggtttttttagcttttcgattctaatttattttctgaattttgcagttattgattctcataatcatgtaagaacctatatattatttggggaagctggggattcttatagaaattatagctggaaaaaagtacaaataataccataaaggttgcacacatcgattgagctactaggttttaatgtgacttgcactttggaagctcgctccaatcgaaaaattttcgaaggaaacaatcgaaaatgatttatgagtgaagtttttatatggtattaataatttaaaagttaatgctagaaaatagatcatgataaaaaaaaccacccaaaaatcaaagaatttaaagggatcccactccttcggacattgatccctattaggacaatatttgcagttatgtgccattctgttacatatatgtcccttaagtactttactagcattatagttgacaaagacaataaaacacatgtaagaacaccatatataatatgttaaaactacgagtgaaatactgtattgtcgagtagtcaaccgtgcatgtctgctggtgtgtacgcattgcaaattgcagtgctagtgcaagcaaaagccccagccggcatgttgtaagctgtctgctggactgctgatgccgcggtccggcgcaagttgggtcaggtcggcttcggaataaacctcgtgcctcatcagcagctcagcgccgtgcatccctcccggtcaattcaggtcatcaccgcgttatagattggcatcacgcgtcaccaaccttatcgacgatggttcactgcttcactgctgccgtgcctatacttccatgcatgccactaactccgttaattactctcaatactgactctgattctggaggaaactttaactggacaactaataattttcgtataataaatctatagatactttcctacatgtatattagatcggtcaaacttcaacaagttttaatctcgtaggatatcaagtagagaagaaatcagacgtgcataaatatatatcctaaaagaaatttgagaacaagtaacatcaacatggacgttttttcaagataatagaataacattcctgcctttactcaatgagttacaaccaattattacagcctaacactcaaatgaatgcacttcaaatataattataaaaataaaatggcaccaatcataaaaaagaaacaaaccaaatactaccaacccaagataaagagtacacaattattgaattatgtatatgaacctccatccgaaattgacaaacaaatgcataaccattgtctcaaagattagacatgcaacctttaaaagctcgccatcttcatcatacctttgtagttgtgtctaagatctgagccaatatgttgccttgaaaattacctgaatatataaaatagatggtgttttgttaaaaatcttatcattcctacttaatcatagagcctaacatattgcagatgccctaataagtataagttttctacttttcttgtccactccccgaagccaatcataaaaaatatgagatatgctattaagagggtatagaccaaaagaaaattgaactactttctaaataaattttgcataatgacattccaaaaacagatgttgaatggacccctttttcatacagaaacaacatatcaaacttccattccaatttctcaacatggatgtaactacacagttcttgctttcgtaatagtctaaacacgtgacacaattatttccataattagtatcatgttcaaccgagtacgctctccgaaagcagatgtgtctaattagtaatccatctctttttcacgtgggaatatgcaagcatgcaacaggaaaagatactactaatagctaagttttgaataaacttttctttcaaattaaatatccaatctacaattcaattataacattctattcgttttaattaaatctttatagaaagatcttacatgcttatatttcgatgaaaaaagatatatgttataaattagttttattatacgtaaattacttttaggttttcttagaaatttatgaaaggaaatttaataaagcctaaaagtaagtcacacaaatcatatataattacttctaaatttcattctttttttaaaatcatctagcaatatcagattgttacttttaatatatgaaaagttacttctatttctctacatagttacttccactactagtattttgttataatgtaattatttttctagagttattttacttctaatcatgaagggttacttctatttttgactttctatacgatgaaattactatttttttaaaaaataatatagtgattacttcaaaaataaagaaaataattttatttgctcgtgaatattctttgcattttacttcacatactttcttatttcaacctcgtccactatgtttactttcaatgcaacgaaaagttactttacttcttgggtttaagtaaattacttttgaatgcttatataaattcaatattagactcgttttgtgatatattttgagtgaagtgcgatggttagaacggatttaaaaaaaataatacatggtttaaaacatataagtgttcaaaggttttgtaccaaaatatgagctaatgcaaaggagggctagtggagttggtgttgcacaaattttgacaatttgaccctttgtaaaaactatttttacaaataaaccgctgccaaaacttatttcaaatctgacccttttgctcaacgccaaatcgtgtggcgctgaatttacacacctcaatgccaaatagtatagcgctgaatgtacgttggcatacggacttagtctcctatccgtcgtggtacggcattaagtgccagctgacgtggcgctaaggtgtctaagttctacgccacatgatttggcgttgagtaaaagggtcagactttaaataagttttggcagtggttcatttgtaaatatagtttttacaaagggtcaaattgtcaaaatttatgttggtgttgcccccaaaacatgaatagttgtcctttttcgcgctaaagcctctcggtaaagttgatcagatggccctgcacatatgcgtcacttgatcggatggctcacacatatgtcgctcgataggtccagatcaagagagcgcgcacgcaatagattttgcctatcaaacatgtcaggaggtgcattttattagagcctaccattattatttgtcagagcatgtatctctaacattattatttttgttaaaattttggaacatcatccgtgtttgattaggtttcgagtatctcctattttacttccatatgttttttgtccgacaatagcgctaggtcgcagcctcacgcgggatcggttccgtttccacgcgacgccccgcacaggaatacacaatcactccatcatcctggacaagattgtggtggtttcagcatgggaccaactgaaacagaacaaagtagtaaaagctaatccagttcgtttaagttctggccgagtcatcttcgagacaaatcatcactaattgacatatatatatatatatatatatatatatatatatatatatatatatatatatatatatatatatatatgcacgagcgaggagagcatatcgatcacaggccttcatatggctgctctttgattagctgaggaaattatccgaatagtatatattattcttagcgataaatatgtcggtgcagtgccttgcaaaagtgtacgtacaacatcttggatcttgaggatggtataactaattaaaattgatctctaaatctcactagtacagatccttctatctgtgacggtctctaacatacctgaaaatagcaggccgtcacaagaaagtcatctcaattgggccgaaaaagtacctgattgagatatggtcgcacatacatattagatgggcataaaacttaagcccgtcacggatgacacctatcagtgacgagccgtagtttagatccgattgagataacattccatatctcaaacgggtttgaagttggggcccgtcacaaatgaccatcatccatgatgggcaccaactttatgcccgattaagataacattccatatctcaaacgggacttaagttggggccgtcacagatgaccatcatccgtgacgtacaccaacttaaggcccgtcacagatgactcatcagtaacgggctacatactaattttcggttgacatgacttaatctctatcgggcattaattaaatcccgtcaccgatgagtatttttttcatttttcgtatgaaatgtttatatttgtaagttgaattatagcaaaataattaacttgcagtataataatttattttacgagtcaaaataattttacgggtagtaaataatatcaaatggaaaagtgatcaacaacaaagttgtataactcatcaagaactataacttttattttggtcatttttctatataacattttttgaacagcttgaattggaatttgaaaatatgacaacttcaaacaacattttcaaatactaaatgatttcaactgaaaaagttatcaataacaaaattgaataactcatcaagatctataacttttattttggtcatttttctatataacattttttgaaccgtttgaatttgaatttaaaaataagataatttcaaacaacatttttaaatactaaatgatttcaactaaagaagttatcaacaacaaagttgaataactcatcaagatctaaaacttttattttggtcatttcttcatctgataaaatgttagtaacattgttaacaaattttacatatatgcgtatattttataaattagataggagatatgtcaattttgtgaacaatattactatcactttatcagatgaataaatgaccaaaataaaagttataaatcttgatgagttattcaactttgttgttgataactttttcaattgaaatcatttagtgtttgaaaatgttgtttgaagttgtcgtattttctaattcaaattcaaacggttcaaaaaatgttatatagaaaaatgaccaaaataaaagttatagatcttgatgagttattcaacttggttgttgatgactttttgagttgaagtcgttcactaacaaaaaattctatttgaatttctcaaactttgaatttcaaatttcaaattttttaaatagagtcagatggagaaatgaccaaaataaaaattttgcacctcgatgagctctacaactaactttggtttcggtgacttttccatttgaaatcatttattaaccctaatttttcttcgaagttgtcaaattttgaaaattcaaaatttgaattgttcaaataaacttatttgtacaaaggaccgatagatctcgatgagttatacaattttgttgtttatgatttttgatggttgtgtatgtgaatgaatgtatatgaatgggggatgttggggtatgacatatcccggcctaggacttaataggattaatagaatactcataccaacaagttacaactactcttccggaagccgatctccaaagaactttgtagtgaacttcccgggtgcacacgagtaaggacaaaaaaaagattggcctgagaggggcgggacggcatggcaaggctagccaaaaataaaatatttttttttgggattatactcatctgtgacggacattaacttaggcccgattgagatgactcatctgtgacaggctatagttaatgcccatcacagataaggatcatctgtgacgggctatagtttaggcccgattgagataggtcattcgtgacgggctatagtttgacatgtcgtctgggtcaagactatcactccccgattgagataggttcatccatgacggccatttgcccgattgagataacttttcacatagtgacttctaacctgtgacggacgccgtgcccgattaagatgggggttgccgcccgattgagatgatggtatccgttctagtgtctatatctctatctattctattctctactatatctatatctatatctattctctatccgtgtatgagtcgatttttaagttcgttcgcttttgaaaatatatatccgtatttgagtcgatttttaaattcgttcgcttctagaaatactaaaaggaatcgtataagaaatctatttaaaaaaactcacatgctaactggagacgatcggactactaactacagctcatgattatatgtatatatcgaagcgaattcccatagtgaatttcaccttaactaaaccgtttaaaataataagattaaaatagccttcacccgttgcaacgcaccggcattttttctaataatatacatatatgttgatatattgtcacatattccaggaaaaaaatattgtcgcatgctaaagaaataatccctaaagcatttttcttaaagaaaggtattcctagactgccttccgtatttgcttgtaggcaaaatttgccataggacatccaaaatttgtgtaattggttggaggacaccgtaagccactgctgaggaacaccaccaaaggtctaattggctataggacgctggaagcattattttatgatatttgggaaaagcttatagagagaaatttaaaagggacaagtttgccctgcatgctctttctccacctggccacggcgcagcggcacgctgcacagggaggccggtgcaggtgcgagcacgcaccgagatggggaggcagtggcagcgagtagagataaggaggaaagggtgggcggctcgggatgggggcggagatggagcaaagctcaccaggcacaacggaggcgcggacgggatgcggacaggttcggcaaagtcagtggtggcttcgctggtactttgagaggtcctggctaacgcctagcgatggcggtcaggaggagaggggggtcccgagcgctgtttataagccatcgggggagaggagccgtggaggagctcggccggcaccatcaatggccccgatttgccggcggccaaatgacaaccaattaattcgcacaacgccgttcgtggggaaattatggggaaatagagaggacggaatgggagcaaaacccgccaatcctttcttttcttcctatataattggaaccctttaagtgcaatgattgctataaagaatatctctcagctagccacgtcatcagaatcatctcagccattaaatcaacgtgtctttgatgctaaaccattagatcaactaacctccgatgctaatagaaataaatcaggcctgatcaactcccctacacagaatgtgagacagtgcaagacacctgctgattgtcgcacctgaacccattctgcgtgacgtgatattgtctcaagactaaatcatggttctcgatgtttttagtcatcagaacatttcgcatacatcttcgcagccatccagtagtatctcagtacaataaaacgcaagtcagtttgggaatatacctgggttgctttgctcattgaatcgcatatgttcgatacacattgaaatgaaaaatggacgtttaggcacaattttatgtcagcatcatgaatctgccccctttttttcatgcaagtttgttcaccatcttatatcaacattatggatccattttatatatttttagaaaattttccactatgcccggcgcaaagcgcggggtatcaactagttaattcagtgaaacggccggcggcgcgagtgaatcagcacctcctcctccaccaaatccgccgtcagagtggcttcttcctctccctgaccctgacgaccccaaccagccggcgacgtgatcattagcctcgacccctaaagagtatgcaggggtacatttgtactttccacaatttttctctctccatttgcatcaaatataatataataatacctctggtgtccaacagccaattatactatttttgcggtgtccctcaacagtgacacgacattgctgtgtccttcggccaattaaaaagttaaaattttgaatgtcctatagcaaattttgcattgcccgtgaatgctcatctaatgcgtggaaattctgcaatatgtaagtttcacatgacactttctttcagtgggtcaagtcgttccttctgaaaaatgggtcactcaacaggctatctttttcaacaatattattatacccgccgaaataattaatttgattgcaaggcatgtctatatacataacacctggcaaaaaaacaaaatttatgcagggttattattggaacattgcaacagcggagactacctgatgcagagttttttatttgaactattattttgaaaataaaccgccaaaaattattttaataacacagaaaaggtcaatttattcttccggactatttcatcgggctcaaatttttattgcaaattatataccacctccgtctcaaattatacgggatgtaatgtatcctaactaccccattgtttcgcttattcgggggataaacaaaacggcatatttgcgaacgaaaaataatttgtgaataaaacttttatatacgtgtttttaacaatctaaaagcaaagactgaaaataaacttcaatgaaaaaacctcgaaatcaactctaaatttaaggttgaaaattccaattttggctgataggcataagtataagctaaaagatgaggctgtaatactatgaatctcaacaatttctatcacatgtcacatcccgtactagattaacttaatttgggaccaaagaagtacgagttatatagatagaatcaaatagaaaattagtgttaaggctgatctaaacatcaaattaaatttcaaagttgaaacaaacaatcatcaaaatatatggaaatatttttcaacttatgataatagtgccatctattgctaaaacaaaattaatcttaaaatataactagtataaatagtaaaaatgataaatattattaaggcagcggtgacgatagccgcctcgacggtggggccgccactggtggcgagttgtcggcggtggaaagaagataagaggagaggagagaataagaaggtgctcgtgctgctcgcggagaggcacagtgtttggctaggcgctgcctccccattcgcctctctctccgatgtcctcctcgccgcccgccccatcaggtggagagggattggggaagagagaagaagggaggatgcaggaagataatggaattgacacgtgggtctcgtatctagtggtatttttgtctatataatgacggaaatcgtggcgatgatggcatgcttccaatttgtgtgtatccggatggcatggatacaaatagaatacgaatgatagtagcatttatctaaaatgatacatttgtaaaagagataatccaagaaataccattgacaaacgtccaagtcccagaaattccatcgacaagtgtgagttccaagaaatgccattgtaaagtcgcagaaatgccatcgacaagtgtgagttccaagaaatgtcattgtacaaacgattttgtcccaaaaatgccatcgccgttagggttccgaccattttgtgccgttaaaacactgttcatcctatagaacataacggcgcggaattgacggaaccctaacggcgcggaatggacggaaccctaacggcgatggtatttttaggacaaagtcatttgtatgatggcattttttagaactcacacttgtcgatggtatttctgggatttggacgcttgtcaatggtatttcttggattatctgtttctaaaagcatggatcaaatttacctaaaaaatttaggcgatggcaggtcttttgctgtcaacataaaccacatgtcaccaaagtaaaccatattctgttccctaaaaaaaaagtaaaccatattctctatcttctaccgcggcgacaggtcttctttatggtcaccatattctttggctggatttgcataaaccaatgacgggtgatggttggagtgatttgcggaaaccataatgacacaatgatgttaaaatgacatcgatgcccttctttcgagtttatgcgcattgcattaagccttgatacggtgggagggggtacaacctcgcaggcgtcggatgtgaacacgtggcaacatctgcacttgaccacatctaggaatgaacaaaattggaaacatggttatataagagtgaaaaaatggaaatgatagtaagataagactatttttctgagttaatggttaaagtctttgttctaagagaccatacttgtctctatcgttgaacaagcccttagttgcccttaatttgtttgacagaattgacgtttaccaaaacatattatgatgtgatatacttacacattacagtttataacatctgaggcctagtttggaacataagaatttcatacaaaatatttaatacggttagtacaaaaatagttcagttccactaaataaaatatatcgaccacatagtacatcaaccataggtataaatttgttacatcaaaaataaatatgataattcatccttacattattccaaatagagctactgctggcagcgcaaaatgtgaataatttctttttttaagataatggaaataaacccggcgtttgctcaaaaaaaaggtacaaccacttattagttattacacaaaatcgctgaactatattcacacaccatagagttcataggagacaatcagaatttaacaaaactccaacacaaactaatagacaccaaaacaagataaagaaatcacaattattggctcctatttgtgaatatccacccgaagttggtgaaaatatgcatgaccgatgactcaagtttgcgacatgcattctttattagcgtgatgtcgtcatcgtacctttgtagttgagcccaataccagagccaatatgtttccctaaaaagtacatgcatataatattttaatgctgatttgtcaaaatccatatcattactagtaatccatagcctaacatatagcaaatgctcctacaagcatcaatttctttgtttttgaatcaatccccacaagccatctcctaaaaatgtgacatatattatgtggtggaaataacccaaaagaaatatgtattactctctagagagatatagcaaaacggcaatccaagaaaaggtgatatattgtatcattttttatacaaaagcaacacctcatgctaccattccaattcctcctagccaaattatgtatttttaccaccgccccttcaagcagataccacataaaaatgttgatattaagaagtgcctttaagctcccaaataaacttattcctctcaatatacccattattaattaaggctaaatacatagatctaaccgagaattgaccattttattgaaaattccatttaaaaatgccattgttatttgataaatgaatatgcacaattgaagcacacaaattgtgctaattggccaagtcctgatctactaatgctctcataaaagaaatattgagtggaacagagctcgtaacatttacaacctaacaatttcttctacgaactatagggtacaaagatgggtatctttccttaaaggaagtattatctatccgcttatccttccaaattctgacttgttaaccgctatttattatctaggaactcatatttgagaaaaatacttttaactttcaggagacctgaccataaatgggaatcccttgtttcctctcaacttgagttattgattggttattaaggtattttattttcaataagtcttgtcaaactccttgctcatttattaacttaaacaactatttgctcaataaacactagttttaaatttcaaaattatgtcccatctcgtcagtctatatttttttgtgtgatcatcatcttgccaaaaaaagtgatatataataatcaattttcaaagaacccctctgagaatcttaaaaaaaaatattataaacgtagctagacttaagagcacataattaatcaaaaccaaccttcctcctgcaggtgtatgtttacctttccaacaactaagtttttttttaattctttgtttaatctttttccaatctttattacttagctttttaaaatacatagaaataccaagatattttaaaggaaagtctcccggtatacaaccagaaatgtttgaatattgttcataacattttgtgtctgaccaaagcaaaataattcactcttgtgaaatttatctttaggcagaaagcatttcaaaagttgataataacaactatgggtgtgttcgtgcccctttttccaacccctctctctcgctttccacacgcacgtttttcaaactgctaaacggtgtgttttttgcaaaaagtttttatacgaaagttgcttaaaaaatcaaattaatccattttttaaaaaatattttactaatacttaattaatcacatgctaatggattgctctgtttttcgtgcgggagggattagttcccatcccctaaaaccgaacacagcatatatatttttcgctttctctaaatcattgtcaagaaaaatgagagtatcatctgcatattataaaatgaaaaaccatcatcgactagatgaggaatgaccccactaatttaaccatcttcctttgtcctcttaaataatatagatagcatattaacaaatatattaaaaagtatgagggataaagcctctccttgcctaagaaccttatatatttgaaaattagatgccacttggttatttacttttataccaatatatccatcttggataaaagaaactatccaatcacactattttttgaaaaaccttttatctttaatgtttattgaacaaactattacttaactttatcatacgctttctacaaatcaatcttaaaaatctgtgaaatggtcgaaaatgctcgcgtttagcacgtcgctctcctaacgtgaacaaaactttccacggttacgtcatttgcatcatgcacgtgtcctcgtcggtcctgatcagttcgtacgtgcaactaaatgccacccctttactatgcatcttttgcccttgcaaacgcagcatatctcaggtttgatttggtcggcaaccaccattaattatgaagatgacttatgcctgataaacactaattgcataacatccgtcacatcgcatctccaagcaaacattatccggcatgctgttacccggttgatgatggaagatgacctgaacacacagtaattggacggcagtaggcacgggatggtgattcaagtcgttgctctagtaatttactaaactccaaatgctgatgcagaacaggccgaaattgtgacaatttgaacttttacaaaaacttattaccagaatagaccatgccaaaaacatcaacaaaaatacgttggaaccgaaaatctgatttggaagtggctcaacgccaagtatttgttgaatttataagcacataataatttaatgtatttcataaataaatcatgacgttacagatgtaaactagcgtaaaaccattataagatttaaacatataaactaggtagtaaagcatgaataaatcgaatatgcgcaacatgctgaacacgaactaagggtaccggaagaccagttgctcaacaggaagtactcgcggttgcgggcgttgatgacggcgctatagatggccaaaaggcccgatggcccggcccacggcacggcgttttggcccagcccaagcacggcacggcccgtcaagggtcgggcccgtgccggcccggcccgaccaccggcccgtgactgggcctctccgccggcacgttgggccggcacggcacgatgggccgcatgccaggcccgacacataaacaatagggaggaagaatagacatattatatgccacggtcgaaagaataggaacgtaaaatagacttattttaactatatatatgtcagcccaaagaggagggacgaacaatagacttattttcactatatatatgtcacaccccaaagtggagggacggaaatagacttattttcgctatattatgtcacatcccaaaaaggagggatgaaaaccagacttatttaaaaaattgcacgatgggccacccgcgccttcaggccggcccggcacggcccgacggctggtgggccgtgcctgggcgggaggcgcagcccatgggtaggcacggcccggcacgaagtgtcgatcgggccgtgtcggcccgatggctggtgggccgggccgtgccgggcgggccttttggccatctatagacagcgcgcagcacgcacgcgaaaaggaagacgacccgttgtggtcgaacagggagcagtcgcgcgaagcgcttcccaaaaaccttattgctgtcttctcccggtgcaggacgtcgaaggcgaaggttctagagacggcgtagtaaagaggaggaggcaaaccctattgatttcgcgtgtgttgcgtggaggcggtggctcaacttatataaagatatcaggacgcttgatcaggacgtctgcacgatctccgctccgcgtaaccgaaccggataagtcatgtgtaacttatcccgactctacggcgtttcacgcactagattattcagagtgtttccagtaaagaggaggaggcaaaccctattgatttcgcgtgtgttacgtggaggtggtggctcaacttatatagagatatcaggacgtctgcacgatctttgctccgtgtaaccgaaccggataagttgcgcgtaacttatccggactccacggcgtttcacgcaccggattattcaccatcatgccaggcgaggcgagcgagcacgtgtattccccctcttctctccacttcacatgcttcaagtggttatgagagcatcctccgttataagaaggtctccctctcctagagtaggcaaagtagtactaaactccccatccatgccgtcacatgaggtgggcttttgtgatttttcgaagaattaatcttcgtatgggctaagacccatcaattaattccaacagtactgtggtgctgaactcggacacgcattaaaacgagtatgatctgtgaactggtctggtggtagttgctttcacggtatagcttgaggagttgaggccttgggttgatcctgcgcatagccaaataattttttggagttttttttaacagaaaataacgctggccccactagcaaggtgcggaaaaaaagtaagtgaagatatttttttcgaagtatttgtttggaacaaataggagtttttttaacagaaaataacgttggccccactagcaaggtgcggaaaaaaagtaagtgaagatatttttttcaaagtattttttggaacagataataacgctggctggaaaaaagaaaaagaaatacagcgcttcaaggattcaagcttgggtctgcagattgagagagaggtgcaccaaccactgtatcactgtagacctttttgctaaataggaacaacaatatacttcacaaaaattcagcgccaggcagtgtggcgatttctggtattgacgtggcaaaatctccatgccaaagggtatgtcactgatacgtttggacctcagtgccatcgatggcgctggcgctaaggtcgaggtttgttttttttttaagtttttgacacggtctattattataataagattttataaaaagtcaaattgtgaaaatttgggcagaacagaccccttctcaaacggttaaacccactcaatatcaccatccacgagattttgaaccatttgccatcttctttaatggcgcactctcaaatgccattttcttttcttgaataatgttgattatttgccatccgactctttatattctttctattttaccattctttcctaccaactcagcaaacttgtgtgacaaatgacattaatatccctcatctcctttcccatctgcagttcacggactgtgccatcaccggcctcgtcaagtgaagaagctattgctttcctagtttgcttggtcgattggtaatttggtatatatgcaagtaattaatttggagggctgaatgagtgccactgttgattgctttacttaatgcagcgctcaatcgaaagcttggtcttttttttctgtagtgtgttttcttctttttatcttcgatgcttcatgttggctctacgcgaagatgcaggacgaaagcgctttctgccatcatgggaactttgtcgctacgctagcttgacagttcgatttacctcataactgatgagaattgctcgtccgagcggttgcccacgaagcggataaaagccgaggtagcggtcactggtcaagggcggtacgcccttccttataggcagtcgccaactcgccatcgccgtcggatcaagaagtggcgaggtcggcttgaagacggcaccgttgcacgttgcaggaacaatgcagaggaagaaccgaagagacgggggtagtgaagttatttgtcacacaggtttactgagttggcaagcaagagtggctaaataggaacaatatagtgggtcagatggcaaatagttaaagtcatttgagaagatggcatttgagaatacaccattcaagagaatggcaaatagtccaaaatcccgtgggaggttgtgcgcctagagcgcgtgcgttacaatggaaaacaaataaagtttgtaacttattaaatcaattaataatcacttgtttagtctaactaatactatatttttttattgaacaagtaggtgatattgaaatttagagaaccaatagagaaataggaaagaccttggtaaaagttggtgtaataatatagattgtagggcccaaatttagtgataggggtggtgtgggaccaccaccaccaccaccactattattattattattattattattgactttgtattttacatttcaattttatgcttcccaactcccatgcttgtaaactgtccatatcctaaaagaaattctctaaaatttaatcttagaacacatttcgaaggaaactttttaacttcgtcgcagaagttaattcattcatttataccctgaaatagctgtcacaaaattacataatctatcaatttgttggcaccagtacccgtagtggcatccacagacgtgccaccaaaggggatagatgttgtcaaacgatcacctgggagggacctcatcacagtgaacatgcacaggtttgtcctaggctcgataagccagttaggacgccatcaaaagtcgcagatacgagagacaatgagtaatctggaaattggtgggtgaatatatgtaaattggtgggtgaatatatgtaagatacaggacgcaataaggaagggcaggtgattggttgatttttcaatcgacattggccactatatttaagaggggtggtcttacgtctataggatcttctccacggttctattagtcttagagaaagaaccctcgtaccaagcatggaaacacgagaaataccaaaattgatcagactcgcggttgcatgacggtcttaggtatactaagactgagttcgtttgtagagcttctaacttttctctctcgttttccgcacgcacacttttcaaactgctaaaaggtatgtttttcgaaaaaaaatttataggaaagttattttaaaaaattatattaatcaatttttcaagttaattttagctaataattaattaatcatgtgctaatgtgcctcttagttcttcgtgctggaagggaaggttcccaaccaccacaaactaacacagcctaaggtcagttcatattaagctgctagacagtccggcattataacaccggtttatccagttgtagtcatctccaaaggattttgcaaccctttgtctcttactcttacgagtatctacaatgttttcctgctcaggatttccctcaggcgtttgatcattgtgttctatcggtgcaaagtgctcatagggtatgacagtttcttgactagaagtgctatgtgtatttttcatgtgaaattcattctcaaagaatgtagcatctctggactcaataattgtaccaacatgcatgtcgggtactccagagtttactattaagaatctataacccacgctgtgaatagcacaaccaaggaacactcaatcaacagtattcggtccaagtttacgctttttggctatagatacatttaccttggccaaacagccccatgttcgtaggtatgagagatttaatttcttcctttcccattcctcgaatggggttacttccttatgcttcattggaattttattcaggacatgacacgcaatcaaaactgcctcaccccaccattccttggaaagtcccgcagtgtctaacatggcattcaccatctcagttagagtacggttctttctttcggctaacccatttgattggggtgaatagggaggcgtcctctcatgaataattccaaactcttcgcaaaaagatgtaaactcattggaaaaatactccccacctctatcagacctcaaccgtttgatttgcctttcaatttggttttctacctcaactttataggtcttaaagtaatgcaatgcttcatcctttgttttcaatagatacacataacaaaatctagtgcaatcatctatcagtgtcatgaaatat

SEQ ID NO: 8243 - DNA, 3501 bp, Oryza sativa
tgagatcatcatcttctttggcacaatgtcttctatccagcatatctcttttattaagtctatcacaaaacattagccaggcaaagactttgatcttcatgacacattttgttttccatagccaaatcatgggtctggggggttgcaatgcagaataatttagcttatagaatttcttagctgtgtacttatctgagccccagataaaattccaagcatcccccatccctgattgtaaattcaaactgtccagaaccccctgaagttgcaagaattccgagtaagcctcatccgagaggggtagagcaaaagaatcttctaggggtcttgaacacatggccttgactgaatcagacttatacatagtcacaaaaaagagattggggtagctggtgcatttaaaatcatcattccatagatcattccagaaaagggcagttcttcctgtcctgatttcacattttgctatcccctgaatatgtctacaagagttgtgatgtccctccaccaaaaagaacccttattcatcgtcaggtgtggaactttagagacatagtatgattgtgagattaatttcacccatggtaaatcagcaccattatagaacttgatcatatgctttagaagaagggctgtgttttgaactctcagattgatcactcctaagcctcctttctccttaggcatgcacaccctatcccaggaagctagagatttccttgtcgaagaagggttattacctctccacaggcaattcttacgagctgtgtcaatggccttgatgactgtaactggtagctgcaatgaggacatgtaataggttgcaatgaggatctaccaagttgacctttcaacctttgacctgactggtaccacatccaattcagttctcttagatttatggtgcaatccatgggagtaaaaggctttttctgggggcctatgcgtctaactcttgtgtttttattattagttaatactgtttctgattcttctctttttgcagcacgggtcagaggtatatatatacaggatccagtgaccaatgtgtatatatttatgatgtggtatggaccttagatgtttcccttaaactgtgatattgtactgtgattctactatttgcatactatggcagtttttctgcacacagggtgtgtatcccatctgtgaaaactgaaaagtcaaaagctcatgctgcatctatgcaaaaagaaaaatcatagatgtacacatgaatttttttttcaatattaaatatgtccatgctttcaagaaaccaaaaggcattccctgtgtaacctttgtgaaatctattttgtaataggggtccaaatgccagggaattttgcataattttgggcttgttattatcattgtggtatttttggctatctcctctatgtcctccaatttctctaatacacaaggattatattatgataatcaagttttttattcataggggattacaatctactgtaggtaactttggctagacaatttcatgggttataatcatttctgtgtagagagatcataattggaagttttagtaaaaactgtgagaaattaagccattaagattaaattatgtttttggatcaagaaagacattttacaaacctgaaaccgcaccattgattctgtagatcatattatagatgttataaactgtatttttttatgcattggtgtaaaccttgtttcaccctgagaaacaatggtagcaacgtctccatgaagcacggccttcccgtttattcggtgttgtgtattcgtattctccagcttaaagttggcccctatgtaactccttgtgactgaagtgaatcaactctctctttcttgcaggctactggaaaaattgttgaaaaactcagatggcatggatcaataatcagagattgttcctggcacccatactttccaacgcttgttagctcttcttgggatggctatctagtccggtgggaagcaacagaggacgacaaggacccctccatgctcaagaccggaaagcaaagaatgcatccagagggatacacattttcgtttgtgttttagaaattcagcagacggcagggtcctcaatgcttggaagatgtattcacgtcgatgctactgtgtcggattagtcattttctctgctttctggttcaagtagcaacgtattcagccgtatagaaattcaccgaatcaaagtacaacattacaagttacaaaggtagagtagttcaatcagtcatttacaaatgtatgtctttgcttctctttttctcccatttgggatttcgacggccttgactagatagatattggtgacgggcaccttgctcgctagtcaggcttggagaatgctccaaaatttgggtacaaatatgtacagttcaaaagatgaataaagtgaggaatcttcaatgcattgtgtttttgttcactcgaccccgaattccaaaatagcttttggcctcctagtccctacggtaaaacatacatgattttaactttatttatttattttcaacagtctttgagctacgattgtgatcatgatttaatactagaacaggttaataatttaatatgtttatgagattatgaaagtactctacatacacattcaatttttatattttcaaactatgtatagtcactaatagtcaaagtgtcaaaagtttgattggattttgtcccaaattcatggtcaaaggaagtatatatgtatctcttgtaacatataagttaagcgtcatgccaaatggtatatcttaaaaactacaaagtatttgttagtatatggctagaattgtaaaaaaaacatgggtgtgattggacgcaccacgaggcataaggagaaaggaggtcatacaagttgaggattctctataatatatttgtatatacagtaaccgtactaacatatgagccaatgctatatatagtgtcattatcctgttgtacatgatgtggggacaaatatggtgagccaaaaagaataaggttatttgtaggccttggtgatcatgagagtcaagtgatcattttgatgggtgtcctaggtagcacacatgttccatggctgataaaaatatatgcctatggggatgaggccgggtaatacacccattttaaggaaaaaaaactccattatatcgtatgcatgtcatgtatttatactatgacttaaactcaattggcatagcgtctatcaagtgatctatatatacaatgtggataatgtgaagtaatttggtactatctccgtcctaaaatattgcaacctaggatgggatgttgcaacattttgggacagaggtagtagatcagttagtgatcaggtagaggtagaggtagagatatgattgtggtcatgtgtagcgatagtgacgacaagggctgtacaatgagatgatgatgaacttgaggtggcaaagcaaacaaaatagagagggaggtgatgaggtagggaaattatgtagtgcaaaccacatatgtagt

SEQ ID NO: 8244 - DNA, 15531 bp, Oryza sativa
aaattacttgccagttaccactgattatctgttttcaaggtaattcatgatattgttggtaaattttttttaaaaagattgctcttgaatacttggttattattatctgtagcaccaatcagaagctacaacgtcaccttggaggttattaatcaatttgagcacctgcttgacaaattgaacatttgctgctatatatgtgctaatgcagtaatctgaatttatttggaataatcaatggcaagttatactagactgaacaccaggtagtattggaggaggatcaaaactattgaagtgatattattgtgaacaatttcacaatttaatatcacttcaatacttccatagtccaagtacgattaactgtttcatggaatttaatgacattattatacttttcgtggaatttactgaagattctttgacaatttggggtttggatatacttattaatgttaaatttgtaatttgtggccttggaaaaactagtttgatttgtactaagaatcacttttgctatttgtcatgtcacctgaaaatttcttgattgttaacacctaagcttgcacattgcataatcttaacttgcagaatatataaaaccacaactttagtataatttacttcaaattaaagtttactttgtttgcctctctagttttgatttttatcttgtttcttagtggttcggattcattaaataaaatacagtgactttatcttaagtaagaaatgaaaatattaatttcttttgctattgggcgttggtctagtggcctcaaaaagggtttgatagataagaaaaaatagccacttcattacttgatggtatcataaaaaaatagtttagcttttctctctctctctctctctctcttttttggagaaagggttagtaaagcttagttttttttaaaggattagtaaagctttctgggatcactaacttagattagataccacgaattgtgaacaacttgtccctttagtcaccatttatatctgaggaagctagggatgatttcgttgcacactcaagtcactctaaagtctaaaccgaggtttccttgtttcacctatatacttgtttgctttcaggatttttctctgttcttagtcttgcagattccaggctcggtctaatcgccaatttggcaatctttgtatgctctacaattccgtgctggcatatgccaactccaggtacgaattatgtaaatttcagagacttcattctgttctctctgttcaacacttggtttagtttcaaaacttcaaaaggagcataatctagtgataggagagaatcccacaaattccattgctaaaaccaaagttacttgttcgctctgtctctgtaatgctttcagtaatatatattggtcctgcatacaacaaatcataagaatctaaattgctgttgcttttgaagttggcattcccaatatcctttgttgtgttggaacagttcacatcaggctgtagaccaagttggatcagcttgaacgaatcaagcacttgttacattctgtctgttgttgaagcaaaaggcccccacgaagaaacatcgatcatatgcaccaagggtataacagaggaggtcgaatcccatgtcttgtggtggctgcaggcctgtagccaagcggatccgtccgcctgccagcaaaatgcatctgacggatgctacgaaaagagagacgatgttgcagaggtaacaagagacgctcgaaaacccggcgggtgtggtgagattctgccactaatcatggacaaatcacggacaaatcgagcatctatcacaaaccagctttaaacttttgagagttaattttactttgggcgacgctaatgggcggccagcgatcaccccccatccccctatacgtcctctcccccttccttctccccttcttttcttcctactacaccataaattttaaaataataaaaaaaacaaagttagaaaattttatgtataaaaatactatatataaaaaatatttgaattcaaatttaaatttaaattggatatataaactttttacttataaactttgggtctaaagtaactttaggtatatagaaatactatatataaaaaaatttaaatttaaatttaaattcaaatttgaatcgggtatataaacttttgacttataaactttgggactataaactttaggtgtatacaaatactatatataaaaaaattgaattcaaattcaaattaatatttgaatttaaattcaaatttgaatcgggtatataaacttttgacttataaactttgggtctataaactttaggtgtataaactttagatgtataaaaatactatatagaaaaaatatttgaattcaaatttaaatttgaatcggatatataaacttttgacttataaactttggatctgtaatatttaagtgtataaactttagatgtgtaaactttaggtgtgtaaacttttggtgcataaattttctaaaatatgaaagtaatgcggtgtcaaaaaaggaaagtggagggaggggggattgatcgcccggagcgcttgatcgctcgttaggattctcgttttactttgggccactttttattaccgatgtttcgctttggaccaccttaggaccaatgttttcactttggaccggatatttttacctttgtttcacattggaccaccctcactcttttatccatctacatccaacttgtaatatgtcgaagaaatagtcttacatatagctgtggcagttcattgacgagtaggagacggcgtaatcgagatcgttcatatgcttgagaagagagttgggtggtccaaagtgaaacaaatgtaagtttacccagtccaaagtaaaaatattgcttaaatggtggtccaaagtgaaacataggtaacaaaaggtggcccgaagtgaaatttactcaacttttgaataccttttctattgtacataaaaaagagttgtggtgattaagtgtttcttatttggtactggtatagtatatctcctaaccagaatcagcaccaatctttaacctcgcattgctaacatttgggctttggctgactggaaaaatgtttttgcgtctcatttgtactatcaaaagatatagaggatcacatcaggaataaaaggaaaatcgaaagtatgatttggctgcaagtccattaacataaggatttcaagaattaggtggagtcgcaattgtttaaatctttgctgataaattgaagttcacaaagaagaaactgtttctgtctaccaatttttactcttatattcagtcctctcattttcctgtactaaccatgattaacacgcctgaaacaattgagactatcaattggttctttcaagtttttgcaaactgttgtctcaaatattcaatgaggcaaattatgatggtgcaatgaacattggtttctaaagtatgtaaagaatatgctcatgataatctttgcattgtgtacttgtgttgtgaactattgcaaaaagtacatctttatatcactaaaagaattttaaggttgctgttgcataaagagattgagtactctgtgttgacttgctgatagaatttatctaccatttaaatccttaagatgaattgatctctcacttttctccttttttttgtagggtacatggcggagctaaacactatgcaaacggtggtttattttgctgtgtcttaaacatagtagtgatatctagcaactagcaagggactactacaatctttcagtatccaagcacatagttaaacaaaaacttacagatagcaacacaaactaaaagaattgaattgggaagggaataccatagacatctatggagtattaatatagaacacacaaacaagagtttaattaggtgcttaactataagcaagaaagggacatgtggtggaattctattatgagataactgatgcatagtacttgtaacaccatgcgccttaatttagtatttttgaaaaataattaaaagtcaggaaaatttaacttttcaagctgttgcacggatgaacaaggaccatggtattccagacatacatatatagacacacattaggtcctgttcttttctccaacaagagttggatgaaaattaagattttcgtggtacgcgtttcaaactgctaaacggtgcgtttcgtgcgaaaactttctatataaaagttgctctaaaatatcatattaatctatttttcaagtttgtaataattaaaactcaatcaatcatacgttaataccacctcgttttgtgtaaaaaacttaatcttcatcttcatcttcattttcagaagaaaagaagagttagcgatagcgacgctcctaattcttacggtgctaacggttgacggtcgttaagtgtaaactttaaccatcaactgctatataaaagaatataaaatatatcatcaaacttacttgtaggggtttactactaaccattatcactcgtattggtaaatatgagtatgcaggtgatttctaaatgaaaacacacccgtcttgcgacgaaatgcatctccgaccaatcgtacacgagcgctaggattggagggtccacatgacagtcaaaaccgatataaaatgggcttatccacgatgcactaatatagggacccgccagtcggcctcctagccgaagaagcagctcggaagtggggcccacagtttggccaaactaggggctcagccgaatcttcactgccacctcccatcctgaccttccttatgtaggctccagatgcactcctagtggtggttatgttggtaaccttcatagcacactataaaaggacaagaaactctcatttccaatacaagacttaagtggagtataactcacatccatattttaaggcatcaccttagtatgtggaattaggtagaaagtgatgggaagctctggaagaaatgcccccaaatatcggagttctctttgggaagttcagaaggagtgtcaggtttgttgacattcttccactcgagttccggagaagcattggagttgtcagccttcttctgttgcttgacctcagcgaatgcttgttttaataaagtaagtatttgagatctccatatagtatttaattatttgcttgagtgagatatagttacatcgttacgggttcgtcgcttagttcaattattatgtgctctagtattaggactctgagtaaagaatgaagtttctgcgcgaggctagagtaattatcaataacttaggcgcggtgtctaggttagtggtttcctttatttgttgtgtgctccatgcaaagtgaggtatgcggcaggtggtgacaaccttgtccatcttttatatccctccatgtttacgtacattgactcagtttgtcaaaccaggagagtgctagtgctcaaagcaattgatagagttttacctttaactcaagtatagtacattaacccgtaagaatcttctttagccttagcctaccattaggtgctgtccttggatagaatcctattattagatatgcacacaatccctatgatttgatacctttggaatactctaagttgaagtgctacagcggtatctgtgcgcttccgatttttattttactatatcaaatactaacaagcatttctgacgctgttgccatggaacggttgctatatcatcttcaaacctgattcatcctcatatcttttctttgttgtccttcctttctcttcttacctagcacggagcacctttctattcaaaacctttatgctccaaggaccgagttctgtgagccacctttttcttcaaacatatctgttcatctggtatgaactccgtcctagcttaagagccatggttcgggaataatccttctcaggatgtgaaagcgaaaatccctaccatcatttgcgtgagtttgagcaattgtgcttatgcctgacaataacggacatgacataagaaaccttaaagtggaaattgtttcacttctctcttacagagggggcgaagcaatggtatactcataccatgagaaaactgcatattgatgggacaaattaaaaagcatattatgccttgctttcttcctgttaacccgtgtagtctctctacgtggaggttcacgcgaaagaatccattggtgcagcctatgctcgtttctccttgttaactcaagacgacacagacttttctttaccgatcatgtgttgttacaacacttccactcgggtttagacaagatgtctgccatgtatctcgatacttctgctgtaggttcgtgcgcacacaaaacgatgtctgtggacaccccgagtattataccatccagtgtccaacgcgaacaccacatactattggagaagtgggatccatacacgcataaatagccactcatcctcaatgtgtccatgatcgcggttgacaaccttctgttataataactggaatgccaagtagtgaacacaagagataatcataagatagcttgccagtctactccgtcatatgtccgtcaaccactcgaaggtggcgaccaaaagcataccccagtgactcgatccaaggcactatccccgattatctcaagcgatcaaaacccgttactcatgcttagctagtccgtaggaatgcgactagcctcacactttcatcgcaagcaattaataaacatagcaagtaccataatagggttaaagtgcagcaggtacatgacacataatagggtccaagatcccaacatacaacacataaatatagcagcagaagtctcaattagagttcataggcaaaagataaaatcggtggtgccacaaccccactagggcaaaccaaccgggcaagagccaagctgcaagagatcactcattgccctcgccaccctcagcagagcaatgaccacacaagaagcataactcataaccggaatcctctcctgaaattgcagacaccgggttaagtacaagattgtactcgcaagtcttacccaaaattatatatacataagggagagagaagtatgcaagctttctagcctatagtgggtctctaggttcaacgtttgcataaagctaattttattgagaaattaatgagtaaaataagtaaggacaagtaactctagcatcattttaatttatggacagcaagtatataattctgaaatatataagcaaatgagcccaaacggcgctctcatcatcaaccatggactaccaaagtccataccaacatggcacaacatgccaacaccaccatcaaacataatcccatccataataatccacatttgattctaacataagtgactaacacatcaagcattgttcataaccgaggacgcggctattcgaatagattatactctgatcaaaggtgtacaactggacccacacgaaatgaacaaatatcaaatgctacacaccccgtcgagtgcggtacataagtgattcaagctcattacatgccctttcttagccccaccccaaccacctatactacgctggggttcccgacgactcagtcacgtgcgtgcatgatgtgaccaaggcgggcgcgccacgcgggaggcacccccggccaaacctaggcacccgagaacctccaaaggctacctgcctcacgactctccaacgtagtataaatgatcacagtagaactagtaagaacaagccggtcccaaataaggcatgtggtaagtacatagggtgcttgattagatgtcaaaatgttcggtccttaacgacctagatggggctacttgcatcaggggaaaccaacctcccatcatcgccctatcacccgtccaagtccaacatatttcatcaaccattatttagtgtaagtgctcaagttttatgcccaataatgcaagttgtctatataccactattaagcactgtctatccctatagttctattagcactaagcatggctaagcattaatgaataagacatcccaagtaatcccaaccagtggtaatagggtataagacaacgatatcacaagaactaaatgcattaataggttctacccatacaccataaaccgacaatattaatatctaggcaatacatgcatatatatatatatatatatatatatatatatatatatacatatagattgcaaccaaatcatttttagagaaagcataggttctatatgcttaggtgcttgccttgctgctgcgtggaaacacactcaacctcagagtcttgctccacatactccgaattctccgaatctatcgataagaggcaaatatgcaaataagattcgaataaacatgcatatgcaacatgctctacagaacacggggtaaacacagtggacatgtcacattttcaagaagaacatgggtgaaaagaatgaccctatttgctgccatgattctggagatataaaagtgacgagccacaaatgctgaaaatggtcctatgccaaaactgaatataaactatgggtcatttggtgatccccacatattctagcaaattttcatgggtgaaacttgctccatacaaaagagtataatttactggtgataggaatagtattcgattatttaatttggagtttgaacaagatagtaggtatatatgaaacctagagagtgagaaaaagaaaactgctgcctgcagcccttgtgcccaagatttgattcgaaagtttactttacaaatgctcagtgattgaggaaaatgaagaaggcatgatttagctcagctattggttttgtaaatacaatttttacaaggtgctggttagtctatgagggattaagtcgtaacatgaagtttctagctggcctaagaacttatgatgctgaaaggtagcaacttgcttccaatggcaactcataaaggtccaaaggttgctgttacactccatgcatgcatatactttaaaatgcaggtggtcaggtactgtggttgcgaaggttggagcacaaacagccatagcacaagaacaaatcgatgaagaagaaaaaaaatggtgatagcaacctgagtaaactgagggggatgggggttgtaatggtcggagtggagagaaacgagttgcaactgttctatgctctaaaatcttgcatcaatgacctgtggagagaggtagggaggctcaacacaatggcactcacaagagggacacaatggatgggaaggaaactcaccaagtggaggaaaaacatggttgttgttttgttgctgcaaccagcagcaagctccacctattttcttcccgatctccctcacgaacccatgcatgtgcaagatatttggatggatgggaggcttggatacttgagattgctgtggtgtgacatgcagggatggatctcaagtgtttggaggagatttgatggaaagaagtgaactgggagctcagcttgcaagaaagaaaagaacaagcaagggagaaagaaaaaaggaagaagatgaaagggtttcttgctagtcttatggacctgaggtgggtggacgacctggaggtgggatggggcttggtggagagcctaggtcagtgaaaggtggggccaagttgagctgggtcatgggacagataaaggaaggttagaaccttacatacacattgaaaatagtgagttttcaagaattttccttctctccttcttgggtaactagtttgtcctagctaaaagagagtcaaaaatgtgtgttctggcatggagatagattgagttacgtagtttccatttttcaaagtttcactcaaaaatttgaaatattttaattctggcaaaaaggtgaaatggggtatgctgagaactaaattgaattttaatgaggtcaaaactgagtgtaaaaattctagaaaaattatattaactcataataaataatctagtatttgaataaattataaaacctatatccttcagttcaactttaggcacatttagaagttgcttcattttgccaattaggtttctattaactaagtgtgactatatttgactgatatatttgaggtagtaaaaagaatgataaaattatgaaaccttcatagtggtcatcttaggttgtctaagtgacatgaggatcttcatggattttatgttgcttagatttgttatataaagtctctatgtttatttaacatgtatcaaccaattatgaacgacataaaaatcattacaaacaagtacacaagcacacaatcacttgttactaattctactagccaattgcgaagcatggtcaggtagattatccaaagagcgaaagattaacaactatactacaacgtttcttaactaccgcttgaccatttaatttggttatatacatagaggcttggacaaagcttagaagctaaaagaagacaccaaacaccagaccaaacactagagcttcatggattatctagtattcagtcagtttggtctctagaaacattgttccccttgtggaagggaaaacaaaaattagtctagctactcctcgaaactgttggtagattttattagcaccaaaacactctctgaacgatggatgagtcattaaaaaaagtttttgtttatctagcaaaaggttgtagggtcattagtctacctataatgatcactaaagtttcttaataactcaaaccaacagtttgggaaaatggtttcaatttctacccatgttttttatacacaaattaaccgcatgaggttttgaacccaaatagctttaaaacttccaacttttactaaggacataccccgatttccacttaagttgattaattaaaacttcaggatggtacaatgtcagaaggtagggacctcttggatcatatcatagagaacacttccttcgttcattgcgaaaccatcctggaaatcgaggatacacatgaggaaccatcgatggccgaatcagagaatacaacctccacatcccatgtttcgatcgttgaatccttaccggaacctcaggaaccgaaggtagaaaaaattcagcctttggaatccctgttcttatttgagggtgatctttttgaagattatggacacacctcaaacaattcctgccaaaagagaccaccagtcccacgtacttatcctgcactactcgaggagaatctcttcaaagagatggtgcaggaattaactaccatcatgagtgatgagtgattaaggtaggtggagctttcttctgaagtaactcagattagctcctcgtccttaaatattccatgtctcatgagagaggccatggtgcaaaatctttataatcccactattcatgcaaatattatgtttgcaacctttgcattaaattgcttaggagacgaactgttggctccaagagacagaacttcccggagcccatttggtcctattatcgaaggttatgagattctgcgcagggtgctgatctgacacaatgatgtcgaggctattctagacttccatgtttttgaagtccctgacttccacttctcataggtcatcccatagagaaacttctccttgatgctccgcataccggagtcctcaacatcaaacttgggaaaatggcattttctgtcctgatctttcgatcaaaaaattctttggcagaactcattcccgattccaagccaattgaggaagtgttggctatctcttcatttgagttccccgaatccctcctaaaagatgatgccagtgcattcgtcaaggaggaggacgatcctagagaggtgatcgagttacccaaaaccgatctgccttcacaacctttggttgagccctttaagccttctctatgcctacttgcacgatggtacggaatcgcccgttatcataagcgacaagctttccgatgacaagacctccaagctcacagccgtgttagaaaagcatcgctatgttctaagctactcacttcaagaccataagcggattagtacaatgctctgtactcatcgtattcttctagatccttcttgtgcgccctcttgagagctgcaacgaggactaaataattccacgagggatgtcgtgaaactccaacatgtcgggataatttatcccatcccatatagtgagtgaaagtgtatctaggctcctattgattttgatgattgattacaatgcgattagagaggactaacatttttattcaagcaaatgtgaaggttgttatgtcctcaacatgttgtaatgtgatgcataccccgtgaatgcgacatcacgatgtaatacggcaatgatcaaatggtatattgtatcttgtaccttgcattgtgtcgttggaaagctgtactattaaggggaatgatgcatagacatataaggagtgatgcgggtgctcaaaatctaattttcttggaagcatttctcttattggagtgttctgtaaatttttggatgttccaaaaataattttcggaagttccgaaaatacacagaacaatttttggcgttctggaaattttcggaagctctgaaaatgcgttgacttcgattatttctaagatctggaatttttggaagttccaaaaatgtttgtcgaaagttccaaaaatcacttttattgcacaccaacgggcagatttgtgatgtgggtataaatacccacctcccctcacttgtgagggctgctggttccatttgcaatcatttgtgcccttggcttgctctctcttgttagaataaatgggcagcccataataaatgttaaggataataataccaccctgggaattaaatgaggagtatctcaacttaaatagggagttattggaggctccctgttgaccggttgaggtggggattggaaagccacacgcgcgcgcgcgccgggccgggggcgtgggcgaggcgggcgtgcgtgcattgcattgcgttgcgcctctctgtatccttttgcaacggaccaaccccgagattgcctccgtaacgggcaggcgattcaatacccattgatctcgcgtcgttactacggcaacgggcggatatctctcctgcgctataaggaaagaggcaacccgatcagatctgctcggttactttgcacgctactgttctgcttccccgcttctgattgcttgcgcgcacgagagatcggagcgagcagggcctccggaaccacaccttcgcctgagatttgcaccgggtaggcgggtcatcaggtttttggggagtgcttccgcacgactgctcctcgtcttcgaccgtacgtccgtaccatgtctgccgccgctgccgaacctagagatggcgcgccgggagctggatctggcgctgcgaacgacaacaccaatggaggcatttctgcctcacaatccagcggagggacattcacagggtataaccttctacccttactgttatttcggtttttgatatctttattagtcgcaattctattgcgttcgatgtatgatgatgatgcttattatatcctaagcatgcttctggttatgtttgattttatcactagatcacctcacattgttcatgccatgattattgtcttaatattttggattaaaatatgctgatatatgactatatttccaacaatccaaaaacctgatgggtcattttcgttagttggctttactactgtacgaaaccacatgcttttgatggttctaattataagaggtggaaagcacatgcacctctgtggttgacagcgatgcaatgtttctatgtttcatggggcaaatgaagtgaaccacctctctctcctgaggaagaggttaagttcgaggcttcggattgcctgttctgtggagcattgattagtgtactcgctgacaatatagtggacgtgtatatgcacatgccttcagggaaggacatgtgggatgtacttgaggccaagttcggagtttgcgacgccggcagtgagctgtatgttatggagcagttctatgactacaagatggtcgatgaccgttctgtagtagaacaagctcatgagatttagatgctggctaaagaacttgagaacaacaactgtgagttgccggacaagtttgtggagggtagcattattgccaaatggccaccttcttggtcgaactttgctacttctctaaagcacaagagaaaagagttcagtgtttctgatctcattggctctttgggtgttgaagagaaggcgagggcaaaggacaaccggggcaaaatggttgagggaggttctagtgccaatatggtatagaagaagaaccctcatgcatttcacaacaacaagaaagtcaagcctgatgtcaaacccaaggctacaaccaattttaagaagaaaggcaagggaaaggcaaagggagactgctttgtgtgtggcaagtctggacattgggccaaggactgtcctgagcgcaaagacaggaagtctgccaacatggtcattgtcgacgtttgatgtcgcgattctggtatttgcatagtatggggatcgttggtaccagggtatacacgagacgagactgaggtaaaagagatggagacgaggatttttatacaggtttgggcccctgaattgtcaggtaataaccctacatcctgttggccgaagctggtattgctcttattcaccataatcacaccagtacaatatttggggtaacctatctaactgttgtcgccatggcggtctgaaggactgactcgtagtcgacaacagggtagtccttctcctcgagttcgtgcccagtgagatcagagacagcgcaatgtctctcttatcagtatccggagaaaccgtaggggactagccgtgtctatctctgaagtcgatatccggcgtcttgtttaggcgtatgttggcttgtatgtggatcttgtgtcttgatctattgttccgtgtatgttgattgtggtgggtgttgattgtgatcgtgtcctctctcctcctagggggccttgtatttatacccatgggtgtccccttgtccaagtagaactagggaaaccaatatggatacaatccgagtagtccttgtcgttcccatgtagaactctggttgtctttccttatccggaactcctcctatatctgcaggttgtttccgtataggacatggtatgtggtgggtcctgctgagatttagtcaactactattaggtatgtggtatccatagccctgacagtcattagcgagggcggaggaacatcggggtacggtaaattattacctacagttctctctgtttttcattcacctgattggtgggttgatactggtgctaatattcatgtatgtgctgatatttccctattttcttcttatcaggtcgggagaagttcctccttgttgatggtaaacgggtcacttgcggctgttcatggtgttggtacggtcgatctgaagtttacttcgggaaagaccgtgcagctgaagaacgtgcaacatgtccctttaataaagaagaatctagttagcgtctctactatgtagagaaggttttagacttgtgtttgaatccaattaatatgtcctatctaaatttgcaacttttattggaaaaggttatgacagcagaggcttgttccgctttcctttggctgacatgtgttataataata

SEQ ID NO: 8245 - DNA, 37462 bp, Oryza sativa
agtttccaagtttccactacatatgtagtttgcactacatattttcccgatgaggtaagagaccccattttgccttgtacgtctcgtgtccttgtactagggttttaaatctcggctatagttgccactatatatcttcagctattgttgtttgagaaggatataagctatttgctctcatgtataatttagctgctatagctcctttcagcatgctatagctgctgctatagctgtttgaaaaggccaaccactaaatactttatcccgctatttaaggcgctgtcttgtacctacatgagttcatcctcgatgaagagcaaaattcgctactcgctactcatgtagtaggcaaggcattttgcaagaatgaaaggcggaagcatatagcggtcaaacacgtgtcatctagatctacatcacgagtttactttggcaccctcaataccaaatgcacccctttgtttcttatgtaactagagggagtatcatagttggggacacttcaatttatgcaccttttgtttctgtgtaaacttatttgtaattaatcctgcttaaaactcaatgagatgaaatcacttcactattggagaaatatttttacccatggttcgcaaccccctgtagtcccgattatacaaccggaactaagaatccgggactaaagatctttagtcccgggtgaaataaccaggactaaaaatccatctttagtcttggttggtgttaccaactggaactaaagatggtagcgtcagtgtcggttgatcactattttttttcttttttttttcattgtacctttgctcactacaaatctagaacaagcttgttgtaaagaagaaaacgatgtaattcctgcacgtgccaaatctacaaactacgggtattaatacaatatatataatgccattcccaatagataatggcaagcgacagagccgcatgctggcaaagcccggatgactagtgaccgaccacatttttcttttaagatatgaatgacaattgacgatgaagaagcaatggtggagtttcggcgaccgtatgacaagtccaggagttgactatggtgtttgaaattcatgtagataaatatgaatatgaagattaagtgttttatacaaaatcaggtggtattaacgtataattaattgagtttcaattattacaaatttgaaaaatatacttatatgatattttagagcaacttccatatagaaagttttcatatgaaacgcacagtttgaaaagcgtaacacgaatatctaaattttcatctaacttttttttagagaaaagaacgggaaccagttcaaattgtctcaattcattgaccaaatatatttatggtgtacactgcacacgaactaatattgcatatatacatatatgtaaggtgttaacttcaaatttattttattttaacaattggaaaaaattgtgacaactttaagagcatatatttgttagaattttatcttgtttgtaacggctaaaatataatgattttcaagataaaactttgtagtatataggtgtaatattattaaaagtactatacaatttttttatagattctttttaaaatctattagttgatgcgtatgaaatttatactgtaagtttgttggcatggaataagttgccaaaaatatacatactctacttaaaatcgagtgatgcaatataaatttaggtgggcatataagtaggtataatagatctatgtaaacgctaccgagcacatgcagctttgaaattacaaacatataacggcatgtttggttcgggggagttttttataagggattgggagtttagaaagatgatattataactgttttatttagttgagagatataggacttttggtggaatatggatggggaattgtggaagaaactccctccttttcaatacccaggtaggggtggtaattgggaggaaatgcctcctttactttgcctaaacaaatctcaaccatccgtttttattaatgacctaatctccaactaaactccctaccaatttacaccacctctaccaaacaagaaattgggattaaaaatcaaattcccatattaatatcaccatcaattccctcatataaactcgcaatccccttccctcgacttaaacatacaaaaccctcatttaactatatggcaagatgctttgcctcctaaatttaaatatatagacatgatgcttgcctgcatgtctaacaaactagggttaattagatccatgccattgcaaatttgctggtttaaaaaaataccactacttttcgtgattttgggtgtatgccactgaaactttataaaatttgaaccgtgccactccgtcaccatttctgttagtacctttcgtcatctctaacaggaaacgagcactggccgatgccgccgccgagcatgagacggcgatgacgaggaggtcgtcggcgagggccaggtggtctaagggtttggcaacgatgaggtgcagctcggtggtggcggtgacgagctcagcacaagattggggtgccacgagcaggcatcggtgatgtcgaggatggtaacccggcgagctcgggcatcgagatccagcaccggtcgtcggtgccggtggagaagctaatgccgttgctgagcacgactccctctcgcagctccaccctctgcgtcacctcctccctcccttccctttcttttcttttgccggctgccgcgggcgtcaagatccagcgccggtagtcggtgccgacggagaagctgatgccgccgccgagcacgactccctcccgcagctgcccgcgacggcagcggcggcagtggcggcaacgcctgcgctcccctccaactccaccggtgacgtgatgtcagactcgtcggatttggtggctgcggtcgccgctcccttccagttccacctccctccaccaggtgctaagcttgctaccatcgccggatttacatcgccgccgcgtgcctcctctgcctcgctcgccgaagttgggcgcggggaccagcgttggtgtgggcaggaggagaagcccacgagttgccgcccctgtacctcaagcccacaagctgccatcgacaagaccgcccacgagccaccatcgacaagccccctccacaccgctgtccatgagcccgagaaccgccggagatttgtcgcttactactgtacgtgccggagctggagaagaaatggaggcaccgatggaaatgtaccatcgcatgctcagacggaaatcttgacgggagtggtacggttcaaattttgcaaaatttcagtgacatgcacccaatatcatgaatagtgatggcattttttcaaaccagcaaatttgcaatggaaattggaatggatgcatttaacctaacaaactaacaacaggccattcagttgagtacttgcatttctggaattacatggcgacgaataaaataccgcaacttgctgtcttgccatcaaacctcattttcttcttctccatcgggctgtcctctgccctagctaatcctaacgtcaattcagatgttggcttttattttgggaattggaattgcatatagacggtttgatttctttacagttcaaatctaattcatccggtaggataaccaaaatcataatttgtgctaagtgctaacagtcttcatttgttttccatagcagcagtggtggatcagcttcaccttcacagggagagaaaaaacaacactactcaatttttaatgggagtagcaatataaaaatatttatagcgccatattttttacaaaaaatagtcagcatgtatttacaatataagtccataaattacatatgtaaatttagtgtatttataatgtaagtttcaaaattatatatgtaagtcttaaaattacatattaattacatatgtaagtggcgtgtaagtagaatgtaagtagatgtaactacagtataaatttgtataaagaatagcatgcatgcgtggaaaaccatcgaaagcttgaactaatgaagatgttaagttttaattaatcacagtcgcaacgtcagttgccacggcaataacacagatcttatagcaacatcaaccgttaaaaaatctgactgtaaaacaaacaaatttgtggcgacacaaatacaacctttccgtttttgatactagtgtatattaatctcttggacactagttaagcaaacagtacatttgtttcgttaggtacttcgggcatcagatcaatcggattgattgttcacttgaatatgttggttacaacttacaaatagaatttgatacgcaaaatctaattgatgctatgttatcaatttgacaacatggcatgcttagatttggaattccagagctgcatatggtcggtgagctttcgtttcctgtgttccccagtccggtcctgtatataaaggccacctggccacccccgaaaagaaaagaaaaaaaaagagaagaaaaccaagaaaggcgagagatacgcggagagcagccaactcctcgccttcgccttcggcttcggctcggcgccgcccctcccctctcggttagctgctgctcctgcacctgctgctgctgctactgccaatctgccattctcccccattcgacctctcccccgtttcctccgatcgactcgcttgcgcgcgggggaggtgtgatcgatcggttctctctcaccgcattgtgatcgatcgtctaggtcgtacgggcgctcgatctgcttcgaatcctccatttggttcgtagtttttattccccttgatggcccggacgacgcatggtttggaatttttctgctctaggctgggtttagtgtgggggtttggggtttttgttttttggttggggggatagcgtgttcgttaggtatttgcgctgctctgctcgttcggtcggtaaacgatttcaacggggtgatgcttcggtgtgttagttcacgaagttgaagcgttcgggttgtcggttctactaaattaatttattttcgcaatgaggctgaacaaacgcttcagtttctttaaataatgttatgttttgttcggatggggattttcttgttggaatactttagtttataatccttatgttggaaataaagaacctgcataatcaatatctgaagttaccacgttgctgaaatgtagcacctatcaagtggatttactactgtctactgtactagatatgtacccttttttttctaaaaaaaaaatctcgttgctaccaatgtcttgtgaaattgataaattgattacagtttagtggttcttaagaaatagggattgatttatcaattgtcattcctctaatttgatttaatgttgatttctgcagctatgatgagctcttcttcgtcctggtctaccccaagctttgggttagccagggaatcctcttcattgttgtttacacctggccttgtgcaacacatgggtcctaatccatcgtcatcttggtccacccctgctcatccagtctctgatagtcccacgttttctttccccacgccatttttctgtaagcaaccttttctttcatctttctgttctccctttctttttgtgctctttcatacctgccaactttataaaaaattaacaacatgataggtgcaagttcttacctacaaacagctcattttcctgtttatgcgtgtttgtgcttgtgaattcctgttcttctctatagtacaaatttctattatgtgttctaatgcttcaagatatcatcaagtagtttttttggtttggttatagtatctgtgttgcacatcaatctataagtccaattaatgtaggaaagcctcgtaatcactacagttttgagcttcttggtacatattttttttagtttgtctggtcacatactatatttttattaatcagaacgaattgatgcttcatatttctaatgtagtcgtccaatagtttttgttgatgaatgtcctgtggtaatacatcttgaatgctcaaaaactggctggttttttctaattgggccaggctcaaaaacatcttgatgcaaacaatttgctgaaccccagaataaaccaccgcagtattatattgtattaggcacctattgtcttcccaaacatccatagtgaatgttcaaaattgtagttaactgttatcttactcaccttggagaacctctgagctagtagtactgatgccaatggtggatgatgccaccctgattaccaatatttgatatgcagtggttgctcctgtttagagtaccttatgtatgtctatctttgatgtttatccttggtcgcacagacccttgtttagcttgggttgaaagtgctaatacactggaaggatttcacctactttatgtctctgagcatttgtttttaagattgtgaggaagatgcacatgcacatacctgtctgagtgtcccccttagcacatacttgaacttatggaggttagggatgaatctgtctacctcacaaaaaatgtattgaagcgcgcaagtgtgcacatgaatgcattcactaggatttgaaccatggtaggtgagtcatacaccttctccacctctgtgattggttaattgattgtaaggcaattttgatactaatctattttttcatggtggcatggcttaaaatttgacatgttccatttttttcactttgtaattttcttctcccatttcacttcatctagttcacttcatttttttgtatttttccatcgtaattatataggtgagcctgcgaaaggcagcagggtctatgcttataccaagactgctgatgatcttcctcataagcatacactatcaatttctgcaatgccagcatacataagcaaatcccatgaggagcttcgacatgaagattatcagagaggagacaaaggtataagtgtttgaagcatttttctgaactttagacttgtctatgaaatttgatgagttagaatttggataatgcgatctttaaagaaagcagtgacatgtcactacattttggagtaaactctttctttgttcctagaatttgattgcatcccttgtttgcgcttgcatcctttattattagcctaatgttacaccaaaagacaaattacatagctatttcaattgttatctagagcatctttacaacttactatctgagttcacgcgtccaattctctctagttatttaatctgaagcatctttacaacttattagcaagaatagttaactatttgatatttttttctctagtatttgcatgtagcaaattaaacagctaatgtgagcaataagcctatagttctaataatttatgcttagagttagtattaatggatcatttcctgtgatgatttatgtttaatattttgttggcacatttgctatatgtttgttccttttctatgtattaatctaattttatttgttaactctctaggcggtgatggcctgcagaaaattatggttaattcagctcctgtacctcccatgcccatgttatcatctgttggagctccagttaatatgatcaattcaagtcaacctgctttcagtttgaagtccaaaacaaatttcagtactccattttcaccagcagcaactgctgatcaacaatctgcacagctacagttctcaacacaaaatcactattatacttccaacccattttggcctgccccaataggattggtgcgaccatgttcatcaacaggactgcaatcttccacgccaggtctaaactgtaccggcatcacatcatttccattcctgcccacaaagcaaccgtctgtgggaacccaatcatcaactttatttcctaccacttttgtgcatccatccgtggagttgcaaaagaatgcctccacccactgtgctagctcacagactgctccttgtacgacacacggaggaattctattcggcacggctgcaaatacagtctcattaactacatcatctactgtaagttccttaaatcatggcttgtttgtgaacaaaacaaattggctctaatcattgatatttgtgttggttgacaggagccaaccacatcatcccttggtccaacctcatgccctgctactcgacatggagatgcaccttctactggatttgcatgtcaggaaaatgtattcagcaactcagcggcatatacatctactgtaagtgttgctgttgactgtagtatttatttgcggtgcagtacaagaggaactactatgcatgattattttccgttatctttgtttctcagaggaggcataaatcaaaacttcttcccacctttcaaatccatcgctcgtttttccagactctgctttatatgagaaagataatcttctttgcagataaatgcggatgttcccacgaataccatagatttgctacttccaaataacatccggctggtaaggcttagattttcttcaacaaatgatggtaatggaagtgttgcttcagaggtacggaactgaatctccatagtaaagagttgctctgcacattattatgcatgagtctttcataaaatgatctcttggcccctgtggcttctaaaatcatgttggaagctttgatgctttacatccttggtctcattactatttagaatgaaatgactttgacctttatgtctattcattctgatggtcatataataacataaccatgtccctttttgtaggttcattgtcatcatgatgctaaaacttcagaaacacccatttctttgtgcatatatcctggagagaaccaagagctgattatcaaatcaatggtgcagcctgctaagagtcacactgggaaacaatctagtccaactggtggtcatccagatgatcaaagtggtaattagtgtttgcatttcattccttctgatatatgtttcagacaaacagtttctctactctgactcatatgtacagtatgaatacatcatttatttattttattactccctccatcccataatataaggcatagtcaaacttggcacggtcttcaaacctaatctttgacttatattttctcatatactataagatttattgcaacaaaattataaccatcttaaagtaaatttaaatgtcaatccaaagatattaattttaggaaataaaatttaatttatagtattataataattgttggtcaagtatttttaaagttgaatcttggactgcgtgcatgtcttatattatgggatagaggaagtagcaattaaggagcaaaaatatgatcactgaagtgtggtgtaatttaatgttagggatatctgttgtgagtagtgaaaaatacattatcatttctaaagatttatctaaagatattcctataaatgtaaaggtatctcagaactgaacacttatcatacaagttcgatttttggttacttcaggtcgcagcaaagtatgcaacagtgctgctggtctgccatcgtcaggacctggtgagaatcagaaggggaatagcagtgctggtcacaagacaccaaagtctccactggctgctcctcgttgcgaagcgatagcggagtctgtactgcctcgcctgtacagcgccgattactacaccgtgccatctattgtggagctcgccgtgggagagagggacgagccaggctattgctcacatgtgaagggcttcacggtcggcaggcatggctatggcagcgtaaagtttgatggagaaactgattggagaaggcttgatattggatccatcgtggagttcaatgagcgtgagattattgtgtacagagatgtgagcaatacgccgcctgttgggcaggaactcaacaagcctgctgaagtcactcttctgaatgtcaagtgcgtcgaacagaagaatgggttgcagttcacagaggggccggcagttgataggtacaaggagattttggtgcagtggacaaaggaccatggcgcagaatttgtgtcatttgacgcggccaagggagaatggaagttcagggttaagaatttcaatatgtagagtcctctgagaatctataattctcctatcagtaggctcctgtgtctggtagaagtaacaacatagtaatcctgtaaaaaatgtgttctttttgtagttcggtcacttggtacggatagctggatacttctggacgaaataactttagctataaaaactgcctttgttgcgtaattttcaattttgcgcggttgtaatgattttgttagcgtttctgtcagcctggattgagttttagcatcaactctaaaatggtaaaggcagtattattttcttaaaaacaattacgtgtaggagtaacaatatatttatcctatgatctctactcctggaaatagatatgtagtcagtggttacaatgatttgagtaacatctcaagatcttgagtaaatctccatagtttaaattttaaaacttaattttagaattgtttcattttaattctatttttatattgatctttgaaccgttcataacacacatataaaagtattattcattaagttcttttagttgtttcattccttttttttccttttttttatcctataataaacaattatgttctaccaatattattctgaaacattcttttataacattcccactttgctactaacagtattagacaatatcttaggaacaaagtagccaaagtagaatggaggggggtagtttgcacgtctgtcattcagatagggagaggctgtgggcatgtggatgtggcctcaactcgtgcaaggatttaatactctgatgaaatttacattgcttatattttccatgtcctcaatatgtgggtacagaatatatgcaagattttagcagtgaagttgatctgaaatgctaatgtttaaacatataattgggttgcaccattttttttaacaatacaagtgacaatgtcaaggttgttaagcacagtaggataggatttgttatgatttgcaagatgtcaagttaccttgacaagtgagagcgcatagtttcttcctacgtaacacacgaacatttcgctagcaaataaataaacgctacatctcaatacatgttctaataaaatcatacatacagtgtattatgctcagcatggtatgaagtgttcgctaattgttaaaaatcaagtttctggctagagtatatcctatattcagcaccaatattatatcctcacaagggaaaacaaaagggttatttgacagcgatgaacaaagatagcgttcataggaaacacggtgatgctccatatgacaagtcacaggaattttctttttcagtttgttttttttcgtcaaagggttcccttatgggcaatatcttgatgttaagtgcaactctgcagtgaaaagaagtcctcggcatagcaccacttggaaggataaaaaacgtacacacacaattaacttacccgttctaatcatctagaaagagaggataaacttttggttttttatggcacgcttttcaaaatgctaaatggtgtgtttcgtgcgaaaattttctatatgaaagctgttctaaaatattagattaatccattttttaagtttgtaataattaaaactcaattaattacatgttattataacctcgttttgcgtaaaacacttaatctcatcttcaggagattcaaacaaaacgtagagtgtcaattgacttggggcgtatttactttcttaatattttcaactgtaccaaaaatttattttgaaatattttgacgttgtgttgaatgtgtttgctttgaggcttgccaaattttgatgttgtttttacgagagaaaacatcccgaattactaattcttttagggtggtaatgggaggctatgtttagtttgttagccctgaaagagaaacactaagagtaggtacaatagcaggttataagctagctataaacatattttaaagagataaagaaagagatggaagagcagcgggctacagatctgtagccagctatagcacggactacaagacgtaatgtgtgtatgacaggtgggaccaggtattaatagtatagtaagcaactagagtatgaattagttattacattggctatagatgatttggagctagtagtgggctatactattaaacttgctctaatgtcgtggtggtggagtcgtgggtgtataactttacccactagggttcaaatcctggtgtgcacgaatattatgcataggtaggtggactttcaacatgattttagtgaggttagagatatgtcgctggttttcgtctattagagcataggttaagagatacattcacggggtgtgagagtggtgttacgtctgtagtgaaaatggcaataaatcaaacatgccaattattggttataaatatgacttcttaattatgaaggcatattattttactaaacaaaaggatcgaagcttaaaatcagtttaagagacatcagtcaaacatggcacaaagagctataagatggaaaccaaactccaatagttcttaagtttctttttttttttaaaaaaaatctcatacattgattagtactctacaaatgtcatcacacctgttggtttcctggttccatagtgttgtattttggcttccaccacaagcgcaatttactcattgttttccatttctatatcttccactggcggcttattctcctccgctgcatcaacaaccaaaggtgagtccggctcatcatcctctgaacgaacaattactattaggcacaatgacctctaccggtgcaataacctcttccggtgctttgcattgaccactattgcaaacattatcctcttgcacgtcctctataggagtttgttctacctccgtgtgacttgtctcgatgattccaaaaatatatgttttcttctgcaccaatattttcagactataccctttctcccttattctagccacaaactttctccaactctcaataaatgcaagctccattactctccattgtcatccatattcaccccttactggccacacaacctttatgatatttttttcaaacactggatcttccccagacatattatacaaccaccctaacacgtcgttcaaaaccaactgctccggcgcattcaggctagtatcaacaaagatcgaaaccaccccgctatcacaaagttgtacatgaacatcgctataatatacacgaacggccacatcacctgacatcctaagaaaacatgacagattatcttactacattactacccaataacatcacctgtggtacatttttactctaatgcaaaataactaaattcgtcactactaaaaataacttcatgttgatttctactaatctacatttatttttacttagtggacactactttcaaataacttcatgttaatgtgtactagtactccatgtttatttctacttagtgctcactacttgcaaattaatacattgctactcacctaaaaatatatgtactaacctagtactaacttcaacatactactaatttaatatatgtactaacattcaacaatgattaacaaatcattagtgtcgtacttagggattataaatttatacctccagcgttgctgctctcttctgcatagtcatgggcatcgcatccccttccagccgcgcagatctctcccgcgacgatggcagcccgatgagacacttggtggtcctcgccccctcaactccaaaaatgacccttgtcgaagggtggagagggggatttaaagccgccagtcgaacacccattgtttgataggggcagtcgcagggacctgttgacagccacagttcaatattgtgcgctgggacctgttgacattgcacactgtcagatgtgggcccagtcgaacactcgtagttcgacaggtccagtccaactccttttgttcgattgcttccacctgttgaagactcgccgtttgataggcacctgtcgaatttcggcagttcgacatggccctattttgacaattatttttgggtggccatcatttttactattttccattaaatgaatattatttctgaaaacaattccacataaataataagctatagagtttgtgattttgctatagcttataacaggaagccggagtaacgagataagatccagggggactgggaaagtgcgcaaccaaaacatccaagaaaccaatcaaatctcgctggaagaaagcataaatactagacaaaaaaattccatttggacgaacatatatattccaagaagttggtggagactgactttttcttgggtagaatatttatacatgttgttgcttttactgaaatatgctgtaaaggggatactgaatagcactacagctagctaggtagctcaacactagtccagagaacataatcattatatcaaacaactcttgcgccatatgttcatgtttgattgaggagaaccatatgattgtgttaataaacaatttttttggcaagtacgtacggatgcaactccttgagtactcacaatcaaaatattatcagtatattttaaagtaaaacgaaggattagtggattaattgacaagagatgagaagtgccgattaatgaaggaaagctccccaatgtttctctctttcgggttgtttgaatataatcctgtttcgtttcttccatagattttttttttcggcgaagacatatttatttcttccatatgcttgacatgacatatatatggaccggaaccacggtcagattcatttctcgactcttgaatgatctgtcgtgccctacgttgagccaggatttgtggtgcactacatgcacacgtgggtacatttggtggtaaaagcacatagggattagctatgtatttatcgttaattttttaagatttttaaaagttacaaataaattataaattataagttaacgatataatttatatgtaacttttaaaaatcttgtgataacatattatttccgtgaaacagatgtgtcataacggaatcctatatgcacgctatgatttttaaagtaaactaggaatgcgtcatacgccaagtttgaggtatttataaaagcgagatattaaccggagaacatctgccacgatttctccataaattctttttgtcagtattaattaattgtttaataatattttaacctattagcttcatattatatcatacataagtaatatctataagcaatcatttataatcttcttcatcatttgaaaagaaggcagatgtattttcttaagaaaacatgtcaacgaaagtaaagtaagtataaaatagaagcaatgtgtttttttaattgtataatatattatcataatatgttaaaagataaattgagtgggacatgaagctccacgaaatacatgggtttatatagcctaatattattgatatattttgagaggcgatatatctatgaacatttcatgtagagtggatgagggactccacgcaacctagtaggaatacgataacgacgaagtatcattgcacagtaatattttttaaaatgtcatgtaccataaataaacacttttttatatataagatagatctaacagatagaaatactggttctaccggtttaagaggcataggagtattttaaaaatgtagcttaaaaattatggttgtttttatatccaacataataaagtgagcgtagttcaactggttagatttcttgttgtgaaacttgcccacccatgttattaatcaaaaggtttaaactctattatgattttttcttaaaaatgcatggataagtgaacaatagctatagttcgtaaaatatatatgactaaaagtaatgaatttctttaataatatagttaatttggatcttcaattttaaattttatagtaaataatctaatagtgtgcacaaataaaaattatctatatgatttagataatataattgtttaaaatttgttatcataaaatattttttccatataactaaaagaggaaaacaggagagaagaaatatgtggggaggtaagtacacacatgcatactggactggacaggcggagaggatataggggccctttttttatcattttgtatttggataaatcataaaatattttttccatctaactaaaaaggaaaatagaagagaaaggaaatatatgggagaggcacataggcatgtacgcaagcatacgtactggatgggaggggtgggatatgtgggcccttctttttatccctttctatttggataaataaatctaatggtagaaaataatgggtccatagtatattagtaaaaatcgacggctaggtgattaaatgtcacgtggcagtataagagcgattgtaggagtgctatgtggcggcgatggtcggatttctcttatttattagagtgccacttggtgacttgagagcatttacaaggtgccacttggtggattgggagcgtttgtaggaagtttaatgggctcttagtatataatagataataaataaattagaaaggtagcccgcgcacatgcgcggacaccttcttatataatgtgagtgaaattttattatgaatatttatgtgtgggtggatttttattaaaatattttttattatattctaaactaaaatgaaactcattttgtgtgctttgaacgctggttattttttttataactaaccatgcaacatataaattctaaaataaaattatttgagataatgcggttttgaattggtgagaaaatattgcgttgaaacaatgcatgtggtttctatgagaaaattttgggtattttaactcgctagaaggatatcttacaacccaaaagaaatcaaataataacatttttttattggattgtattttaaaatttttctattaagtatgggttttaaatccagcaacgtttgtccaattttcaatttatttcatgtccatttttattttttttcttttggagattttcattctattaatcatccttgaaatgatttgatctttacaatttgggacgaaaatacaagtgcatataacctggtatggggtaaaggcatactttctaaattttctctcataaaatattaaagtaatggtcatagtgtttttagtgaatatcactaaagtggattgtcttgtaacaaatacacatttttagattgttctaagtcaagactttacaatggactgtagcaagttttacaaaaaataaaaaaatggacatggtctttaatttctatatggaattgaattgatttattgctaaggccactgcacccatatgcttatcggtatgatgttcaaccaaccacacctttattttcaacatattgtctatattgctatatgaatatttgttatgattagtgacttcatagatgatatgtgtaattcggacgctatgatcatctttcttaataatatttattgttctcctaaaagatcatcttaaaagtatcaaggtcaatttctataggtacgtagccctcatatgcatgttaagagaaatcaattaagttgataaagagtcgttagatgcctaatgggatataagtaatagatagaggtccatttgtgttttttgtttgcccatataaataactttaattttaattgtcaaggagataaaaaaaatagagagaaaagaatggtgcatgctgtacacgggcgggagggcgggaggtttgggatatttttataaatgattaatctaacaacctaaaataatgtgttagatttgctaaaaaaataatgtgtcagatgtttatgtcgaaaccgatggtcgaatgttttgttttctggtcagaaattttacaattttatctgatttaagagaatgatgtaacatcttaagagtgtttataacatgtgtgaccgtctattaacaccacatgccgcaaagaaggatggagggatggatgtttggggtgttcttcttttaaacaatagatctaataacctaaaataacgtgtccatctttttttatgtcaaatccgatggttggattattttttttttgcaaaaattctaagatttttctctaatttaagaatgtcatatagcagcttagaagcatttataagatgcttaatggattttaatgctgcaaggagatggggatggagggagagaggttttttcgtattagaaaactaacaaatcaatagccgaatgctttgttcttttttaagattttctagtattttctttaatttaattgcaccacctagcagcctagaagcattcgtaggatgtttagagtgacagagtgagagttgctagatctagcaggtggaggtctatttgtggttttttaatgtaaaaataattttgattttaatttctcatgaagatagctcgttggtgcgtacgtgacggggaagttccggatgcatgtatttaagaaaaagatctaaccttctaaaataaaataatggatccaccgatttaaatgaaaatcgatggtcggagccactcgacgacctaggagcgtttgtaaggtgtcgcttggtggattaggagtatttataggatgtttaatggagttttagtatataatattatttttctgaaatttctaagattttttttgatttaataatgtcatatagtagctagattagaggtgtttataaaatgtttaacggattttaacactacacgggggtggagagggatggagagaggtctaggattttttattaaaaaatctaacgacctaaatccatcaatttaagtagaaatcgatgatcgggtgcttagaattttttaatattttctagtactttttctaatttaatagcaccatgtaatgatttaaaagcttttgtaagatctttaatgtgacggagggagagctgctagacttagtagttggtctattttgtgatttttgactgtaaaagtaattttgattttagtttctcattaaatagaaaataaaaggaaggaactgaaagggaaactcacgtacgtacgttcggcaatatgatgccaaaaatattaggtatgttggttccagaggttttttttttttggcaaaatagttctaaccatccaaaataatgggtccaccaatttaaatgaaaatagattgtcggatttctcttatttattagagtgtcacttggcgacttgagagcgtttatagggtgccacttggcggtttgggagcgtttgtagaaagtttaatggacttttagtatataatagatagatagatagatataacgattcaaaaactatgtaaaagttacgtgcaaatttacctgtaattacattacaattatactatatttacatccgagaaactttttttaaaaaaataacgataaatatatagcaaaatcgaagcggtatccatgagacacgagggctatatatgcccctaatatcttagagtgcgctagaacgtatcaaccaaaattttttatgatttaaccatttgaaaaacttgttttaaatagaaactgcacaaaaactcgattgaaaatacatagcaagctctcagaccgattagcggacatgtgtgtgggtgagatgtgacgcatgactctctcttcatgtttttttaataaagataatggaaagttacatgtctccttcctcccttgcgtcgcatgagtaaccattgcatgattagcagtagtagcgtggagagagagagagatttaccaggtcattcatctctatttggatcggcacagctactacttcggttgattcaagggggaaacaataacttggattagtttctgaacctttttggcttttactgcatgtggctctgtcatgcaggtattcatgccataagttaatcctaatttaaaaaggcactagtgtcaatcattgtccgtataccgatattaaaactctaatctgattttaataataatacatgctccttctctttcaagcttttctggtgtgagcggatgcttttccataatttatccgcagtgtacttgtctgatcttgcatatctgtgcctcccagggtactaattgaattagagtataaatcagtgcttttcggtgattaatatttgtaatgccatagctccccaccatatcgttcatttgttccaacatcaaatttcttccttttctccactcagcaacactggagtgaaagaaaaaacatgcacgtcatgtcaagcaagtactacacacggctctcgctctagtatttctgcaggcattctttctctcttttctttttaatctttaatgacttaatatttcaattcgccaaacgataattgcatttctagtagtatttaaatattatcttatgaagagtgtacttttgaatactatattttttaagtactatagtacttgctctcatttattttttttctccttttatcccaaacaccctcctattcccaacagttccacctttaacgaggaccatgtaaatatttttttttcttccatgataattgtttttaaattctagaattgcacttattataggatagagtgtatcatggtatgttgcgagctctcctttttagtatctacactggctaatttagcttcctactttgtggctgtttttttaaggtagcatattctaaataaattattcatggataaaatctgatagattatctacttgattgtagggaaaaaactatatgatatgttataatcctaatatatagcttaaattaagtgatctaagtagaatcgtcgaataaataatccgtggtatagtccgatgtataaacataaaagaacaggactcttgaatgaatgagcgaagtgtagatattgtacattggtcttgatattcttacccaagttatatcttggatcaccgactcgacgaacaattttttcacttaagaccagtttttacaacaaatatttttagtttagactgatggttcacatgtcattcagtttagaccgatggttcacatgttagtgagattaggggataaatcggagagcagttaggagaatgctggcaagctgctgcttcttcttctaggcttctatgctggtctatatactcgagcggtttctttctcccactgtttgtcatatcccccaattttatatatgccaatcgactatcagatcaggatatttgtatccctaacgttgttagatagaacttgatgtcaccggcagtggtggacccaggtcctaggccatagcaaagggcctaggacctaggcatgagaaatgctccggtgcaatctacttgaagtattctactccgagtagaattaatctggaccgtttattttatagggtagattagtaatctcctaatatagtttaggggtaatttgcataggatgttttcttcgcttcttcgcatcaggtccgacgcatcgcatctcgccccaacgtaggcaccgatctctccccgatgtagtcgcttcctcccggcaggcagcggcgcgacaaaaatcgctggcggctcggccggcggcgctgccagcagctcggcgtggcgaaatcctcagtttgcagacgtgtttgatttggtaattgaggaatatagtcttaggaaagcatactagtaggctgcctgatttctctgttcagacagatgcttatatttctaatctgatttcactttacaggctgcgattgatctcaacaagaacgatctttccgatgaatgccatctgaacgatatttgagagatgatatagctttagttagtcaccttagcgacggacgggtgaaatagagtaatgtcaggaacaagtttgattgtcaggaacaacctagctttatactctctctttggatcagaccgtaatactatgcaaagtgagactggttacgtcgcagacaactgtttaatcacggtgcgattagggctaatcttttgcatctttttggtgatccgtagcttcgtggttttgcgattcaatagtgtctaccagatctttcccgtttccagatcgtcttgatggcttgttggtgtgtgcaatgatcaaatatttgctgtcaaaatatcacgtgactgaaaatgcagccaactctgattgctaacattacatcatctctgattagcaacaaagtgtgcagtttgtgacatcagtgtccatgaaagcttccaggctttcccctggttattgccaaaaatatagtcctatttctccttatctctagaataattttggtaagtttacaacgtttggcaggaggaacgcacaaagactgcatgagtgtgcaaaaaatctgtccatattttctctgaatttgtactttgtgttaggtactacatttgtgggcatcccaaatggccaaatgagattaatataaggtgtggtatttcttgtagcaggaaacacacaccaagtcaaaccaaacagcaaaccaacatgcttgtgctatattcagaggtgcagtatttgtgcactgaacaaaaggcatctcacatcgctgtcccttgataattcatggatgtcaacagtatttcacatctgaacatccgcgcgtgctcctccacggccatcacctccgcgccacgctgccgtacccacagcggctcgccggcgctgcacatcctggcgagctggtccgcctccgtgggggcaaggtggaccaccaactgcttgtcctgctcctgcaagggcgccatgatggcgcccatgtacgccaccgagccgttcgcggctatctgcagtggcacgacgggtggcgggatgaggtcgccgcagcccatgcgcggtgcatgctcggcgagggagataggacggcgacggaggcggggatggaggggaatagcgtcggtatggagagaaatgacgacgatacgataggataggaagagggtgagtaagatactaataaattacgataatacccctatgcgaattattatttctggacaaaaatgcctctccacatttatacttccactaatcctagtgggagtagaactaaatctcaaccctacaattaaagatgatcaacggctcagattactttctactccgagtacaaagcaccggagtaggactagcgtttttttgacaaattggtccttgcagaaaacttatttcgaaactagtccctaccaaaaactatatccagaaataggccgtcggatcagcgccaaagcggttggcgctgaggttgttcttatctgcgccaacgggactggcgctgacatcgcgccagcgtggcgggcgaggcgcgatgtggcagggcctcagcgccaatgcacttggcgctgacaccttgcacaccctaaatagaccgatgtgcggcaatgaattaacggtgtcgctcgtggtgcaacggtaagtttctttcttgctatatctgaggactagggttcgaatcccaggtcagccatttttgttttttttaaaatcatcaatctacgtgcgtacatattaatgatgatctccattttcgtttttgtcttcaaatcttcaatgtacttttttttgtttaaattaatttttattaaaaagaaatatcacatttagtacaaatttaaaaagtagaagaatggattaaaaaaagtttagagacaacttttaaaagaaatatcacttttttataaaaaagaaattagaagaatggatttaaaaaaacttgagtttttttttaaaaaataaacaacaagttgagaactaagggtaagttttattctaaaatgtcacgtgtttttttaaaattaaaacaacacttgagcttgtaaaagaaatatcacttttttaaaaaatatttaaaaggaataacacatttagtacatatttaaaaataaaagaatggacttaaaaatacctgagctttgaaaaagttaaaaccgcaagttgagaactaagtaaaaaacaagtttagtaaaaacataaaggagagggttcgaaccctggtcactgtaacgccacctttcaaatacctaccactgagctaagccaaacctaattgttgcttttgcttttgcttttatttagccagtataaaggccagcgccgctgtagaacatatattctgatatttatatttatatatatatatttaaaaaacagagagcatcattaatcatttatatgtactaatgtacgcacgtagattgaagatttgaagaaaaaaaaagaacgaacaaggctgccgtgatagggagtcgaaccatggtgctagggtacacaagcaaatggtcataccattgcaccacaagtgcattgcttattaatggccgcgcatccttttaattagcctgtacaaggggtcagcgccaaatacattggcgctgaggccctgccacgtcgcgtctcgcccgccacgctggcgcgatgtcagcgccagtcccattggcgctgatatgaacaacctcagcgctaaagaggttggcgctgagccgacggcctatttctagatatagtttttggtatggactagtttcgaaataagttttctataaggaccaatttgtcaaaaaaacgggtaggactaaggcatcaaaccccattcagaagtcagaacaattcattttcaccatgtaaagacatgcgtcaaaccgcatttagatcaattcatttttagtgttgggtacgtttggttgtttgctaacctaagctatagcccagttgggcaagccacttcattgctgctttgctaggcttgccttgcctagctgtttagttcttttgcttctaacggtaataccgattgtcagatgttcgttttttccaccaagagattagcttaaaacaacaaaatatattcattttacagtatattgttacaacgtgatcacgggtaggcttgccttaccaactttggcaaaggtgcggaataaatctgtgactgtgattgcggtgaagcgaacgagaagtgttatgtgcggaggaatagggaaggcatgcaggcgacgataacataacgaaacatcgttggagagtgaaaattgttggagtcgctgatttacagcggcgcgcgcgtgaagcttgtcgtcgatggcgagccgaattcgctctccctggctagcgagctttttctcgctgcttcgggttagcttgcctgcaagagctaggaaattttgatagttccaaatggctggcctcaccaagttaggctagctgttccaagccttagatataaacataccgtaactagcctagctcagttcacaagcttaggtttctaatcctaaagcatcgctaaatatctatctatctattatatactaaaagcctatgaaacatccttaaaacgccctaagtcgacacatggcacccctaaaaacgctcctaagctgccaagtggcgctctaataaattagataaacatctaaccattgattttcccttaactcggtggacccatcagttttgaccattagattaaatttccatctctccaccctaatatacgatgcttgcatgctttggtcccaccaaaataattagttaagagtaaacaaacgtaaagaatcagttatttctctccccaaaaaatcaccgtggtattaattcttggaaagaaaaccgacgttgtagatttaatgcaggagcctgggtgtgtgcttccatcatccaaaaaattataccaacgaaaactttttaagtgaatatcacctttgcgtcaaaaaagtgaatatcactaactgctctaaactatttacagagtaaggttcagattcatgaatattgccctcaatagttagtttctgaattttcatgtttttgtttgattaccagggcctgatgaaattttcacggatgctaaatctcactacattaaattctcatctctcctccgtaatatatgacggtttcatgctttggtcccaccaaaataattaattaggagtaaacaaatgcagagaatcagttgtttctcacccaaaaaaaaaatcaacaaataaattttcagatgcaaagccataggaaaagaaagcaatgcgcctctagcttactttttcgaccaatatcaacgacatccatctacattttttcaggaacgagcagcaacaaccaaggttgaaacaatcctaatcgtatcaatcaggtgagtggtgcaagcagcaacttccatctttttattgtttgatctcttaacatagccttccacttctctatttttttaagcatataatttcgcttttttacctacaattttatactactccttggtgatgttgttcgtattctgatctgttgctactagcttctacaacaaagcgatatatcaaagttcttgcctcttggacaatatattcactaattaacatcgggtatttgggtgatgtcagtttatttttgagcacttagtcaagacgtcttgatgctgtgtgctttgccaccagaaatttgttaattgattttttagataatcattttggaagggtaatgcatgccgcttttttaggagaaacatattacaaacacatgagtttatatacatacgcgtacacttatccatagaaaacatattcgagagactgagccaatgatatatcttcaaattagtgaagtcatcataaacgcctcgctattgataggaacgttgcctactacaagaataattagccataaatataaggcccatgtcaagtctagatcttaaacctaggtgggtaagttcaccataggtaactaaccagccacactcactaattgcagataatgtggagcccctcttccctctccttaactccttttttccatatattatttgagataaatgtagtatataaataataaataaactattgtattttttaaattatatatagaatttttttattcgaccacaattatattctttagaattaaatcagttcatatcgatttgaccaattgcgttatatctcacagacaaaaaaaacacgaaaacatatgttatagtgtcatatatcacattataatcataaataactaaaattagctctaatatgtttgaaaataaagtttactaaattatattatttaccattaacttaatttatgatctatattaactatactttaatctgtaaaatataaattttaggtcatatttttattcttggtctgtaatccaaacggacatgaaaattataaaaaaagatgacagtatggagtatatatcactatatattctttatcggttataataatatgtaccattaaattagatttacaatataacaagaaatatgtcatatctttgcgctttacatggcatttgagaattataacaaaacgtgaaaaaacaatttaatgatatgggtaatatcatcacataaatatgcttactaggtagggtgcactctatttggcccatatcagttcacaaatatacgcgactgaattagatttacaatatcaacaagtagctagtcacatccgaggccttgcatggcaatcgagaattatgacaaatcatgataaaaaataacaatatggattatatgatcatataaatatacttatcatgtggattccaatctattcggactatacggggataatctaaaatgtcaattcaatttaccaaatcatgtataagttgtacgttttgtagactacaccctaaatattaagtaaaataacggatggagtacacatcgtgttttctcacctttgatttctattaaatacgtatggtgtgtgggtattttgtatatactaagttttgttaattaggggacataaacaatactaaagttatatatgagaattcaagcattaaaaatacacttcataacatgaacgtacttaacaaaaatgtactttagtctatggtgcttaaatatttataaattctctaaacatactaattatttctgctcttatttcaaactaaattcattttctccacataatataagagatcatatgagaaaaaaagaggagggagaagaagtaaatagaagtctgccattaaacagatagaataaagacatctataacatacaagaaaatttgttgattaaggtttataaactccaaatgtaagatatgctaatttctaaaaaaacacacacatggtacacataatagttccatatgaagcaacactattgttgtgaaacaatagtttctcgtaaattaaaaaccacatggtttaaataaatttgatttagaatttatataatgaaaaggtaattagaagaaaattaaaagcgacgttcacaacaatctcaaataaattattgataaaaaacatgttcagaatagagtaaaaaaatattttaagaaatactcatccacacataagtatttataattaaaattcaagcaacattaaataaggtgtcccgcgcatgtgcgcgggctacctttctcgtctagtgaataaccgacagctcctataagatttataatccaattccctttttcaaaaccaattgggactacctaaaaaaactgtcgtaagttttttgagaggaaaactttcaagagttatattgtaacttgcatataactatgttgtacctcctccgtttcatattacaagactttctagcattccttacattcatatatatgttaatgaatctaaacatatatatgtgtctagattcattaacatatatatgaatatggataatgttaagggttataatatgaaacgaaagaagcaactcatatgtaacttagagtatatctatgaaagacttacagctagcacagtggtacaactccggtctgcaaactgaagatcgtgggatcgaatcccagccacacgcttgctttgtttttcctcatccttgctcttgcacgaatctcggagcaagatctaatggttaaaaaacgcaagttttctctcctaaaaaccgtcgacaacaatgtagcaattccgaaccaattaagcacatataagaagatgtactttgcattgaaggagtaaaatctgaaacatgtgcttgattatgttgacatgttgaagaagtagatctatattagcaccttgcattggagatacatagggccaatcccacgtgaagaattttttttccacaactagtcaatgtattacaaatctagaaaatcagaaattgcgtcgacatcacacttagctgtgttggggtagcctgtatccaaagattttccttaaaattgattgtgctccaaaatggtttatccccctccagccctgcagcttgattagtccacaacttgtccagcacagcaataggccccaaaagtgtatagatgctcatgctctcgagtctcgatcacacacggacacagagtctccgccgcattttcttcttccccaacctccacactttcgtcctcccccctttctcctcccccttccccaacccacacccacacacacttccaagctagccgtctccaacaaccctccccccaccatcctccccatgtcctcctccctcccctctcccctcctcttcctcctcctcctccttcccttccccgccgcggttcgttcccagccggcggcggcccccgcgccgcagcagcaatgcccgctcaacttcaccgcgctccggcccttcctggcccagccgctcccgcccgacgactccgcgcgctgtctcctcgccgtgcagtccgttcgcctcctcctcgcgctccacctcgccgccacaggatccttcgtcctcccggctaactcctcctgcctcccgccgctccgcgccgagctccccttcgcgctcccgtcgccctccgcctgcggcctccaggggctcgacgcgctcctcgcgtccccggggtgcgccaacgtttccactctcggggacttcgacgccgccgtgccgccgtcctcgcgggcggacatgaacgccagctgcaaccgggacctcaccccggtccccgactgtacctcctgcaccacctcgctcagcaaggccgcggcggcctacctcctcccgggctcccccaacgacggtgggaacaacgtcaccggctgcgtccagtaccccttcatctacgccggcgccgccgccagcccgcgcggcgccgacgacccagccacggccaactgcctctacctcctcaaggtgaactctgcttccaaggccagctccagcgtccctggttgggtctacggcgtcgtgtttggctgcgtcgccatggttctgctcgttgccgcggcggctgcctcttggttcctggtgcggcggcggcggaggcgggccgccgccgcggcgctggccaaggccgcggccgacagcaggagcaagcgctcgcaggcgatggagtcaatcagcgcgagcaccacgctagtccagttcacctacgacgagatcaaggcggccactgggggattcgcaagggagagcatcattggccgcggtgggttcggcaatgtgtacaagggcgtgctcccggacggcgcggaggtggccgtgaagcggttcaagaactgctccgcggctggggatgccgcgttcgcgcacgaggtggaggtcgtggccagcgtccgccatgtcaacctggtcgccatccgtgggtactgcatcgctaccactgagagagaaggccaccagcgaatgattgtgtgtgacctgatgcacaatggcagcctgcacgatcacctgttcggtgccggggaatgccagatgacgtggccggtgaggcagaggattgccatagggatggcgcgcggcctggcctatctgcaccgcggggcgcagcccgccatcattcacagggatatcaaagcgagcaatatcttgcttgatgacgactttgaggccatggtggctgatttcggattggccaagtttgcaccggaagggatgacgcatgtgagcacaagggttgctggcacgctgggttatgtcgctccagagtatgcactgtatggccaattgactgagaagagtgatgtctatagcttcggagttgtacttcttgagcttctaagtggaaagagggcatttatctctcttggtgaaggccagaactttgtgctcagtgaatgggcttggttattggtccggagggggaagacagtggatgtgatccaagaaggaatggttgagcctggtcctactgaggtaatggagaagtatgtacttgtcgcagcactctgcacgcatcctcagctgcacgctaggccaacaatggatcaagtggtgaagatactagaggcagattcagcgtcaggtcctttaattattccggagcggcctcttccggtagtcgcaaacctggctgagattgagagatcagccagtagcagtggctcaggtcagctgtttagtccctctggtttccggtcttttactcatataaatgaagatgctgctttggagtctcctaaagaagaatgacacttttcttagctgagtagagaaaagtttatttctagattctctgtgtaccatattttttttgttagcttgatttctcttaatggaattactcaattgtgtagatagaaattgtacttttgcccccacccaggaaatgtaagattctttggtgacagttgaattcatttaaaacatatctgcttttttatttctttatcatatatttgacatttaaatatcattgattcattagtgtggactgtttttttctattggatcgtcaagatgagaaacaggaagattaaaacaattccctgttataaatttagtttgcatattgtagaacaaattgtgctatggagttcaaaggtacctttcacttctagagtcagataataagaataaatacattatatattcatattcttctattgaattgtctcgtatcttgaaatcggtaggcatagaaattctgaaatttttacattttggtcctttttgaaaacttattttacaaatagacccctgggaaaacttaaaccggaaatggtcctttttgggacgccagagtggctggcgccgtaccccaacatggcggcgccagccacactggcgccgtgcccgtgccaccgtggcaatagggctgtcgtggaggtgctgactaggccgaagggggcgccagccaaagtggcgctgcccctcatagcacggcgccagcatggctggcgcgcccctcctctgcgggccccaccaactttctctcccccccccccaaattttcgccaagtctgttctgcctccaggcaacggctggcgccccccctcccgaccgcggcgccagagtggctggcgcccccctcctccccccatcgaagcccttctgcctccgggcctcggctggcgccgccctcatggaccacggcgccagggtagctggcgccgccctcccccagcccgaaacccttctgcctcgcggcactggctggcgccgcccttcccaacctcggcgccagggtggttggcgccgccctctgcctccctgcaaattgaagatccatattgcacagatgtaccaattcacagttcgcaattcaaatcacaattcacagattcgtacagactaaaacaggttccaattgcacaaatcacaatgccaaaagtccatcacatagtcctcagatagtccatcacatattccacacatcaaacaatgccaaaagtccatcacatatcccacacatcaaacaatgcaaaaagtccatcctatattccacacatgaaacaatgtcaaaagtccatcacatagtcctcacatagtccatcacattttatatcacatagtgcaccacatatgtcatactaccaaccaatagattaacttcatacaaattacttcttccgttggcgccgaattgcttgcgagcccggagtgtacctacatttgaaaatccaatgtttaaaacattttaaaaacaaaataagggaaatcaaataacatttgagaatggtaagctcattttacctctttttcgctgcccgagtggatcgcaagttgtattgcgtgggttgcgtcccctgaggcgcgtcgggaagctgtgacatgtctatcttctcggcgtctggtgcgacgtagtcctcatcctcctcgtcctcatcgtcatcgtcgtcgctaggtggagccggcgccttcccctttcccctcccttgcttaatgcgtgacgacgacgagccaccaactccttcacgctcttctatcctgatagagtgtcgagcagtacttggacgcgcggattgaggtagtggtggtggtagtctccccggttggtacacgtcgtccaatccaaccgacctgcaacctaatcttgctgcaagtttccggcacctttgacgaactttctgcatttcaaaaaaaaaagaagtttgttaggcataactcaagtaatgcaaagtgctaaataaattttacctctaaaacattgcggagcgtgttctccgtgtcctcatcacccctcggagcttggagggcatgccccatttcattcacactcctgaggagctctctcgactgaaagcgtgaaaagatatatgttagggtctagggtgcaaatggaagtaactttgacaaatgcaagaaaacttacgactctgtctctaagtggggcgtgctccatttgatatccaactctagtccggacatcatagggattccgtccctcatcggagtcgcggtcatcctctatgtcggcttccgtccaagtagggcggaggaacagtctatatgtcctatgcagccaacgaaggtactctgagaaaagatgattttggtgtatagtctcgatgtacctatcgttccttccggctgttctccattcatcaatgtatctattatgctctagcccccagtctttcaccttctttgttctcaccctgtcatacctagacaagtagaaggtgatgaaacagtagtgagcatcgacaatggttaaatggtacaaaattgaacattgacaatgaaagcaaacaaagataagaaatatttacttgtgtaattcaactccagttgagatgtcctcaaccggccaatcttgtttcttcccgaactgtcgcatgacacggtgtggaaggtggtactcaactgcccagaaacaaatcaatgggcactggtacatgaaatagtcagagtctcgattgcacatcgagttcagggtcaggcttgaagcctcatttgtgtggtatggtaaccacttaatctgcaaaagttgaagagatgtcgttggttagtatctcaattaaagaagtaaatgtctatctagaagtaatattggaagtacttacatgttgaggctgcaagcagtccatctcattgacataatgcttgtatgccacatcccggtgagcatgtgcagtgtcagtactctcaaaaaggtaggccactgtcttctccatgtctggctcattgtagggccaaggagtgaagctttgcctccacttaggccttccaaccggtagtcttaaccacatccacatctgaatcaacgagcatctattttgcaccggcgcagcatcaagttgaacgcatgaaggtggtttccttccagaaccacctagacccgagtccatttcgttcttgaatcgtttcgatctcctcttccctcttgttttaatcttcagataaacgtgtataagatgtgagcaaggcatatggtagagcaatggcctttggcaagaacatgagttcccctcacctttaactttgaaggctcttgcgccgaatctaacaccaccacacgttataccacccctctctgtgacctcgtatgtctttttctgcttatcgaaacaccttgcagtgtgtttgttcgccttactttcttgcaccttcatcttactgtcaaccttggtggaccaacgctgccctaactggactcgcttcaaagcttcatcatgtctgttcacaatgtagtcattgcacttcatgaacgtaaatgatacgatggccgtcactggaagcttacgaacaccaactagcacgctattgaactgttcggccatgttggttgtcatgtaaccccaccagcggccatttctatcgtatgcacgagaccacttatctttatccaacaactcatcttcaagccatttacgaggaccttcgggaatacgctgccttagtgcctcaacatccctctcaaatatccacttctcgtcaatctgacatattcttaggagctcttttgtctgatgcttgtccgcaccggccttgtggaaattagcactgaagtgcctcatgcaccaccggtggtgaaccgatggcaatcctggaacaggagtcatcatggcattcattataccagcatgtcgatctgagataatacaaacctccctatgcggcccaaccacaacccgtcggacaagatcgataaaccagcaccaatctcgtgaattctctttctccaccaaggcaaaagctaaaggtacaagttggtcctccgcatcagctgataatgcagtcatcaaggcaccaccgtatttcccagttaggaaggttgcatctatagctagtactggcctacaatgcttaaaagcctcaatggaaggaccaaagcaccagaatgcacgcataaaaattttcttggtcactccatcaacgttgacaaccctatcaggatgagtatcgatgtggtagaccatactgggattcctctgcttaatggcttgcagcaaagtgggcaaacggacatacgcttcaccccattcaccgtaaatgagcttcatagcctcctctcgtgccctccaagccttgccatacttcaccctatactggaaaacctcaaatatatacaaagctaacacagaagcagagagtgtaggttgcagttttatggcattgcataacctatttgctatgaactttgatgtcagttgccggtggctccctgaaccttcggcagtagcacaactatgttccttacctacccgtgatatcctccacgtgccactagacctcttagttgcatggaccttccatttgcaccgtgggttttcacatttaacagtgtacctcctatttgcggcagaattgacaacacggtatggacgatggtgcacgatggcgtactcctggagccatagcttcaatgcgaccatggatgggaactctaaaccctttctgagaccatccacctggaatggttctggcaactgatctaggttgatgccgccatctagtagtgcaccatgggcatgtgttaggtccctaaactcaggaatgtccggcttcctcccaaacaccttctcaaacgcacgacattcctctaatgctaacttgtcattattagtaagtggagggaatggacggtcatcatcagagtcttcagcaaattcaacatcatattgctcaacacttgcctcctcgtcaacatcatctctattgacttctactgagacagaatcgtgaccaccactcaattcgacatcaaagtaatcatctggattcacatattggcatgctacttctgtcgggtattcagggttgactccgtacgacgaccaatgaacactcgccgacaaatgttcacttagatcaagcccctcttgtactaactcccttttcatcaccctcgctgcatccacatcatcagtaccgcaatgtctctttgatggtcctgcctcccataaatcttttccaagcaaaggtctcttcttctctccttccccctccaagtcttctcgtaccaactcactcttacttgcaccccctccacgacgagaataatatgtcacaaaattcttctcaacgtaatgataagaaggagatttgtttagatccaaattttctacggtacgaactaactttgatgcaaacacctctattgatctaaactgagactcttttaccaaatcaaagtaaacttcccattccaactgacctatcacatttaatatatacttatgcccttgaccaacatcgtatcttccataaaaacgaatctccacattatcctcggtccatccaagaacttctttcactcgtgaccttagttcatctagagttgggtgggtgggaaacaaaatggtcttcaatgacatatcctcaaactcaacatgtccaccaacataaggttccaccactctaccaccgtagtaaacacgaacaagtctatccatctacaccaaaaaatcaaatgtaactttgcaacaaaaattaaatcttcattcctaaacgtagtccaaaccgacatattataaccaatgcataacttaaattgtcccaaagctactactccaaaaaaatatttaatccacctacaactatcaacaagtttactactacattacacatcgaaatattacaaatactctatcatacaacccaaacctccatcatgcctcaaccataatttttcatccatccatccaaccaaaccatccaaaaattaacattaccacatatatggttaaaaaaatcatgacaccaatgagtacattgcaaacatgtagcactacaacaagccaatcctaagaacaaatgctaaaaatcacaaatttgggtaaaaaaggggttctagggttacccaccgatctacaaattcaaccaataaaaatgaaaaaaaagaagggggaatgaaggagtctacctttctcttcgatttccacaacaaatcccgcgaaaaacggcttcaaattgagtggatttgaggtggagaggtgagggggagagagagggagaagaacagcagctcgctgctcgggctgggaatggcgaaaatgggagtggggaggagaaaggtggtggggcccacggggtttaagg

SEQ ID NO: 8246 - DNA, 45208 bp, Oryza sativa
atgtcctttcagcatcagctgttggcaatacctgggaattgagtggaataacaatttggagtttttccaaatgatctccctagcaagaatcaaattttctcagaagggtttcctggaaattttctttttggcagcttggcacatctggaaacaaagaaatggcttcatatttcagaacattcaaccctctttccaggcatggagatctcttttcatcaaagaagttcttctgcatatgtgtagaatgaatgatcctttaaagcaaactatttttaattgggtacaaaccttatagtatctctgtgtgaaccgcatgtaatctttgtaaccttgtaaatattttctttatttaaattacactgctgggcaaagccctggcagttttcctggtcaaaaaaaaaaaaacttggtagatcctagccttccaggtgcattggttagactgttttgtgcaagaggcacagagctggtgtacatcatgtgacgatcatccatctaaatggccatgttagctttgcctttgcatccattttcagctcaagtcaatttcaatagtgtaactgaggaggtacttgacagggtaaaataaggaagtaccatggtatcaaggataggctatgggaatttgcactcaagccagatttaaggggatgtgatattgcagagaggagaaaaaacaacaagccagaactaatcctgcctacgaatttatttatttactaaagatcaaatcccatggttatggaacaacacaaaattccagtatttggagtaaaatctcgagaccaatgacacatcagtaacatatatcagagaaattatttagcatatctaaactaacctgtgtattggggaaaaatagcaacgaattagtgtacgtaacactgaatgccctctaaatgttgacagggactggtcatatggatgcttgaaatatcgggcttctgagggatatgtcatccatctgtaatcccattcatatgcttttggtgtgcagctgcaaaaacaaactacaagtaaaaatagtatttctgtcgaataactttagcctattttatattttggactttgggtcaggcatgtagacaagatcttggacaaatcaggccaagcagatctagtcaaaggcagattttgattttagcatttcctacttgcttacaatatgttgcgtttaagattcaagcataaaaagtggtttggtttagaggaataatcatgcaaaagcaagagctgtatttactctttcacagtggacgacattttcctgatgtcccatagtttaatagtttgatccttgcaatttgaaataaaataatgcccatctccacggctatcaataaatgtaatcccatctaaatgacctgtcaaaacaccaacttgttttcctctcttgttgcagcgcctatcccagacctgaagattggataacagtgtcagtcaaagaaagcctccatgggtgacttatcagaacttcgatatgataggaagcccttcacagatttcacatctcctaggcaagcaaaaagactgatcatgcattaataccaaacagactggtgttagagtttgcactactgaacaatagttcctctagcggctacacaaatcggtcctctagaggctgaactcattgctcatgtttcatattggttagtgacttagtgacttagtgtagacagtgtatttacaccaaatattcaagcactgctggacttctggcacgatcagccagataaacctgcaatgttgctgtctgacttaaaccagcaaatgcaaatagaatcatctttaaagaaagagtaaatgaaattgggaaatattagtctcaccttacagaggctatcatcacttccagagtataaaacatcactaccttcatcagcaaaggtgactgcattgacatcagcctttaaagaccaaaagttgagaaaataagatttagtaagaaacataactttttttttctaatacaatggctaccacaaaagagaaatgaaaaatatattatcaagaaaggttccaaacctaagttaatccaacaatataaaatgtagcacatacgttacattgtcttgttacagatagtcccatctactgtttgagatctcactatcaaggtggtttctggacaagggcaagttttcaagttcactcaacatccctgaaatgtttgatttcatatttctagttgtttatgtcagtatatgtttcgaacatactgggctgagtccactactactttcaggaaactggcaggaattgatgcagtgcctaactctactgcttcaataactccacatttatgacatgtgacaaaaataaattttagcaagacatctgctcctagctgatgatatttttgcctgctgaagcatgttcattaacttgtctattatacccagaatgagaatttttagtacaccagatgatttgataaacatgcaaattttgattcttttgtgcaaatttccagttttgttggatcaaagcttcctaaatatatcatcattcttcagaataaaatggcagaaacctttgtcagtgaccttgacctacaatcccttttgtcttaaattcctcccatatgtatatactgtgttagtgtgacgcatcaagctacactaagaacctaatcttatcaagttatctaagaaagaaacaaatggtgttattctaattacattgtaaataccacttgttcaaaatggtaatgatgcacggaagaaaagataatgtgcagatatcaattggtgggacagaaaacagtcatacattgacaataaaagcatgtagctcagtcatgcatctgtttcataccgaatgagcgtgaatgcgttctgttactttgtttgatccaatatcgtaaatacatattgattcattgttgtttccaacaacaagttctcggccatcttttgaaaacttaacagaaaatatggcaaaggagaacccatcatcatcattcgaaaactccaagccttcgtgaacttgctgcattataaataaaaacagaatatgtaaaaacgtacataaggacaattatttccaaaaagaaaacagtagaaatagaagtcacaaccatcaataaatatgctaacaactagtacatactattttgacaaggaaaaagtctacttaacgccctcgaatattatggtcagcctacttaatctcctaagtatgaaaccaggcgttcttcctcctatggtggttttcagggtggttttgccaccatgactgttgacattgaactgactcaagaaaatggtcactcacttgggcttggctttggttggtggcaactaagggcgttgttgcactctaggcatagcagtgttctgaaaaaaggtctaaaaggctgcatacaaggaacaggtgccccaaccttgtacacttaagccacataagtgtccgattataccgtataagcatccaattatgccgcataaacactacaaggtggggtcaccacacaaaactggataccgctttttcgaaccttgggccacagtgaaagtcagtaactgaggaagaagacatagcacgaagaaaattgccctcatcatctcataggcacgccagctgtcacaatggcaaaactacctccgaaacagtctcaggggttattttatttaaaatatccatttaggaggtggttttattttgaaggggtagaatagagtaatttttgtgacaacctgaatgggctggcaggtctgtataatagtgttgatttatttttcatgtttgcacactaaccataatgcgccccaactccaaaggttatagtttttaattatgtataaatgtttcttatcaaataaaaacgcctctagaatttttaaatataagtaaaaccatggtatgttttttcaagtgcctctggagtcagcacatgctgcaacacaatacaaatagactccaaatttcctatttttgttatcatcagaggatataccgtaatattggcatgtgattctctcatgccattctggatatctaccatatgaacgataggtgacagactggaataagcctgcaaaaagaacgagtaacacttagttaatgatataaaacaaatatacaaaaagacctgaactagtctcaagtgtaacttcatgaatagaacttagggagacatctaaaggtagcttgttaggaattataggaagaactcttgtaaatacttctaagctagtgaaagaaaataaagaagtgcaaagttgaaaaattacatgtagaaattagtctatctaatcttactcagttctcaaagaacacatgtatcataagttctgtagggacaggctactagaaaaggtccagaagatacaaacataagcaacaattatttgatgagatatatgaagtgcaataacagtttgttgtataatcatagtggactgtaataattaaagctatggtccatatagtacagtcttagtacccaggggaactgacaatccatatggtccatgatttgttttggaatttataaatctatcatgatatatccctaaagaggctgtcagttccctggtcaatttttcatggtctatatttctatttaccacattttttttagaaaaaaggggaatcaaatgttgagttactcagagtccaccttgcttatagggtacataacatggacagcaatggagccaaaatgcttataaaaatatgcagattgcatggattttgaaggtggtaatctgcaaattttagtatatctaggaatcaaatatgttattctaactcagagaacactcatattttcttcatgcacaataggttcaaacttgcattacccaaacaaagggctcaaatccatgtatgaaggggaaaaaagaaacacactatggaactaaaaatagtcagactgtaataaatattattcaagcacattgatgcgaatttttatttacaaaaaatggaatcatatatgttatcctgaaaagagtgagttcactagatgtcaatgagtaaacagcacacaaaagaaaagaaagaatgagaacaatgcataagagtcttactaggtatcgttgatcaggtgaaagagcaatatctgaaactgtccaacgtagctttttgcaggttatgtccttatgtatcgtccactttttctcagcattgtagattctgatatggctaccctgattaattgttggcataaaggattgtcagtcacccatatcacaacattttgtgcagccaaggtatctaaacaaaagctaaactcatgtggtaatggttataattttccctataatagcacaacgacatacccggaacccaccaatgagaagggaaccatctgcggagaattgagatatgtaggcttcactgtccatgtcatcaacacaccatgggccttttactggtaggtgtttacgaagagcataagagcaatcagctgaagagaacctaccaatccctaagcagttggattctctccctgacaacaacttgaatgttgagatatgcctcttttttccagcatgaagggatgcacgagtcctctcacatggctcggatttaagcctcgtaagatgggaaacctcctcatctatcgcagacaattcattaccatgtgaaggacaggattgttgttgatgacatgatcctccatgatgtgtcttccttttccagcccatgtttggatactgaaattatgagcatgatgaagtttgtcacttctgacaataatcaaacaactttcctatgctaaatattcactgaatacctaacacctccaaagaatgatcaattgatatactagtacagcagtctgcatgacagaaagacagctactgtgcttaacttcaaaagtaactccaagaaaattatagttataaaaggttgtaatcgtttattatattatatttctaggatattaatgatactcttccgctgcatctttcattacagaataaaaacgggacatgcatgcttgtagaggtaaatcagttttttattattaatttaataatacaaaaaaggaaatggctgagtagctcagcaacaccaatatgaccacgaaaatagtattcaaaatgagcatcactacaaaacaatactagaaaaacagttcagtttggaaatgacacaactcaaaatgaacagaataaagccttcgtccatctcaattaaagaagccatgttctcgatgggaggggcaagagtcaaaatcaaacttggccttagtgaaaatgaaacaatgaacaaatacctaagggtattctggtcgtttttaaaaacctcttcttttttttctttttttttttggcaatgcacaatcgctgatgggtggtgatgagctaatttcccccaaaaaaggatatctgacatacactttgtacagatgattacaactaaatctgttcaaataggaactgaaaggaggagggaaaaaaacaaatataaatttcgcattcacctcgaaaagaacaagactttaacgtggacacaagcttgcaatccagctatccaggcaactccaagcagggcagtaaagctgatagccggaggcttggactcttctacagccagtcattccctacacgatttaaaaaataatttaataacctgaagggaaggaaacggacaaatatgcgtgtgcagcgtatccctatcgcctttatgatctctaccatggcgttagattcttaagcggacgattggtccatagcaaagttggtagtaactgcaaacgaagtaccgacgattccagcataaaatcctaagacgtactactaaggaactccgaactcgctataatctgtgccggctcatgaagcgacccggatgaggagggagggaaaggagaggctaacctgtaccttcaattcgactcaacccgagacggaggacgaccgccgcgcccctcaaaacctgctcgccggcggcgcgagcgaggatgccgaaaaggggggagaaggctagggcaagaggccgtacacgccgtgcctacggggcccgggaattaggggcagagggcgccgaggtctcgccgcacgcgcggggcggtggaattggggaggaggcgaagctgccgaggaagaggaaggagcaggagacggggggaggcgatagctgggagaggcgggagccggtttaaaataccccaacatggaaggggaccgcgcgtgaaaaacaccaccctccctgccacatgtcgccgacgcgtgggcccagtagaccggctttggaggttggtgggctgcgaatgaccggtgaggcggggcgggtcggggatgtccaggtcctgcacacgtggcgggtcgcgagtgggtggcgggcgggtgatgcgtgtggtggtgcggcgcgctggattagagccggggtcgcttgcagccgttgctgccaatggagtttgtgtcgcacgccgtgatgtaatatcggatccgatgacgtcagcaccacgcgaagcatcgctacttgtaatccttcgatcgatggtgtcctagtcatcgtggattatccaggatgttggcgggtaagtgcaagtgctctacgctggagaagggatttttgtcggaccatgcgaaaatcacattagccctggttcaaataggggtcataactaaagatcagctttagcccagtttaaaagcccaatggcactttctgattttaatttaggttggtgagaactaaagatcatttttagttccagtttaatagctgtctggccgtgtcaggccctcaacgagtaaaagatcacacgtctcacggcccccaacaagtaaagatcacacgtctcacacatccttatccactctcgcctctctctgtgtctctctagctctcttgagaagcggaagcggcagccgggcgggagaagcagcggcggcggccgagcgacggaagtggtggcggaggcaccctccccctcagccagatccaccgggaggagaggccacgggatgggagcccaggtggcggtggagcgacggtagatcgacggcgtcggcacagccgtgcggcggcgtgacgggcagccgtgcggcagatggaggaagaagttcattcttctttttttgagattttgtgatatatttgatctgtgagactgtgatctgtgatgtatttcttcttgagaatttatgatgtattttgtcgacgtttgatgttgcggttctggtatttgcatggtgtggggatcgtcggtgctagggtatacgcgagactgaggtaaaagagacggagacggggatttttatacaggtttaggcccctgaacggtcaggtaataaccctacatcctgttggccgaagccagtattgctcttattcatgataatcacaccagtacaatacttggggtagcctatctaactgttgtcgacatggcggtctgacgatctgactcgtagtcgacaacagggtagccttccacctcgaatccgtgcccggcgagatcagagatagcgctttcatctctcctgacagtatccggagacaccgtagggtactagccgtgtttatccctgaagttgatatccgacggcgtgtcttggcgtatgtaggcttctatgttgtggcttctatgtcgattgtgttgggtgttgattgaagtggtcgtgtgttgattgtcccccctctcctcctaggggagcttgtatttatacacataggtgtcctcttgtccaagtagaacttgggaaaccaatatggatacaattcgagtagtccttgtcgtttccatgtagaactctggttgtctttccttatccggaactcctcctatatccacaggttgtttccgtataggacatggtatgtggtggatcctaccgagatttagtcaactactattagatatgtggtacccataaccctgacagtagcccctgacttcgatgcaaatgaacgaattcatattctcaaccgcgcgcagacattggagtaactgttatcgaactcatgtgaccgttctcggtgagtttaaagataacgttagacttcctttgttagcctcgtgcgggcacctaaagggtttgtctgagtcaatctctgatgtcaaccaagaaagtacagagcatacgactaagtctctcgtcttgctgtaatcgagaatttggattgaagtcaagaaattttatctcggcgggtacaccatttcttcattccgtattccttgtcgatatccaccaaccgttctcgagcgatcgagaaggcgcagagtctgcgacggagccttgtcaatatttgtcgtacccgccttagtcgatcttggtgtagaaccatagagacatggagtctttgataatgtcaaatagaattttcctaaaatcaatactcataaaagaatattagatagaaatagtccccgagcgaacgctcgaagggtgacatgttataatatgtctggaaaaattgaagatgaattaaatttataaaccagtgttttgtatatgagcgtcttctcttttaccgactccgatcagtcagtttgtagagttatacactctccctagcccccagccttgtcatcggagaattgttctcggaagataaggctcttggacctttgacctgcctcagttgaacaagcactgatcctaacccccagccgtgaagttggaaaatccaatttccgattacacggcttgattaacacgcacggcgagaactcttacatgaccagatcttacatggtctttcgtctctgaaggatccgacaaagccttatccgctttgggcgtccacagccgaagttcccttaagttcctcagaggctttgtcaagacagcgtgggacgttaggataggtttcaacgctaggtgtcttttatggtaagggatctctgggtaaaacactaggcgatactgtgcacctgatatcaactttgttggagtagaggtaatgggagaatcgctacaccactggtcgagaaccaggtagtagtcgtaactcgaccacttaaagtggagatagtgggagaatcgctacaccgctggtcgaggaccaggtagtagtcgtaactcgaccacttgaagtggaaatagtgggagaatcgctacaccgctggtcgaggaccaggtaatagtcgtaactcgaccacttgaagtggaaatagtgggagaatcgctacaccgctggtcgagaaccaggtgtagtctaaactcgaccactagaagtaaaggtagtgggagaatcgctacaccgctggtcgagaaccagatgtagtctaaactcgaccactagaagaggaaatagtgggagaatcgctacaccgctggtcgagaaccaggtagtagtcgtaactcgaccacttaaagtgaagatagtgggagaatcgcaacaccgctggtcgagaactaggtagtagtcgtaactcgaccacttaaagtgaagatagtgggagaatcgctacaccgctggttgagaaccaggtgtagtctaaactcgaccactagaagtaaaggtagtgggagaatcgctacacctctgatcggggaccaggtagtagtcgtaactcaaccactagaagcaaatgtacgagagttcgctatgattgactggttgagaaccagtgagtaggtgtctctcgatcatttgaagtcgtggtgcgaggaccgctgcgttattgttgtagtcgtaccttgaccatccgaagttaaggtgcgagagattgctacgttttactagttcgagaaccagcgagcgagtagaattatctctcgaacaccaatggatgttgcggtgcgagagattgctacgtgctggttggagaaccagcgagcgagtagagttatctctcggacaccgatggaagttggcggtgcgagagattgctacgtacttgttcgagaaccagcgagcgtgtagaattatctcttgaacaccgatggaagttggtggtgcgagagattgctacgtgctggttggagaaccagcgagcgagtagagttatctctcggacaccaatggaagtttgcggtgcgagagattgctacgtgctggttcgagaaccagcgagcgtgtagaattatctctcgaacaccgatggaagttggcggtacgagagattgctacgtgctggttcgagaaccagcgagcaagtagagttatctctcggacaccaatggaagtttgcggtgcaagagattgctacgtgctggttcgagaaccagcgagcgtgtagaattatctctcgaacaccgatgaaagttggcggtgcgagagattgctacgtactggttcgagaaccagcgagcgtgtagaattatctctcgaacaccgatggaagttggcggtgcgagagattgctacgtgctggttggagaaccagcgagcgagtagagttatctctcggacaccaatggaagtttgcggtgcgagagattgctacgtgctggttcgagaaccagcgagtgtgtagaattatctctcgaacaccaacggaggtgctaaagttggtttattacatgtgcgtctcatgtggccagcatgactcacacacccaacttgtagcatatctgaatgttcgttcgcaatcatgtcgggtgatcaagccgacgacgttcgcgaggtattatccgttaacaaccttttctcgagtagtccagcgatggccggcgctatgagataggtcgtcggtcttctttggtaggttgggcatgacgactctgcatttgtcgagatcgttctcgataatgcggtgtacttgaccacgacctactcgagtgctcaattgttcctgaaaaatattttctagaaggcaagatatatagcagataatatcgagtatgtactcaaaaaactacatagatcttctggtattatcaggatataacaagcagatgtaaatatcatgcattatgtaaactgtaagcaagcatgatttatatagaagagaacagagcgagcccccagcgttagaccgtagtcgatttaacatcggggacattcgcgcaatagatattgtataaaagacatgctctaggaaaacataataaatcatggatctgacaatgttgtatgatctgaataggtacgataagttgcatatgaaatattgcgtacttttgtagatacatgccggatgtatccacgaaattagtagatcaatttaaaaaaccaatctaccaattaccttgctgcgtactcgttcgatatcatgtgatctgacatcttttggtacaccgcggagcttgaggcttggatgatctcgatagaccaagttgtcgatgacgatgatggttccgatctagtcgcaagatgtacttggacaggttggatctccccaaagccgaagtcgtcgagtagcttgttgatggagaatccatctctcaaacccatctcgtcgaaaccttgaagcaccaaaatccccctacctggcgcgccactgtcgacgtttgatgtcacggttctagtatttgcatggtatgaggatcgtcggtgctagggtatacgcgagactgaggtaaaagagatggagacagggatttttatacaggttcgggcccctgaacggtcaggtaataaccctacatcctgttggccgaagccggtattgctcttattcatgataatcacaccaatacaatatttggggtagcctatctaactgttgtcgacatggcggtctgacgatctgactcgtagtcgacaacagggtagccttccacctcgaatccgtgcccggcgagatcagagatagcgctttcgtctctcctgacagtatccggagacaccgtagggtactagccgtgcttatccctgaagtcgatatccgacggcgtgtcttggcgtatgtaggcttctatgttgtggcttctatgtcgattgtattgggtgttgattgaggtggtcgtgtgttgattgtcccccctctcctcttaggggggcttgtatttatacccataggtgtccccctgtccaagtagaactagggaaaccaatatggatacaatccgagtagtccttgtcgtttccatgtagaactctggttgtctttccttatccggaactcctcctatatccacaggttgtttccgtataggacatggtatgtggtggatcctaccgagatttagtcaactactattaggtatgtggtatccataaccctgtcatatttgatctatgatgtgaatctgtgaatttttttatgtatttgatatgttattatgtaaatctgtgaatttgtgatgttatctgtgatatgtggtgttatatgtgacttggggatgtagggagcaactcaatttgaggaaatcaatatgcaagcagtaaaaaccaatgaaaaaaaagaaaaaaaaacctttagtctcggttgataacaccaactgggactaaagatggtagcgcaaaacacgtggtgctgccatctttagttccggattgggcgtcccggtttgtaacccgggactaaaggaggggttgtaaaccgggactaaagaccacttccctagcagtgattataatgcttgatgtggtgcctctaaaattgccacatataattggatgatgaggtgtaagaaataagtgatgaaagagaagacgacccatcccttatgcaaggggcaacctctaacaaacccaaagaaaaaaagatgaaagaaagaagggattggacacacgaataaaataaaaccatttggattagtatgctagaagtagtatagatgtggtgtattgtatatatcacctcatatcctacatggataaaattattggcaactacccctactataaaacttgccattaggcacccatgtagattttcgatctactaaaacatatgctaatcctgtagatcaccctaatgtggaattagggtttaactgactgttgtttgaagccattgcattgttctagcttgaaccggagtaaatgtaaaggatgcagaaccacctcgcgtattgtcggtgcaggagaagtagtaatagcagtgaggacgccgacttcatcctacagaggtcgccgacgatcacttgcggatagcggtggccttccggtcgtcacctactctatctcgagcatgctgctagaagtgaacaatattcgctgggaaaatagtactccaaaaatgcttacacttctaaataaattgttaaacgctagaaataaatcatacttatggacagagcgtggggggctgaagatagtgagaaacagaggcgaaactttgaatctactatagctgccgctgacgaaacagaggtgaaactttgaatctactatagctgccgctgacgcggacgcaagctgtacgtacaatgctcctcacctaaaaatgaaaacagaacggatgtagacggataatgtttatatcatattcgtttttataattttttttgccgaatatgaaaacgaatacgaacaactcagatgcagaaataaatacaatttatttaaatatgaataaggaacaaatataattggacacaaatacggaaaccattttttcagaacacggaaacaaatatcatcatatataattatatataattagcttgttttatataaaaatataaaatattttatataaaatatttaaattttaaataatattaatgttgtggactagtgtcaaaatctataaagtaggtcgaattagaattatgaaaaatagggtatgtttcagcagatatccgtacccgaaaaatgaactgaaaacgcgacaacgacctcagaggtgccgacctgccgggcgcgtgcaagtgccaaacgtgtgtgtggccacgagcgtgacgaacgcgatgacggttgagctcgccggtccgtggcgggcctcccgcgctgactgcacatgcttttctgccgcccttttgggtcccgcgcgttaagatccgcttcccctgcacgcctgcgcgcgtggcctgaaaatctataaaccgaccggccgaattcgatcggtctcactcacgcgactcggtctctgcagccggtgcagcccaaagtcttgcggactttttgtttcggtctcttctgctgatttttgcctgaacttctagaacggtggattaattaattaattagctcatctaaggccattttcaacccaataactagaatggtgtctatagcattaaataagctgccagttagaatgaaaaatgatgtgtcaagtgaataaatgagaaaatagaaggaaaccatatcttgcatgagacatagtttctacacaatatttaaaacatcatgtgatataagtagcattaaatttaagtatggaataatgctgtttgtattaaaagagtagtgtatagtactagtttcttgatatagagtttatgaaaactatgtctagtgtcttagatagggaatgggctaaagaagacgagtgtttagttaaccttcccctggtgtctggtgcagatctcccctatgccactgatcaacgtcgtctggcggaccaccaccacgaacactgaggtggtgaaacacggcaccgttcttcgtgctcccatttgtttggtaagcaacgtcggccgcagctacttcgtccgttccggtccggacggacagagcgactgcaacaggaaacgacaatgaacaggcgtggctcggcccatcccaacaaatttggcccacagacgaactggcggccgctgcattctccgatggccgctgcccgctacccgcttgctcagcaggtcaaatgaagggaaacttgcaggctatttcgttgcctgcacgagggctggctcgcacccgccgtgcaggcaccaccttgttttttttttaataatggaatataatatcccagcctttactcaaaagagttacagccaattattacatagtagttttcatgaacatagtgtaaatctaaatgaatagaacacaccgaagatcactattattgaaaccagcctaacgtaaggagatcataattattgaagtctatttgtaaatctccaaccataattggcaaatagttgcataaccgtggtctccaacttttggtatgcaaccttcagaaactcttcatcttcatcacacctttgtagttgtgcctaaaaccggagccaatgagttgccctgaaaataacctgcatataggaaaatgatggtgatttgtcaaaaaccatatcgttcctactcagccatattgcccaacaaatggcagaagctccaacaagtatcagtttactcattttcttatcaactcccaaaagccacccattaaaaatatgagatatgctaactagaagattaaaaccaaaagagaactgaactgctctccatagaaatttcgcaaaatgacaatccataaagagatgttgaatagactcattcttcaaaaaaaagaacacctcaagctgccattccagttacaccttgccaaattatccttagttaacacaacccctttaagcaggtaccacatgaaaattttaatcttaagtgtcaacttaagcttccaaatacacttgtttctctcgatatagccattattaattaaagctaggtacatagacctcaccgagaacaagccattctgatggaaattccatctaaaactatcagacaaatcattcaactgaatatgtactataaaggcacacaactgatgccaacaaacaagattctgaccaactaaagctctcctgaaagatacattaagcggaacatatcccataacagtggcaatagaagatgttttcctccgaacaattgcgtacaaagatggatatttatccttaaaagccaagttaccaatccatctatcttcccaaaatctgatttgttccccattattgacaatccaagaacccatatttaagaaagtacttttgacattcataagaccagaccaaaaatgggaatcaccttgtttcctgtcaacttgggttatagatttattataaagatatttcctcttcaataaatcatgccaaaccctatcctcattaattaacttaaacaaccatttacttaaaagatatttattttgtatctccaaattatgaatcgcaagaccccctggtccttgggttgacaaacaacatcccacctagtgagcctgtattttttcttatggtcatccccttgccaaaaaaaccgtgatctataataatcaattttacgaagaacccctttcggcacctcaaaaaaagatatcataaacatggctaaacttgaaagaacataattaatcaacaccagtctaccaccaacagataaatgcttgcctttccaactactaagctttttctcaattctctcttcaatacgtttccaatctttattagaaagcttcctaaaatgcatcggaattccaaggtatttaaaaggaaaggtacctaactaacaaccaaaaatattagaatagtgttcataacattcctttgcctgaccaacgcaaaataattcactcttgtgaaaatttatttttaggccagataacttttcaaataccgataaaatcagtttcaaattctttgcctgttgcaagtcatgctccaaaaagataatagtatcatctgcgtattgcaagatagacacaccatcatcaacaagatgaggaataaccccattcaagagtcccgcctctttagccctcttaatcaatagagtaagcatgtcagctactatattaaaaagaataggggataaaggatccccttgcctaagttggtagcctgtactaccctctcagcctgtttcaccttgtgcaatttttttttaacgactcacacgagacgatgcgaagttttattgatagagaagggaaaaattataagattacaaccctgaagggtcgtaaccaggaaaaagaaaaaaaatataccaccacccacacaccgacatctccaacacacaagcccaggagaaggctagcaccggaccggccgtcactaagcgtgaccaatcgccactagaccaacaaagggacacatacgagatttaggagatgccaaaacgacgtcttcaagaagagaagcgacggaaatccgccgctgccgtccgttgggactcaaaggagacaagaccgggctttcgcccggtaatcacccttgaggggtgagacagcacgacaacgccctcaggagggggaacatcgttgtcggtccggccaaggccggactgggttttcacccgctgctcaccacctgcgaatccacggctgacgcaccgaggctccaccaccacacaagctctgccgacatgtgggacccctgcaccagcgtcccccgccggtcagccttcgtgcgccgaagaccgcgccacacccaccggcaactccttctcacatctaggttgtctcctccactgccggccgcgcctctcgcgccaatccggccttcctccatcggccgcgcctctcgcgccaagccggcctccatctccgccgcccacgtctctcgcgccgagccggcctccgttgccatcggctgcgcttctctgcgccaagcctgtctccgacccctccaccaaacgatgccacgacggtcagatggagccgtctcccacgccctcgggtagccgtccgaggccgtcatgcctctggtgaccgcagtcacggtcaccaccaccacagctgctgctgccgaacgcccagccacctcgccgttgccatcctcacctcgcacccgactccttccccgccgccgatgtcgccaccgcctccacagtcacgaccaccgtcgccgctgccactgacgctagccatcgcctccgcagaccgccgccttgtgaaaattgcatcaccatagtcaggatgagagaaacgcgagaatcgagctttgctcacgagcctggcccgctcgatgcaacgcgtttgcatccgcgcaagcagtgctgcacccgcggctacagctcgttggttggggtaaccagggccgtacctacgaattcgaggccccggtgtgaaacacaatttaacgctaatataagtaggaaagacacaaaaataaattagcagtggagctctatctcagtgagaagaaaattttaaataaatgttagaaaaatattatgttatgatgtagtaatttatttttattatatggaaaaatggaatctttaatgcttagaacgcatgttcatatcatcgtcatgagctatagctctttgagttagccatgattgccatcgaacacttatcggagctaaaaaaaataagcctgttctagccaatgaacaaatgagtaaaagtgaaactttataaaaatggaacaagaggccttcaaatatattggaacgcattggcgtagattaaagaataaaaaaattagggcccctaaattttggggtgttcggtcgctcattttgcacaccctcatcgacggccttgggggtaaccactccaccccaagaaccctctctcatttgtcctcctcgttgctactgctatcctccgcctcttctcctcctcgggctcgggtggctagaggtatcagtgaggctcgtcctcttctcctccttgcgctcggccaagtagacgcggcaacaagcgaccaagcggcgtggagctcgctgccggatagatctggcaggaggagcacccagaggacagcggctgcaattgcatatgtgaaaatcacacggcccgacggtctttaccactgccgccacctttgttgtagtccgagtcattgccaagatcctctctcccttcatcagcagctggatctggccaccaatgacagtgtcacagcctgaattttcgtttcggatttataaattattaatagaatttatattaaatgttcattaaaatacaagtgaagttaaatgtgggaaataaaatttcctaaatataaagcatggctggatttaatttttattaaattctccatgattaattatactatctggatttttttcagattttttagagcttaaatcctaattgtaataatacaaagaagagttcagcaattatttaaatattaaattaatcattaaatgagctggtttcatttttttaagtactttgagtgcccaatattttcaggatttttcttgaaattatttgagcatcggaagtatttttaacaattcaaagatcatttcagtgattaactagctggttggcccgcgcaattgcaaggctagcacccaaacaaaatcatatattcttttagtatgattttacttaaaatttattaaatagctatctcattgtcttaagactttgaatgaccaaatcttatcatcctcgtgtttctagttatatagtttttaaaagtcacaccagttgctaccccttatgtcatcttcttctttatttgcttactcgatctatcactatttctattcattcttcttggaacctttaaaaattggattttatagtttttagagtttattgtcatgctgggtttcgtttttgtaatttctagatgtcccgttgaacattgccattatactcctctacggtctgttcactgtctcttctttttattgtcattgagattttaaaaatcaaagattattatcatttgggttcatttttactttctaaaagtcccgccaaattgtcagcagctttgccattgtactcctctacggctcgcccactgcctcccttctttattgtcattaagattttaaaattgaacgtgattatcattgtttttttcttttactttttaaaagttctaaacctttaaaaattggacttgtagttttattttttataatttttagaagtcccatcaaacgatgccactatgtccctctacagctcgtctcatgcctaccttttattgtcattgtgattctaaaaattgagcataactatcgttgtaattcattttttattttctagaagtcccatcaaccgtcggtggctctgcaactatactcttatacaccccgcccgctgcttctcctttttattatcactgagattttaaaaatcgaatatgattataaatggtttttttaattttctagaagtcccagcaaccgtcttacttatttgctttacggcatgcctgacgtccctccttttaatcgtcattaggattctatttagtgttttattaacaatttttatatatcgtatcaaccgccaccactttactcctttataggcctgttacttaattttatctcatcatgtgttttatatggtattttctttcaatagtctttatttttatcacaaagtttagttatttataaattgtattcctaattgaaatcttatttttcttttttctaatttcagaatttatttttttaaaaaagttaataccctattgtgttcttttaatgtttttgttttttattttcaatttcagttgtttcaaaattatattcctacttgaactctcttttattttttcaaattttggatattattttattttttattcaaaattttaattaatctcgtattgggttcttatatggattcttatttcaatattgcttatttttaattccgaatttcagctaattttaaattgtattcctacttgcactcttcttttattttcttgttctaatttcggatttttttattctgaattttaattaatctcgtatttggttcttatatgtactcttcttttaatattccttatttttaattccgcatttcagctatttttaaattgtatttctacttagactctcctttccttttctaattttggattttattttatttttattttgaattttgattaatctcgtattgggtttttatatagaaatttctttcaatattgcttatttttaattccgaatttcagttatttttaaattgtatttctacttggactctcctttccttttcaagttttggattttattttatttttatttcgaattatgattaatctcgtattgggttcttatatggaaacttcttttaatattgcttatttttaattccgaatttccgatatttttaaatcatatttttacttggactctctttttcttttttttttctttttctctgattaatgtggtaatttctagccccacagtgaacgcggtgccttctttcaaaactgttttaataatataattttaaaaaagttaataccctattgtgtttttttaatgtttttattttttattttcaatttcagttgtttcaaaattatattcctacttaaactctcttttaatttttcaaaattttgatattatattattttttattcaaaattttaattaatctcgtattggattattatatggattcttctttcaatattgcttatttttaattccgaatttcagctaattttaaattgtattcctacttgaactcttcttttattttcttgttctaatttcggattttttttattctgaattttaattaatctcatatttggttcttatatgtactcttcttttaatattccttatttttaattctgcatttcagctatttttaaattgtatttctacttagactctcctttccttttctaattttggattttattttatttttattttgaattttgattaatctcgtattgggtttttatatagaaacttctttcaatattgcctatttttaattccgaatttcagttatttttaaatcgtatttctacttggactctcctttccttttctagttttggattttattttatttttattttgaattatgattaatctcgtattgggttcttatatggaaacttcttttaatattgcttatttttaattccgaatttccgatatttttaaatcgtatttttacttggactctccttttctttttttttctttttctccgattaatgtgggattttctagcccccacagtgaacgtggtgtcttatttcaaagctgttttaataatagatagatagatagatagatttaaaagaaaaagaagttcttttcctcttcctagtattgggccgaatttggcccattcccttttctttcctcctcagcctacagcccgtgctgctccctcagccgaagtctgtttttgctccctcgcttcagtgcatcttcaacctccagccgcctctgtcccgtgcgcatgcactggcgcctcctccttccaaatccggcctccccgttactcctcattccaaattagttgcgggaatggaatcctctcaatctcctctacaaaatccccaagaaatccccaaaagtttttatggaaatcctttccgatttcgcggttcaacctttccttttcccggcgaggatcctaaactttcccaagtttttcccgtcgatgtgggctcgatcctgggctcccatggctatatatagagccccctccagctcctctttcggccgccacctctccctctctccgccgtcgccggaaaccttctccccgcgagcgccttctctctccgtcgccggtagccgctccagccgccgtgcgctgccgcctcggtcgtcgccgctctgcgccgccacctctcttggctccgcaaatcccagccgctggttattttgtgccaaatcccaccggaggtagcccgtcgtcgtgaaccggagcgccgccgtcgtcgctgtgcctccagccgcacgttcgtcgtcatccgtcgtcgccttcggtcgccgtcgactccattgggttcgcaggaacaaggtgaagcccggccactggtttttcttcatcgaggaacgctgaaacgccgccgccatcgctgacccgaccccgtcaccgcctctacctcgctgccggccgtctgccgtcgtcatccatcgtcacgccacccctcagtgagctttcctctctcccacgtcgttcaccggtgtagtttatcactagggtcttaatcccatctaatctaatcttgtttggccctagcgtcgtcatcgtctccgtgtgttgtcgtcggaccgttgtcgtggcctcttcttctcccgtcgccaccgtttcctggtgaggccttctctccgattcctagggtagatgtttgtgtaagccacatgtgtgtcgttgtcgctgtgccgttatcctaaccctagccgcgtgcctccgccgagccgccgccgcctagctgagcaaagtcgctttactgtcgctgtgtcgcagctgtgtgccgctttaacctagctaccgctttagcccgttgctcggtagtcgagttgtctagccgtaggtgcaaccctaggtttcaaccggcctatcatttgccgtatcggggctttaccgtgaatcgtgtctagcccaccggttttgtcgcagccgttgttgagtcgttcgttcgttcgttcgaacaaggtgttccccatgttcgttcgttcatccgtgttgagtggtcctttagttcagagccgccggttctgtttgccggtttcggttgatcatttgggtgatcctgtgtcacgtaaaattgactcgttgagtttgtatgtcgtgaggctcgctttccagatcaatccaagtcatccgatcttggtcgactcggtcaagattaatctcagccgtccaaaatcgatataaatccgttctctcttttcagtggcatattatttctgtttaatatatgtcatctaccaaatataatctaatctatttctagaggatgtttccaatcttttatcttagttataaattatttgtaaatcgtttaattaatttggaatagtgttttctttaatagatttaattggaattaaatattgtaaaattcataattaattcatatgaaaccggaatgaggccgttcaagtctcataattcatcttaaattatgatctacttgtttatttactttatatgtactgtttatttgttttttattagtctttttccttgttttgcgtgttaacttgtcgtttccgtcgtttcgaaggatcgtgagtgcgtcggaagttttcaagaagacttattgaagacccattgttgcaagtcacacagatcccaaacacaaatcctttgaacatgttgattctctatttattttaaatgtgtatttattttcgaatgtcaccgggtggtgtgaacttattcctttgttatggccaatttgcattgattactctttctttttttttcggggaatgattaccgtatttcttgattaccttgggttataatttgactagttggatttatatattggttcaactgttttagatataattgcttagccatgcttagaaacattagcacacgattgggataactaatgattcactattacttaatgatggatatttaatggtagctcacgatggttaatcgtgattgattaattaattaatttgccaactaattaaaacttgataatggtgggttgtgagcacatggttttgatggtcgtgctcatgacaattaaggacaggttcacgagtttcggttgtgaaacattaaccgtgccaaccacaagctagcatgggcaacggctttattttttgtatagcatggttcattgcggggcaccagactgagaagtggtggagataagcccacggggatcgttggggagtccatgccttgttttataagggggtgattatgatccaggaacgacgcattgctttgagttgtgttgtgcgaagggtactgtcacgatttccccctttgcagtgccatggtggtacttcggagcatggtaacatgtgtggaatcatgtcttgtgggtacagtggtacacatctggccagagtaaaactattcgaatagccgtgcccgcggttatgggcaggtctaacaatgtctttcgtgattagtctcacacttctcaccataataaatgatgctataactggtaataatttgattagctcctggtttggaatggtacattcctggtttggagatagatctgtacagccgggtatggttgttcaggtttggttgggcctgtgcagcatgggtgtgctgttcagtgttgattaatattgatgattaattactttactggtttacaattctcaaatgtttgctaaatgctgcttttgcaaatgagccctatattatgccattctttggtattcttgtgtacttgcatacttactgtgtggcttgcggagtattccatgtaatcatcttgtaataatcaatcaaacctcagttgaagagaagtcccaaaggagaagacgtttggcttataccccagttgagctgcctgtgggagtggagccggagtttcgctagatcgtttatccgttgctgttttctcttttcttttgtaagtatgtaacgttactattatgatgaatctgtatattaaattgtcagtttgtgtacctcggctgatttctggacgaggattttatgcataaataagttaaaaattactagtgaatttctaggtgtgacaaacagcaagcagcagagcagtggagggatggatggagcagtgaagcaacggaggggatggagcggcatggctggggcctggggatggggatagaggggatgtggaagaagatggcagcacggtagacgggaaggtcgccgaccggcgtcaatggcgatggggatcgatgatgacatccacgaaaatatttctttttctttttcttttttgtcctaacctgttagcatgtacgtgtataaaggtgattaatgaaagagtaatcatgtgattaatttagccagtttttccccacatttagacgtgtaaaacgattttataaaatttagtcaattgaacattttttttttgaaatagatcaaattttcattgacccggctttggaagaaagcccaaacagtatacagagtcttatacaaacacagaaaacaaagctacgaaacaaaagacttaaaaaaaaagtcggcacataacactggttctctcagaagcattccataccttgataacacctcacattcccccaggcactaacccctggtacaaaagacagcaaaaaactgaagccaaaagtagactcaaattgtcacaggaagacgacatggcttcaattgttgcagtttggccatcagcagctcacaccatcctttcatagtagcttgatctccttcctttagcatgatacaccactgctgaataaaagacaaagctttataagtgatttgcaaaggagactttgccaaaatatttgagaaaacccagtcattcctaattagccaaagtgcccagcacacactagcaaagagcatcacccacaccccctggacattttttcttttcattaaccccaaacaatctcttatattcataggactaatggttagacccaaaacatctctcaccacacaccagtaaagacaacaagaagacatttaaacaagatatggttagtagattcaatcttgccacacagtttacagaattcatcccctccctgccattttctcttaatcaactgggatgcacaaggaagcctgcctctgtctgccatataaagaaaatctttgatttttaaaggaattttacttctccaaatcttcatcttttcaacatctcttataccccaaaagtaatcaccctatacatagatctagctgagaagatctttttgttattgtatggccatattaaaatatctttgccctcccctagggcatgtttattcaatagatttcttaaatccttcagatctgcctccctggtagtgtccaaatttctcctaaaattagaacaaagccccaggatttacagaaaataatggagttttaaaattccaagggcgtatatgtgtttcagataaaaaggaaatcaaggataaaatattagaagaagcacatgattctttattttctatccaccctgggagtacaaaaatgtatcaggatttgaagaaaatattttggtggtctaatatgaagaaagaaattgcagaatatgtcaatttatgtgaagtatgtcaaaaggtaaaagcagatcattaaagaccagtaggattaatgcaacctttgcccctgcctgaatgaaaatgggatgaaattggaatggattttattataggtctaccaaagactaaaggaggttatgatgctatatgggttatagttgacagattaactaaggtagcatatttcttgccagttaagcaaacatatgatggaaacaagcttgctgagttgtacctcacaaggattgttatattgcatggagtacaaaaagaattgtctctgatagaggaacccaatttacatcaagattttggaggagttttcatgaagctatgggtacaaagttgggattcagctcagcatatcatccacaaactggggacagactgagagttaatcaaatacttgaagacatgctgagagtatgtgttttggtttatggcctagtttgggaaatttgtttgccattcgcccaattttcttacaataatagttatcagtcaagtcttgggatggcaccatttgaagtcttgggatggcaccatttgaagctttatatggtagaaaatgtaggacaccacttaattggactaaaacaggagaaggacagttgattggtccacaaattgcacatgatgctgaagcacatgttaggattattcgagaaaaactcaaaacaacacagaatcgacaaaagaattacaacaataatcaaagaagagacttaagttttgaagttggagattttgtttatttaaaggttatgccacttaaaggagttcaaagatttcaaatgaaaggaaaattagcacctcgatatattggaccttatagaattgtgcaaagaagaggtgaagtatcatatcagttgcaactaccagcagaattaaccggaattcatcctgtttttcatgtctcacagctcaagaaatgcttaagaaaaccaacagaacaagtacctctggatgacattgctttacagacggacataacatatgaagaagaacctgagaaaatattggaggtcactgaaaggaggttaagaaatagaggaattgaattttgcaaagtacagtggaaaaatcactcagaagatgaggcaacctaggaaagaaagtctgagctggaaaagaaatatccgcacctatttgctaactggtaaatctcgaggacgagattcctttaaggggggtagaactgtaacagccctaaaatttgacaactttttaaaaccaatttagtttgctttgattctctaaaaatatgaccgtcgagttagacatttatttaaaatattattttccatgcttatttttttatgtttcttttctcgtttaattttgtcgcaaagtgcatcttacacttcaaataactcctttgtatccaaatttaattctatcccgaatgtcggactatctaaattccgcatcaattcaaatcctatctattttaatcttcctcatgtttttcttttctctgtttccaccttaattttctttttccctatattttttccctttctctgttttctttctttcgtctcctctactcggctaggccgagccagggcctgtgtcaccccgtgttgtcacgcgccgatcccgcaccatgctcgcgcacgctcacgcccagctcgtgccagcccgcgtatgccacacgctcgcacgcgcgcacacgaggacgaacgacgaacgaatgcccagatgacacctccagcttcccgcctccgtaactccttcgtccctcaactagaaggctcaagaccggaggcaaaagaaccgaaatttcgacctctttcacctcctcaaatccgccccaactcccactgcctcaatcgtcgtcaccggaggaaaaatccccaaaaccctaattttgcgccattgattgagctccaaaattcgtcgcatacgttgcaaatcttctgaaattgaaggtacaaatggattctccatgccgagtactccctttcccctctctttccccttcaaatccatcgccggaacatcgccggcgccgcctcccgacgtcgccgctctgttcggccgtcgccagccgtacggcgtgccgccgctgccggccgccccaggccgagccgccgccaccaccgcgctccccttgctccactgatgctcaccatggccgccgcccttaccggagttcgccagaatcaccgccgccatggccgccgccgcctccagctcctagccgccgtcgccagcctcgccgccgccatccacgggaacggagtcgctgtatcctgtagatcgcaaaaccggtgcctccttgcccaaaatcggccatctccacaatcggccagggtgttgccggccgttccggtgcagagcgagagagaaaaatcctttttctctttctatcaagttaataaatcataaaaatttaccatccgtttgacctcgaaatcgaaatccgagacctactccaaactcctagaattattccgaatccatccgtctcagtttcgttgcaatccgagcacccgttgtcgcgaccctaattttagccctagggtttgccgtttactgaaattccaaaaatccctaaaattatttctttaaatccttttcacccattgttgcactttgtgataccatttgttttgtttatttttgtttttctattatttattgtggtgatgattgttgcataaatagaaaacgctgacgttggtccggtagtcgaaacgagtgaaatctccacgccagaaggagacggtttgtacgactacatcaagcccgaaggttgcaagacatgcaccctcccttgaacaatttaatcccggtagatagagttattttagtagcgtacttgtcctttggagtacgatagactgcacaaattcttttaaattaattatattgctattattgcattatattttcagttgttgttataaataccttaatgagccttaaagtctaacaagcttaggataaaatttgataaacatttaaacaaaatgttaattatttagcatgctatcgatttaatatggatattattatcattgcatatgaaaacatgcttatggaactatttatggctatatgctaagaattgttgacaccgcatatgagcgggtggaacacatgatagagttcatgtgtttggtttcatggacctgtttatggtcataatgggtatatcgatatatttatggttatttcttatttaaaattgatataataattaacccccttgtgtcaagaagaatgacatagtttcgcccatccacacaatcgatttgtcgaacctggccgtatattgctccaattgattaaacttctgcatgcctttcggtgtattggccattagctttcaagtgtgtgaagcaaagtgacatgtttcatgtttatatgatttatatatgtgggctcgatgggccccgagagttcagaactgccctatgggcccatgaagttctgggctgcccatcgagtaacgaacaatgataagtggatgcggaggtaggttggtacacacctcggaccggatcactccgagcaacatcccgagcatcctttaacttactggtagaagggagagatatatggagcaatattacaccttgttacttttcagcctagccagctgtgggtatcatgtgggtaaagctgggcaggcactgcagagtcgttgagtattcgaatatgccgtgctcccggttaatggagatgtgtctatgggtgattccagattatgggcacaagttaaactaaatggctattaattaatatggttaacttatttattacttgacgttctattcaagttatttataagtaacatttatattgttatgctcgttattattgtttaaattaaatgttcaatagtgttgtttatatcaaatgtttattaagttaggctctatgaaataactgttaaggttagggtttaaaccttctagctctcgatactgcatgttttatattgcaattattgtatttattatcataagcatgtcttgctgagtaccttttgtactcataaatgggttcagatcatgaggaagatgcttgtggagaacctgctgatctgttagagtgggatagctatggtttctaggtcatcctacgctcaggcagttcctggggtggagtctagcaatttatctgtttgtagaaataaggctttataggccatatatgtaatggtttgtatttatgttgtgttgtgaactaagtattgtataatcgaagtttatgcttttatatcatttcatgcgtaactgaacatcctgtgcagttacgtattcgtggggcaccatgactttatcgggtgtccccacaacaagttcattgttttagtatccataaaccccaagccaccataatcctttggtctgatcaaaccttcccatttcatcatatgatacttcttttttcccccaaggccttgtcaatagaatctccccctcaaagaatctattttcttatgaaactccctaggtaattgatataaccctataacatacattggggcacttgacagacatgaattgattttaatttctctcccaccatagatgagttaaccactcttccaagactgcaatctcttttccacattttgagttatttgtctgaactccctcatccctattttctctgtatgcataggcaaacccaaataagtgaaaggcatgtttcccactttgcagttaaacatgttggtaattcttaactcctcatctttctctacacccatcacatagatctcacttttctgataatttatcttcattcctaacatctcttcaaagcagaacaacaagaacttcaacaccctcaaagcagaacaacaagaacttcaacaccctgacatttgaaactccttccttaatactccctccatctacttttgatagtcatatttcatcttagtacacagaccaaggataagtaattctacttatcatccatttaaacatgttactagtcatttctcgtaaacatgcgattcattaatatttacattttcaatggccatgtagccaatctagtgtggaagaatggagagtcatgcattaaatccgagaaagtcattatgatgataggttgttggattgaaatatgcttatcaaaaataaaattttcatatttggaaatatgactatcaaaagtagatggagggagtagtaaataagatggtatcatctgcatactgtaagtgagtcagacctctaggaattagctcaggaatcaaaccttctaaaaccctacttgtttttgcctttttcaggatagctgccaaagcatcccccaccaaattaaacagcaaaggggaaaggaggtccccttgcctcaagcccctgaaagtcttgaaaaaagggccttgatccccattcatattaatgctgacattacccccccccccccgagattttcttcacccaaccaatgaactcactgctgaagttcttcttcctcgtaacctcatatagaaagttccaattaaccctgccataagccttttcaacgtcaattttgaagattatccctttttctttttttcttttcttcagctcatgcaaagtttcatgtaagatcacataaccttccaaaatatttttaccaggaataaaagcagtctgagtccagcttattatcttctcggccaccttagccaccctctcatttatagcctttatcaagatcttaaggataacattctgaagacagattggcatgtattgtttaatgttgtttgcatctgctaattttggtaaaagagtgataaccccataatttaatctgtcagtatccagattccctttatgcaattcatccaacatttccttaactatccccctaaattcaggccacatctcttatagaaacccacagggaagccatctggccctggagcagtgtttgccttcatctaaagtattaaaagtcaccccggtctgctcctcgctcagcgatttggcctggcgtggccacggccgcgttgcggcacgtcagcgtggctgcaatgaggagggttttggcgactgctcgtgaggccgcgtcggcgctggaatttttgcaataaaaccctcctctttgtgcgtttttccttgttcatccttggtgtgctgtttttggctcagcaatgtttcgtttagccccttcattttatgtgaaatctgatgcgggcgaggaggagacgaggaaaaaggggcgcgccctaaatcgtgcaggctgggggtgtattccccaaacttgtctttgcacagcgctccctctccccttcgcgagagcgccgccgcgtgagaggggaaaaaacgcggccgctacgctccttccatctttctcgtcggatgctgcttgtctcctggatttggggcttctccggccgctgcctgctctgctgcctgtggcgctactgtttgccgtttgtgggggctattctgcgtgcgccgtgttgtcggacaggattcgcggccggcgctcttcttgttgcgccgccgtcggcgcccccctcgaaggggatgcggtgggtgctggatggcgcggtcgcggtttggcgctgtcgttgttggggcgctgccgacgcccgctggaaggtagcctgtacgtgctggatgggtcgggcgccgtttgcttgccggcggatctgctcgcttagagccgacggctggtgctatcagggaggatggcggatggtgtcgtcccttgttgttcttccatggtggttagctccacaggttgcctgtctctctttcttcacctttttcctctgtctctgatctctgctttagagctgatggccaactctgatgtgctgcgtgcaggttgggctcggtggtggcggccgcggcggatggatgccgatggaaaggtatatatgcaacgcggccgcccgttcatgtttgctcttcttccccagatatgttcaatgtgttctacaggctgaatttgcctttcgcatgcttgtctcgcactgttcaccgccggctttcatgctgctcaatacctaggtcaaccgcgactacgatcctgatgactttgactgtttgtgcttcttgctgccctgcccgtttgatgttgatcgtgtggccgcgcttgctgatggttcatggcactgctcggtgcgcctcttctggctgtgtttggattccagtgatgggaactaattcctctcgcacggaaaacagagcggttcattagcgcgtgatcaattaagtattagctaactttttttaaaaaaattgattaatttgattttttaagcagctttcgtatagaaacttttttgcaaaaaacgcatcgtttagtagtttgaaaagcgtgcgcgtggaaaacgagggagatgggttgggaacatggggatgcaaacagtcagatatcgatttgctatcgctgacatgtggcccttaccgtcggcgttcgtctcatccacaatatgagctgtgtctatgtagggaaacacaactatgcatgcctactcttgtgcaccgatcggcgggagtggggctgtcaggttagcttgcaagtgcggttgtcaggttcaaatagttggggcggtgtgctgtgattgggtggggttttctcggctccatcgatctgtattggtgcgtgtggtctatatgctcctggtgactgaattgtggggtctaattggatgtggtgttagatggttctctcatggtgtatgatccagcctacttccttcatcgtggaagatgtgttaggatgtctgactttcaggtggggttgggtgccatggggtccatgtatactcctttcgtattggtaggtgcgcttgctgctcttagatgtgctgtggttttagtttgtcctttcttctctgctatatttgtttgcaggtgctagcagccatcttcttttctcctcttccttctcaagctttcatcgtcgtttccactgctctatcgttttcattgcttctttcgttggttcgatctacacgtgtagtccgcatctgtttgctgtgatctttgatcgttcagtatggcagggtagggtgtgaggaggctctcattttgttctcatctttattcgatgtttctcctgtttttatgcctcctgatcattctttggtttttctcttggtttttagcctatgggatctgcatgagctggatcgatccttcaagggttcttgattggttttgccaaggaacgttggtgctgctccttcgatcgaggaggttagcttcttcatcctgtgtatgctttccatcatatagactgccctattcactgtattcatcgtgcattttctttagcatgcatgtatgctaatggtcgtcttctcttgcgcagggtcagccaggctctctctttccgttctttcttctatttcttagccgacagctttgtcctctgtggatactcttggtcagcttgtttctgttgcgttctttgctgattgggtgttcgttcatacaaggtattttcatctgtcgtgtgctccctctcactatttcttttttcatcttattcattgttactcttctacattgtcttttggttctttttgatatcgttccttcgtgcttgtttgtatcttgctgtgtcggttctttggttgtcagatgtctaggacgttgcatgtctgctgtcgctatcatcagttattgtaccgataagggacacctcgatggcttttgttacttctgcataactaactccgcaggcttctcttccatgctttctttctttatattctgtcctttacagcctgtagtcatgtcgtttccctctgcctcacttttgattctgctgcattcgttctcatctttagttaatttgcagttgctgttccagggttccctctttctgtctttatatatttgatgctgttagctcgcttcatccccttgtagatattgctgcactatggtgcgttcttgtggcctgatcttttattgagactcaaactaggcttaccgttgcatggttcgcacatgatatgtgtgccctttgtttattttttggtttgagatagataattgttttcagggtgaggtagccatgcaagattttaaaaacttgatatctgctgttaattattggttttttatttttggtttgagattactaattgttttcaagctggattaaccatgcaagattttaaagacatgatatgcattgttaggttttgattttgtctggcgaaaaaagaagtatgcctgattaatctctgcagtgcgatctgggagcagcatatttggtgcctctatgttctcttctgtatagcgcagggtagttttccggcgaattaacgagtatttaatttgttattgcgggtaccagatacgttgctttcctgctttcatcactccttcgtgttatatgtcgattatggtcggtgcctttgttttgctattcattcatactgatatttctcatcctatgtttttgccagcgcatctgccctgttttgtaaacaaagagttcgcgcgtactttcttaaactattaaatgacctttatgcttacatggcatggccattgtctgtttaggttattaggtttttcctccgtccttgtgatttggcttgtctgtttatgatattgtggatgatggccgatcatatgtggcttagatctgatactattttgcagcttattgtgtagattaataccatgtatctgctttatcaattgtttggtctgtatatgactcctgattgtgtttctttacatcctgcagggctaattgtcatattctgttgttgtctctgggcctacactggatcgcagtcttcttttccactgttccgtgcaaggtaactatctccttgctataattggatttttgttcctgtatatgaatatatgaatttatgtgcttcctttttagctcgtgcatggattgtgtgtgtaagtgcttgttttgtatgcctggcaatctgtgctaatgatctgtgatagaatgtgcttagactttatgcatatgtgttgtctctgttggggcatgtaacaaaaatgacagtcagcgcatcatcttttggtagcaatcgcacacgttagcttgcacatggctatctttctgctctctttcctcatatttcaaacattgctgcctgtaacgaatttcttttccctgttctctctaggctttatagggctaaggtagttttctgctctcttcttctccatctcatcttttctgtcttccctgtgctattccttctgcctctgttgcacactttacttccagattatctctttgcagtgttttagggatgccatgaaactctttatttattcctattagtctgcgtatattgctccatcagtctcggcaaataccagaccaccgtatggacagggttcagagagttcgcgcgagtcgagagaaacgagccgcgaacattttgttgcgctcatctgcgatgcgcatagaaagcgccataccgttgccagcccaacctccccagattcatcgagccaaaaagccacgttcgttgatggactttactccagagctatccaagctacatagacagcaccggtctttgctgcgttcaaagatgcctcctctccttgcaccacagaatggtaatactgtactgaaagcacacctaacagcgttcattaccctatatatgagaagctacggcactaaaatatgattgcaatgttcgttaattgcagctttaaacagcagagcctccggtagttcatcaaggacagataaggaatacatccaatcattgaaaggtccgtgttttctgataaaaaaaataaaacaatttatattggccggttaaaagaaatacattctcagatatgtattgtgcagcatcatacccaggacggtcgtactatggccctccaacacatgagtgcccctactgtggtgcagtcttctggtttcaggagagaattaagactctatctgctgtgtcaaagaggaagaaagtttacaacctatgttgtaagggtggcaaaatacagctgcatgctttcaggccaccacctgaacctctcgctaccctattgaaatttgatggcgatgcacgatccaaaagatttctgaggcagattcgatcatacaattcaatgtttgctttcacttcaatgggagcgactattgataaatcgatcaatactggaaatgcgccttatgttttcaaaattaacggtgttgtgcaccacagaattggtactcttctaccatcgcatggtgcacgccctaagtttgcacagctttatatctatgatcctgagaatgaaacccaaaatcgactcaatatttttgaccgtgaccgtgatgacaacgataggccagaccctgaaatcattgctgccttatcacgcatgcttgatagcaacaatagacttgttcaaaatttcagatacgttagagaccttctttctcagcatggtgatgagaaaataactcttcgcttattaggctgtaatgctagagatgatgtccagtataaccttccaacaagtactgaaataactaccataatagttggtgactttgatgcgaaagaatacaaatttgatctgctcgtgcacgatagagaccacggaatgcgtcaagtttcttccttgcatccatcatacctatctttgcaatatcctttgctatttccctatggtgaatctggtttccatctaggcatcgaatatagtaattatgatgggactggtagaaaatatctcacgatgctggagtttcatagatatctaatgcattataggctaaatgaacctaatcctttcacatgctatggccgactgagtgaccaagctgttgttgatgttttttctactatcgaagctaatagactacagtttataatcgatcatcaaaaggaattacgtgctgaatctgtagaagaaattgtagatgtgatagatagaggtgttaccgatggagattcagttgggaaacgccaaatacttcctgctagctttactggaggcaggaggtatatggtcatgaattatcaggacgcaatggcaatctgtcgcgtctatggttcgccttacctatttgtgacattcacatgtaattctaagtggcaagaaatcgctgaagcaatccgatttgaacccggccagcagtcatctgatagagcagatgtaattgttcgcgtgtttaacatgaaagtcaatgatttcatcactgatattagagagggaaggacttttgggaaatttcttgcaggtagcagccaaaatttattttctgtttagtgtttcaccaatattttccttatagttcctgttctttaaacctttttagttctgtacactgtcgagttccagaagcgcgagctgccacatatacactgcttggtttggcttgcagcatcaactgctgacatctcagcatctgtgatagatggcttcatctctgctgagattcctgacattgaaaccgatcgactaggatatgaattggtaagcgagtttatgatgcatggtccttgtggcgatgcaaacaaaaaatgtgcttgcatgaaaaacgacaaatgctcaaaacattatccaaaagactttcaagatgagaccattattgatgaatctggcttcacaatatacagacgacgaaacaatggacggtttataattaaaaatggaattcctttggacaatagatcagttgttccatacaacctgaagttgcttaaaacatacgaggcacacataaatgttgaatggtgtaacaagtcaaacttaattaaatatttattcaagtatattacaaagggacaagaccgtgcaaaatatactttgagacaactgcgaagacatgaaatatgtcaccaaatcatgacctcgctcctcctaatgaaatactagaatacatggatggtagatttctttcgacatgtgaggcgtttcatcgagtatttgagtttgacatacactctagagtgccaccagttgagcgtctagctgtgcatttgcctgggaaaaactatgttagatatgagccaggttctgatttgcgagcggtgctgaatagccctggtgcgaaacaatcaatgctaactgcatggtttgaggctaatgcaaaatatctaagtgcacgttcattaacatactgtgactttccaaaggaatggtcatgggactcatcatctaaaacatggcgtgcacgaacaccagctgcgaagataggtaggatatattatgtgcacccaacctgtggagagctatattatctgagaatgttattaatgatcgttaaaggcgcgcaaaattatgctgatgtacgcacgtataatggcaatgtgtgactgtcattctttattgctctgttggtaacgtacgatcattgtttgataagtattggctttacatgactgatgacatccataacaggctaaagaaagcactagataatccacaatgcatcattccacatgagcacttgctcaatctcctcctgcgtgaacttacaactgtttttgcaaacagtggcggtaatataaaagattttgacttgccagtacctacatctaccgcacacatgcccgacagtaatagattaatcgatgaagagcttgcagctgatccacttatgatgtccatgcatgctgactctctgatagcgcagctaaatgatgaccaaagaaagatctttcacgctatagtctcctcagtgactgcaaaccagcctagctgttattttgtaagcggtcatggtggaactggcaagacatttctatggaatgctatcattgcaaaacttagatcacagaacagagttgtgcttgctgttgcctcatcaggagtagcatcactgctgcttccaagaggtagaacagctcactcttgattcaagattccaattgacattgatgaaactagcatctgtaatataaaacgaggaactatgttagctaacctcctcattgaaactgcgcttattatatgggatgaagctccaatgacacataggcgctgttttgaagcattagatcgcacactccgtgacattctctctgaaacttctccagcgaattcgatcataccttttgggggaatgcctgttgttttaggtggtgacttccgacagatattacctgttgtccctaaaggttcacgtgccgctgttgtaaacgcatcaattacaaattcaactctatggaaacatgtcacgctattaaacttgaatataaatatgaggttgctcaatcctaccctttcacagaacaaaaaggatgaaatgcatgaatttagtcagtgggttttgtctgttgggaacggaacattgcctatgactgcgagggaggatgatgctcagcccacgtggataacaattcctgatgatcttctcattatgaccaacgacgataaaattgcagctattgtgaccgaggtataccccaactttcttacatcatatagagacccaacataccttgcttcatgtgcaattgtttgccctaccaatgcagtagttgatgagttaaatgattatgttgttggtttagttccaggaaattcaacaacgtacttaagctgcgatacaatatcaaaatgctctgagcaaataccggactttgacatgttatacccacttgaattccttaattctattaacgcaacaaactttcctacacacaaacttgtcttgaaagaaggtgttgtcgttatgctcctccgaaacctgaaccagtcagctggcctctgcaatggaacaaggctgttagttactagcttaggtcagagaatcttgcagtgtatcatactgactggatcaaacatcggtgaaactgtttacataccgagaatcacattaagcacatcaaaactgaaatggccttttacactgcaaagaaggcaatttccagttcgggtttgttatgcaatgactatcaacaaaagccagggacaaaccctcgaccaggttggcatataccttacaaaacctgttttcacacatggccagctttatgttgctgtttcaagggcaacaagtcgatcaaggctcaagatattgatccagaatgatgatggatcatgtggaaaccaaacaagaaatgttgtttatgttgagatacttgcagcggtgcatcaagcggtcatactctcgctatgtttgtgcatttcttgtgtctttgctccacttgtcttgtgctgttcatgtgatagtggacattctttcttgctgcaggctatgccgcttcagatgtagcctgcttttcctcgcaagcaaaacattgttcctcttgtatatacattttggaatagcttttttgctcacatatataccatatactatgttatggctgcatagcctgcccgttacacttaagtacacttcatcttgacttcctgtctcattccactgatgttccctgtttatatacactcagtatctttagtgtttcatcttccagatttccaatggcgtatgtgcatatttcaagccttttctgtggggacaccaacaagcaaataaaagctcgcgtatccaggctatggattttccatgatatgaatgatgagacaaagatctaccacaccaaccttgtcctgctggatgaaatggttgttgtctacttactgcttctttggtttactttcactcttgtatatatcttgtggcacactaacaaagtattttgggttaaaaatatgcagggcagcagcatacatgttcagatttatccatctgtgatgaataggtttaagtctgtcctacatgaaggaaaggtttactacattgactccttctctgtcaaatatgcaaacaggacatacagaccagtcaccaatcttttaatgatcttatttaccaaatggacaactttagaagaatgcattgatgttcttggtgactaccctggcataacattttcattgacaccttttcaagatatcccatctcttatcgacaaaaatactttctacattggtatgctcactttacatcatgtattcttgctatgtttctttcacatccttgtgtccctttattaaacttatttgctttcaaaccagatgtcatgggtgtgataactaagattagtgacacagctactgtgcgccctagatcaagcaacactaatagcttgaaacgaacaattcaaatctgtgaagcaaggtcagttacgctatacgcttactttccttttgatataagctgtcctagcctcataacatgcacggtagtcatcctgccaagctcacagtatctaagctgaagaactttttggccacttataaaaacagcaattcaacactccatatcacgctctggggaaagacagctgctgccttcaatgcagaagaagtgcataaggctgggcagacaaggcctcaggttgctgtctttgttgggacacttgttagaaactatacaggcataggtatatgtctacaaacatataaaactgctattctatccgtctaataaatttacaatctataaccatttatatgattatacacagggctaaccttaactggaagttcaccatgcaaatggtatattggtcttgacatggttgaagcgcttgagctaaaacaaaggtagtactgtcagccctcattctttctccagtgcctatgcaatcctctgcttacaaatataggagtagtacaccacttatgaatttgtctttttccttctagctttgaagcaaatttccagcctatcaaatgggtcgaaaatgctgcagcggggttcaaccaagacattccataggaaaaaaccatagaacagatccttgctctcaatccacataaacatcaggtttcttttctgcccatttactactgaatacattcttatcctgcctatctatcttttcaatgaagccatccttgttgcagcaagaacgttttatagtcaatgtgactatcaaagacatagcaggcgacagttcctggtattataattcatgtgatctctgctacaggacctccaaaccatatggttcaacatatagatgtacaagctgctcatatgtaggcataccagtgccaaggtaaagaatatacttgagaggctatatccatggcttcgggaaactctttaaaatactttcatttaacatgcagaaacaagatcctacttaccgctgctgatgacactggcaaggccacgtttattctcttttgaagaacagcacagcgtgtcatacgtaaacctgttgagactcttattgaccaaaatccaccaaacaaggaatttattccagacgaaatcacagccctcatcaaccagagctttgtctggaatatcagcttcacacaggatgctttcatgaagaaccaagaatccttgcaagtaaacagcgttgtttcatcggctggtccaatacagctgatgctgtctaactcaccaccaccttcagagcaaacgttggctattatcccagcaagctcaagcagctctgtagagggagcatcagcagaaagcaaaaaaagcactgaatcaaagataaaggccagggcaaaggaaactctgttagcgctacatactctagtgacaccagtgaggcatattgttaggcctcgatcagagcagactccaactagcaagcttg

SEQ ID NO: 8247 - DNA, 28764 bp, Oryza sativa
tagttctgtgagaattcgcttggatatatattatgtttttagaaaattatgagctacaattaggaatccgatcgtctcaaattagcatgcgagtttttctaaaaaaaatcattatacaactcctgtatttccaaaagcgaacgaacttaaaaataaaaaattaactcaaatacgaatatgtattttcaaaaacaaacgaacttaaaaaccgactcatacacggatgacgtaccaaagtaccggtaaaaacatctttaatttttataatagtagagaaacaaaaaagagttatatatcaaatttaattgtactttaagatatgttttatcttttcctattaaaaaattcaagatgattgtgtactcacctgctttcgttcgtcacttggtgaaaacatacagcccgatgcatggaaccgtttttattattattgcctggttcaacaaaactcagtaactaattacatccactccaaagaacagatatccagcctaactataaaaccaaaaaattttctttgcaactaaggaaaccatcactgcagaaggctgaaataacattgtcatacatacaaaagaaatctagtacttcctccgtttcacagtgtaagttattcgtgagaaacggagaaagtagttgctcaccaccagtccaccaccgagcaacatggacacggccgcttgatccagatcagcttcgacgaggatgttctatcacactttgcgataaagacggtgttggacatgagcggacaaagcgatcgaatagggacatacgtcttttcttatacgccacggacgaaagacaaaacgaattaagtatagagtcatctataattttttaaataggtaaagatgaaggaggaagtcatcacccttaaagtccacttgtaagtgggataagtccatttgagctccctctaattcaaaacgtggtatttgatatctatcgacatatgaaaccgtttaatttatggttacgtcaaaatggtttttgtctacgtgtaaattccgtaataaaacaacatttggacccacgccagcttagctgtcatcatccacgtacctctcttttttctcttcccctccatctcgatcttcaagttgccaggcactgcacactggggacagatcagagaacttatagatgccagtatgccacctcctacctcctttacgagctccgttgttgcaccgcctctaacatgatctcacgaccgcctcctccatatacttagggggcatttgtaaatttgccaccggttttttcaatattacaaggatgccactcgaatgatggttctagtagcatttttacaattttctagtggcagttttgcaataacgattcaaagtagtggtaaatttgcaattgtccctatacttagacgaggttgtggtactgttcttcaccatggctgggcgagcttgaggtgtctctgtgtgagattgttcacacgacggtaaaatatgaagaaatttaaatgagaagtgattaataagaccattagtactctatcgtaacaactattttgtgacaaattcccagtcaaaaaaaatattttgtgacaaattcaaatcctagaaatacgtataattattatgagatagaggtagtaattgatatgagtacctagatatattgtactctatatttgattacacaattagctttattttttcttttattattattatatttcattgtgtgatggtaacagttcaatttccccccttggattatgcatgggtgcgtgatggttctacacgtacgtatttaggaaatttattacagtgcatcaaaacttcaataaaatccttgttctatacattaaatatttatgtccggagagagtacatatatttgtatggatgtaacacttgttttgtatgtattgaagaacaaaacaaatgaattttatttgcacttccaaaatttaaaatcagtacttgccaaattatatatagagtgttgtttagtttggacctccttttctactaaagttgggaaaattgtaaaaaacacacacaccggaagtaccttcaagtttgacatttcaccctataaagttattttattgtaaatgcacatccactattatgttttattacaaaaaccaccccagcatgtgcttaaccaaatcagcttgttatcgctggtgtagagctccacatgctaagctagccgagtctatcgtgtctaggtgtttaattagacttattcttcatgtttcatcaaattttttctgcataaagcaaagctcagagcgacaacatttaagctttcatcaacaactctatttgtggaatctccaaaaaataagtgtcaaaattatacttctagaagtatttttagttttggtacagatcacattgatgtttcacaaatatacgaaaacatattgattcggttaagcacatgtgcattgggatagtttttgtaaccaaaccgagtatgtggattgacatttataacaaaacaacttaaagagtggaatatcaactttcaagcgacttatggaatgtttttttttttgcattttttctactaaattttcacattaaacccacttagcccatgtttttatttcgatattagtttcgtttggattccttttactctactacttcgtcccaaaaaaaatccaatcataataatgaatatggacacacatgtgtctagattcattgctagagtttatctttgtcggtgatatgggaccgggagtatcgtgaccagaggcttgaggcagacacaatcgcccacgtggcccggcaccctcggggacgtcgggcccgagggtgaggtgtccgccctcctcttgatttccccgaggggggtcgggttactcctgccccggccccgacggccgaggcaccccgacgcctaatgaagtttgcgccacatatatgggttaggtgaacacggcagggctcacctaaccgcatttattgcggactggacaggcacgtcacgctgcatgcagcgcagtgcagcacgttcctttatccggtctgtgaccagtcacagaccggtcagatcaacggttaggtggcgactggcggtctgacgcacgcctcgccccgtcccgtcaagacgagagcctctaggcacacgtctccagccggagctagcgtgttacttcttagagatggcacgttagccctggtcagatgaataccaggcttcatcccaaccattacaggcaagatgttacacgaagaagggcgaaatacatgttgcaaagctgacgcgtggtggacaagaatgaccgatttgtgaccggtctgacactgctcatatcgtcagcagacagcctcgttctcacaacgagcctgcctccggcagaagtggaggtaggtatgtgccgtcccgtcagaaggacgttcggagggcaaccatgcaaatctccgcttcatttatgaagagaagaaaagtccagtttggaaagggaggggtgcatgtggtatccccttgagatataaaaggaggaccttgcccatttagagtgggggggctggagattgacgaacaaagaagaagggagagtttggctcacactttgtaactccttcattcatagatccaccaaaacacaggagtagggtattacgcttcccagcggcccgaacctgtatacgtcgcctgtgtctcttgctctttggataggccgcgatctttccacatacagagagagcctgagatctcaccctgagcccccggccgaaccggcaaaggggggcctgcgcggtctcccggtgaggggccacgagctccgtcatctggcgcgccagatagggggactcagcgtgagtcttctgagctctcgcactcttccgagtgtgccaagcttttcttgttcagcctaatggccgagcaagcaaaggcgcccgacctctctccgagtgtgagtggcgacgacggggagccaaacccacgccgtcgagctcgtactcccccgcctcctccacatcaaagtcctaagcagggggaggcgctcgagagggttgaaagatccgcggcttcaccaatcgcgggcgatggaggagaacggcgagatggggagcgtcgcctcctcgtctacggcgacggcagcacgccccagggcgcacttcaggctgctggcgcgctcctacgtcacccgcccgtcgtccctgacccggagtctccagcccagcgatggctggacgacgtggccaacttggtcatgacggcacagcagcgcctgggtactggtggacggtcctccacccccagggccaccggcgccgctaccaccggctccgtgtcgtcaaggcggagggcgcggcgagcggcggctgttgcacgccattcggctgccactccctcatcggcgcctccgactcgggagaatcagtgtggagagccggatgcccgcctcgacatcgagcgccggcgtaatgatcggtgtactccctatgcaacggagggcgcctcttcgtccagagtgtcacctcgacatggacgcgaggaccagccctccgtgcccccggctggtggtgtcggctgtagagcctttgtggcgagtcttcggaatgtccgttggcccccaaggttccggcccaccatcaccgagaagtatgatgggagcgtcaaccccactgagtttctccaggtctatacgaccgggattgaggccgctgggggtgacgacagggtcatggcgaatttctttcccatggccctgaaggggcaggcgcggggttggctgatgaacctgccacccgcgtcggtccactcctgggaggatttgtgccaacagttcaccgtgaactttcaaggcacttatccacgcccaggtgaagaagcggacttgcacgcagtacagcgaggggatgatgagtcccttcgctcgtacattcagcggttctgccaagtccgcaataccataccttgcatccctgcacacgcagtgatttatgcgttcagggggggtgtgcggcacaaccgcatgctcgaaaagatcgcctccaaagagccccagactaccgcggagcttttttagcttgcggaccgagtggctcgtaaggaggaggcctggacttggaacccctccggttccggcgtggcagcttcggccgcccccggatccgccgctcagacagggcggcgtgacaggaggaggaagaagaggtcggtccattccggcgacgagggtcatgtcctcgccgttgagggcgctccgcgggccacccgaaaggggaggcctgcgagcgacaaaaagaaggaggctggtgctcccagcagggagcgcccggccggcaagtggtgctccgtccacaacacctccctccatgatctcgcggactgtcgcgcagtcaaaagcttggctgagcggacgaggaagtgggaggaggagaggaggcaggaacgccgtgaggacaagtccccggcaattccctccggtaaacggcgaagtgaggctaggcagaaggcccccgctgttgacatcgatgacggcgatgatgacctaggtttccaagaacctggggccaccattgccactgtcgatgggggagcgtgtgctcacgtctctcgccggagcttcaaggctatgaagcgagagcttctggccgcggcccctactcatgaggcgacgcgtcgggcgcggtggtcggaggtttccctcacctttgaccagaccgaccacccaccgtgcgttgcccggggagggcagattgcgatggtggtttcccccaccatttgcaacgtgaagttggggcgtgtcctcatagatggaggagcggccctcaacatcctttcccccgcggcctttgatgccatcaaggccccggggatggtgctccggccgtcccaaccgattatcggtgtgacgccggggcacacatggccgctaggtcacatcgacctaccggtcacctttggtggatcagccaacttccgcacggagcgggtgaacttcgatgtggcggacctcagtctgccgtacaacgcggttctgggtaggcccgcgttggtgaagttcatggcggcggttcactacgcctacctccagatgaagatgccgggccccggtggccccatctctatccatggcgacctcaaagtcgcgctcgcttgctttgagcagcgcgcggaccacctcgctgctgcgtccaagcccgagggtggtgacgagaggcttggcacctccgcccccaccgccccgaggcagcggattgccacatgcgacgaggtcccggtcaaggagattgccctgggcgacggcccatccaagaccacacggatcggtggtcttctggatggcaaataggaagacgcgctcgtctccttcctgcgggcaaacgctgacgtcttcgcatggagaccggcggatatgcccggggtccccagggaggtgattgagcaccgtctcgctgtgcggccgggcgcaaggccggtccggcagaaagtgcggcggcaggccccggaacgtcaagccttcatccgcgaggaggtggcgagacttctggaggccggattcatccgtgaggtcatccatccggagtggctggcgaacccggtggtcgttcccaaggcgaacggcaaacttcggatgtgcatcgactacaccgaccttaacaaggcatgtcctaaggacccttaccccctgcctcgcatagatcagattgtcgactccaccgcggggtgcgaccttttgtgttttctagatgcatactctggttaccaacagattcgcatggctagggaggatgaggaaaaaactgcgttcattacccccgtaggaacctattgttatacatcaatgcctttcgggttaaagaatgcaggtcctacttttcaacgtactactcgaatttctttgggtagccaaataggacgtaatgttgaggcttatgtcgatgacttggttgtaaaaacgcgcaaccaagaaactttactctcagatctagcggaaacttttgagagcctccgctccgcccgcataaaactgaaccccgataagtgcgtgtttggtgtacctgcgggcaagcttctcgggttcttggtctctgcccgaggcatcgaggccaaccccgagaagatacgagctatagagcggatgcgcccccccagcaaacttagggatgtgcagtgcgtcaccggttgcatggccgccctaagtcgtttcatatcaaggctgggagagaaggcgctacccttatttaagctcctcaagcgctcggggccgtttacttggacggaggaagctgaacgtgccctcactcagttgaaggcatatctcagctctcccccggttctagtcgccccggagccaaatgagcccctactgctctacttagcggcgaccccccaagtagttagcgcagcgttggttgtggagcgcgatgaggacaatcctcattccgcgcgcccccaccctgtgctgatttggcccgggagcaagcagggaggagaggcccccgagccgaacggtggcctaaggcccctgacgaccggagtcggccctctgcccgcttgtcagacggtgctgggtgcccccgaccctcaggaaggccccgaggccactgcgggaaggccgcacctaacgccctttgaccccgaggctaaccctgtgcggactcgacccgggagagagcagggagaagaggcccccgagccgaacggtggcctaaggcccctgacgaccggagttggccctttgcccgcttgtccgacgacgccagggacccccgacccccaggacggccccgaggccactgagggaaggccgcccctgtcatcctccgaccccgaggccatcggcacagtagacgagtgcgccccgagaggccacttggacgaagaacgcctcggggacacggcccctagcgaagaggatcggccccgccgaaaggtgcagcggcctgtctactttgttagcgaggccctccgggacgccaagacccgatatcctcaggcccagaagttgctttacgctattctgatggcctcgaggaaactgcgccattatttccaggcgcatcgggtcacagtggttacgtcttaccccctcggtcaaatcttgcataatcgagagggtacaggacgggtggtaaaatgggcaatcgagctttctgagttcgatctgcactttgaaccacgccacgctatcaagagccaggccctcgccgattttgtggcagagtggaccccggctccagagaccgtctcaatccccgaggccagcacggacctttcgcagctgcctcacaccgcccactgggtgatgcagttcgacggttctctgtctctccagggcgccggtgcgggggtcacgttgacctccccgaccggagacgtccttagatacctggtccgcctcgactttcgagcgaccaataatatggcagagtacgagggactccttgccggactcagagtggcagccggactggggatccgccgcctcctggtgttaggcgactcccagctggtcgttaaccaggtctgtaaggagtatcggtgctctgacccgcagatggacgcttacgtacgccaagtgcggcgtatggagcgccattttgacgggatagagcttcggcatgtgcccagacgggataacatgatagccgatgaactctcacggctcgcgtcctcgcgagcccagaccccaccgggcgcctttgaagaaaggcttacccagccgtcagcgcgacccgaccccttaggggagacggatgcgcctgaccggcccccgaggcccgtcggagtccaggcctcgggacctgaagggagcgctccaagatcccttagattgattgcttggatctctgaggtccaaacatacctcacagataagactctacctgaggaccgcgaagggagtgaacgcgtccaacgcatctccaaacgctacgtgctggtagaagggaccctctatcggcgcgcggctaacggaatcctcctgaagtgcattcctcaggaacaaggtgttgagcttcttgccgatatccatgaaggcgagtgcggagcccattccgcctcgcgcaccctggttggcaaggcctttcgtcaaggattctattggccgacagctctcaatgatgcagtcgacctggtccggcgatgcaaagcgtgccagttccacgccaagcaaatccatcagccggcccaggccctgcagatcataccactttcatggccatttgctgtctgggggcttgatatcctgggaccgtttaggcgggccccgggcgggtttgagtatctgtatgtcgcgatcgacaagttcactaagtggcccgaggcttatccggttgtcaagatcgataagcactccgcacttaagttcattaagggcatcacggcccgttttggagtgcctaaccgtattattacggataatggcacccaattcactagtgaactcttcggcgactactgcgaagacatgggcatcaagctctgcttcgcctcacctgcccaccccagaagcaatggccaagtggagcgcgccaatgcagaaatcctcaaaggccttaaaaccaagaccttcaatattctcaagaagcacggcgattcatggatcgaggagttgccagcggtgctctgggcgaaccgaaccacaccaagccgagcaaccggggaaacgcctttcttcctcgtctacggcgcagaagcggttctcccatccgagctcaccctgaggtctcctcgggccaccatgtactgcgaggctgatcaagatcagcttcgcagagatgacctcgactacttagaagagcgaaggcggcgcgcggccctccgagccgcgcgctaccagcagagcctgcggcgctaccatcagcgccacgtccgggcccgatcactctgcgtcggcgacctcgtcctacgccgcgtccaaacgcgtgctggattgagcaagctctcaccaatgtgggagggtccgtatcgagtgatcggcgtcccccggccgggctccatacggctggccacgggcgacggcactgagttgcctaacccgtggaacatcgagcaccttcgtcgcttctacccctgagggggggggggtcgggtgtcaggttttgggctcgggccaaccccgcacccccctcgggtgtgcagggttggccgggggctaccacacatgcacattctcacttctcttatttcaccttttcaataaaagcagtttcaatttcctaaaggctgtttttgtgccgttttttccttttggagaatcttgacttgaaataaggtcactcgtgttcaaccttgccctcgggggctcggttcggtcagctaaaatcgccaaacggggcccagaaccgagccgtgccccggggcgtggtgaactccgagggggaatcggcaaaaacccacaatcgggtcacccataaccctcggtcaccacgttcccggcctggccagtctcgacatgtggatctccccaggcactagccccgacccgagccatttgaggactgggacttgagcacgagcccttaaatcaagctaagacgcaaaagggccacggcacaaatcatcctcatctcatatgcatagcaaagtaaaattaacgcaaagaatttttcatcatttttgattgcagattaagttgatctatacaaaaaagaggcctgaagggcttagaagaaagaaaaagaaaaactggagatcggagggggcctgggggctcaatccgatgcgcccgggtcgccggcctcgtcgtcagcatcgtccgcgccactggcgtcgccctcctcgtcggagttgggggcaaacgcgagccgaggggccgagccctcgaagctgttgacgatatgttcggcggcatcccgaacccgcgcgcgcgcgtcgtcttcggtcccggcagggaactcatccagcgccatccatggggagaagttggggtccctggcctggtaactcgctaatacgagttccactgctccttgggcgaggtccctcgaggatgacttgatggtcttctcgagctcctcggggagttgttggagagcccaggccatcttcgtgaggtgcggagcgaggccttccagattggtggagtgcgttgtcgtctagcctttccagaggcccacctgccgtccggcgcgatccagacgggagactgcgtcccaaagcgtgccgggccctatctcgcccgccaggcgaagggcctcggcttccccggcggatgagtctagcgcgcgctgcatgtcggcgacggtgtgttcggcagctgcgaggcgggcggctaagtcgctttcgcccgtagccgccccgccgctgcgcgccctcgcgtccagctccttttcccgcgcctcgaggttagcagcccgctgctctagcgcggctctctcggcgcggacgcattccagattgcggcgcgcctactcctcctgcgctgcctcgcggagggacaggctgtccgccagccgttgtgccgcggcctcggactccccgagagctcgctcccgctcagcgagcgcgtcctcgcggaggcggagcgcggactcctcttcggcgcaggcggcctcgtgcgccgccagcgtcgcctcccggatagcggcggcggcctcgcggtccgccaagcccctctccacggcgccggcgtgttcttccagcgccatggcacgggcctcaagggcctcctcgcgccgccgggacgccgcttcagtctccgttgctcgctgctctcgggcagcggcggcgtcaaggatcccctggtgtcgaaacatgaattcggcaataataaaagggggtagcgcacgagacctaaaagtggatggatgcagagacaaatgatttagacaggttcaggccctctcaatgagaggtaataccctactcctgtttggggatttgaatccgccgagtatgtattgatctgacgatcaggttgtctcatgcccctagagggggctccctgccctccttatataggttggggggcagggttacaagatagaagccttaaccaatacggtatcggtttcctaaatctactttacaatattatcaaaccaggactttaggccgttccgtaatatacaaggaaacgtaacacccaagtcatgatctgttacatattacaaaaatataagttatcccctataactagtcggataaccatgccgtgtgggtatggggtacccataatctccacagtagcccctgagaccttcacagtcgaaaagataaccttctctcgaactagattactccaaagccgagtgcttcaatcatcttcgccatggtctcccgagtacttttaccaaatctgaagactgtggaaggctgaaaaataaagtcaggtgcaccgactagatgcacctaataggtgtagcccccgacaatgtggttaattgaacaaaccaagcatatagtcaaggaataaataatccaaccaaccgagtggttttgataatcgtaatcaaccaagtgacttgatatcaatatatagcatatgcggtgtgaatcctccaaataacatgatccgggtgatataccaactgctttgtaaaatatgatgagtgatatagcaaaatagctataaagaagcttgtatattgtgaataaagaaatttccaaagtattgggcatacgccatgcgcacactgctttaacagatgtgcttaagtccctaaaagacacatggtttcaccacacctggaaatatatggtatatgtggtataacatccgagtaagtaaactcataaaggatttaccaaccgcctgaaaaatgaccataatatataatcagcctaagccataatattggtcaataaaaatgcacacttacgtggcaaaaagcaatgatattgtatccaatcaattgcttgataaacccaaacagcaccttgactatataaaaaagtcagcgggacagctatataaagctttactgtttgacaccttttaagatgcattgtaccaactcctaaaaagttaagtaactgcggtataaaaggattttaaggtattgggcacttgatcacgcgcactttggcctaagcaaaaagtgcctaagtccctaaaagaacgtgacaggccacacctgaaaatatgggctgcagacatattaggcctaggccaaaaaatatgccttcgacaccctttaaaggatgacgcatgtaacatgctcccgagtaataaatcttccgggtaatatagaccaagtgtagctcatatgaatagcttctgatctgaatgattatcccctatgggatactccaaaataaatataataattgaatcccgactggcgcaagtattcggttgatagcccttacggggaataataattggtccagtctttgagcatagaaaatagactcatgactatgaatccatgtggaatgtatccggaacaagtccaaattggagatataatcctcacgcttgagttgatgagcccctgagcatatagcttgtccttctgtcatagtcaaaattgtccattgatggtagctgacgcagttggcatagagacaagacgaccaacatagagataatattgcccaccagaggtggcaaaaatattagtggtagtgaagataatgataccaatcaaaagtgatgaagttgcacagccgtggaggcgaagaaaccagtcggcaacagtcaggtcagctagcagtgaagatgtaggcgcccaacaacaacgaaagaacagtcggtggtgacaaaagcaaaccgacgatgaagacgtagacgcgcatcaacggtgatggcgaaatccaccaatcatgaagatgaagaaaataatcggcggcgacaaacgcatccgacggtaatgatgattagcggcaacagagatagccgactatgatgacgaagtttcccatcaacggcagcagagtaggctatgttgatgaggcttgacaagatgttgatgaagatgacgatgtcggtgatccagtcaatagcgatgtagcagccgatgataacgatgagatcctctatcggcagttgcgtagtaggccaatcgtgaagacaaataattggaggagagttgatgttgttgcccaactcgtctaaaccgaaatatttgaagttgttgaagtagaatgtctattccgaagcaaagatgaagataatgactcctggagttgactcattggctgattaattgatttcttcagcttgacataaaatttgtcaaattttgagccttatatttgtgtagcccccgactctttggttagttgggaaacaactgaacatagagtcgagaattatagcttcttgtcgtcgagtagtcattgcttgattgaagatatgtgttgaaggtgtccaagtagaaatcctgaatattggagagtcacttgttgtagtaaaatatcatggcattgcatgccgagatgtcgaggttcacaaagacgtcgtggttggtgaagtagtaaaacttgcgaagtagcagcaatagagtttgccagtgccgaagataataaagatgaagtcgctccaccatgatgacaaagttgcatcgccgtgatgaagtgaacacgagtcggcggcaacagaagcaaactggtagcgaagacgcgcagttgtgaagataaaagcactagtcggcggcggcataaccagtcggcaacggaagacgatgatgtccatcagtagtggtagctgtataaaccaaatgtagaggcgagggcactagtcagcagcagacgagacgaccggcggtgaagaagataaggccaatcaacgctggcagaatcatgcagccatggaagtgaagaaaccagtcggcagccatggcaaacgtaggcagcttgtgttgaagatactgatgcctattagtagtgacagcgatgtagccagccgtgaagaaggtagcatcagttggcgttataatgggccagccgtgcaggcggtgacaccagtcagcggcggatgcggtgaccggtcggtgaagacgtagacgcccaccaacggcagcataataggccaaccgtgcaggcggaaacaccagtcggaggcggcgaaggcaagccggtcggtgaagacgtagacgcccaacaacggcggcataataggccagccgtgcaggcgaaaacaccagtcggcggcggacgaggcggccggtcggtgaagacgtagatgcccaacaacggcagcataataggccagccgtgcaggcggaaacaccagtcggcggcggacgaggcggccggtcggtgaagacgtagacgcccaacagcggcggcataaaggccagccgtgcaggcggaaacaccagtcggcggcggtcgaggcggccggtcggtgaagacgtagacgcccaacagcggcggcataataggccagccgtgcaggcgaggacaccagtcggcggcagcgaaggcaagccggtcggtgaagacgtagacgcccaacaacggcggcataaaggccagccgtgcaggcggaagcaccagtcggcggcggacgaggcggccggtcggtgaagacgtagacgcccaacaatggcggcataaaggccagccgtgcaggcggaaacaccagtcggcagcagcgaaggcaagccagtcggtgatgttctgactgatccattcctggagcgtaagagataagcctaaagccatgaatcccttttatgcatatctggatctggatcctgcagaacaaacatataggatgagtagtatctgatataaatataatactcgagaaaaaatcaagtattttaaaatatttataaatatgtatttctcctcttgtcaattttgatttccccgagcagatgactcattacgttcaaacgctctgcccaactagtcatagccaccaagcactgggagtcggcctaagcacttcccaaacatgcatatgagtgacatgagttcgtcattaatggaacaaagtttcacggatcggagtttactactcgggtacttttgcaattattaagagcagaaaataaatttatctcatctctatgcttttgatttattccgaataatacttagcaccttgcgttactcggtccatccaacgagcccccgggtgctaggaatcggcccaaaggcaaccatccattggcaaaccaaacggaaagcataggaagatagaactccataactcgataggtacttttgtactcagattatgtcgcaagcaatcaagataaatattataaaaaatatgatataacatctgtagcccccgactcactactcaatggaagaccaattggtgtagtgaggcagaggaaaaggaaaaatatcatataaagaataaaataaatgatgacttagctttgtaatattccccttggtgatggcagaagtggccaatgtgggaacaaagtcgtccatcaataacaatgaagacaccagtcggcggcgacgaaggcggtcgacgatgaaagcgaagacccccaacagcggcggcataataggccagccgtgtaggcggaggcaccagtcggcggcgacggaggcaggccggcggtgaagatgacgatgcccatcaacggtggtgtgaccaaccgaccgtataggcggggacaccagtcggcggcgacggaggcaggccggtggtgaaggcgtagacgcccaacagcggcggcataataggctagccgtgtaggcggaggcaccaatcggcggcgacgaaggcaggccggcggtgaagtcgtagacgcccaacagcggcggcacaataggccagccgtgtaggcggaggcaccacttggcggcgacggaggcgggccggcggtgaagtcgtagacgcccaacagcggcggcataataggccagctgtgtaggcggaggcaccactcggcggcgacggaggcaggccggcggtgtagatgacgatgcccatcaacggtggtgtgaccaaccgaccgtataggcggggacaccagtcggcggcgacggaggcaggccggcggtgtagatgacgatgcccatcaacggtggtgtgaccaaccgaccgtataggcggggacaccagtcggcggcgacggaggcaggccggcggtgtagatgacgatgcccatcaacggtggtgtgaccaaccgaccgtataggcgaggacaccagtcggcggcgacggaggcaggccggcggtgtagatgacgatgcccatcaacggtggtgtgaccaaccgaccgtataggcgaggacaccagtcggcggcgacggaggcaggccggtggtgaagtcgtagacgcccaacagcggcggcataataggccagccgtgcaggcggaaacaccagtcggcggcggcgaaggccagccggtcggtgaagacatggacgcccatgaacggtggtgtgaccgaccaaccgtataggcgatgacaccagtcggcggcgacggaggcaggccggcggtgaagtcgttgttgctatcagcaatggcggtggcgaggacaagccggcggagtggactcgcggccgatcgaccggaaagctgagacgcctcgagtccatgaccagcatcaatcgcctcaatagtgccgcgtagttatatgcgaacaacaacaaaaaatagcaagaaattaatctgagattaaaaatcaatatgataaataatgataaaaatcagattgagtttccccctgactgatttggatcaagtcagagaagaggagcttgaagaagtggtcgacggaaaggaagtgaaaactccccaaagcgaaaacgaagtcggcgactcatgaaattgattccatcgcgctcgttgataggaaactcgacgcaacccctacctggcgcgccaactgtcgaaacatgaattcggcaataataaaagggggtagcgcacgagacctaaaagtggatggatgcagagacaaatgatttagacaggttcaggccctctcaatgagaggtaataccctactcctgtttggggatttgaatccgccgagtatgtattgatctgacgatcaggttgtctcatgcccctagagggggctccctgccctccttatataggttggggggcagggttacaagatagaagccttaaccaatacggtatcggtttcctaaatctactttacaatattatcaaaccaggactttaggccgttccgtaatatacaaggaaacgtaacacccaagtcatgatctgttacatattacaaaaatataagttatcccctataactagtcggataaccatgccgtgtgggtatggggtacccataatctccacacctgggcggcgtcgagctttttctttagctccgcctcccagctcccgtgttggagacggagggtgtcctgcgcctcgatcatcacagtggtggcgatgagggcggcctcccgctcctcctccacctctcgggcgatctccgccagcgccgctttgcgggcttcaagctccgagacatgacggcggtgagccttacggcccacctccaccatgacatccaccgagcgccgcccctcctcgacgcgcgcccatgcggcctctcgctccgctcgctccgctcgcaaggcctccacctgggcgctgaacccatctagcaccgcggtgtttgcggcggccaaggcttgcagaaggggctcggcgctcagcggggcgacagaagacgaggagaaaagccgccttggagagaatgcgacgcggctcggcccgcctgaagacgcgctgagctcagggatgtcccccgaacccgtttggtcctgggcgtcgcccgagggagcgggcccaggcgatgcgcccgcggcctcgtcgcgagccgccccggaggctgtcgcctgagcgtcgcccgagggagtgggcccaagcgacgcgccagcagccttgtcgtgagctgcctcggaagacgccatcgcctcagcctggcgagcccgggcggcctcctccttagcggcttcttcggcttggcgagcccgggcggcctcctcccgagcggtatcctccgcctgacgaacccgagcggcctcccgggcggcctcttcagcttcccgtaggcgatctgcggcctctcgccggtcagattctcgcctttgttcctctgcggccgccggatcttcggcctcggactggccggacttgggatggcgggaggaacgcgtcgggatatcactgaagcgggagaaaaaaccagaagacagacaagatggataagagagaacttgcttttgggataaagggaagatggttgcaaaaggcgtgaaacgaacctgcgagggggtcggttaaacgaccacattggaggggaaatcaggtttccccgggatggttccgtctcccccgtcttgcggagccgcttcttcttgcgctccgtctcgggctgtgatgtcggcgcggccccctccgggcgcctgctgctggcacgcaccgccccgccccctcggggaggagatgggggaggtgttcctcccagtttcctcttcccccgggcgtcggcagggcggctgctccccgagcccccgtcgcggggcccagaagcacgaccccctcctggggtagattcttcccggcggctcccgcccacggcatcgtggcccttaggagcctcctcctctgaggccccgacccccatcataatggtcaggatggaggcgcggtctggatcgatgcaaagggggagaactccttgaggaatgagggatgcttccacggagttgagattcagcacccgttggaccaatatcttgaagtcctcaggagcccagtcccatttgactccctggtgggtcctcatgtagtcctcggacccggtgtactcccatgcgctccgggcgcgccgctgaagcggcgcaatccggcgacggaggtagtcgccgtacaccatggcccctgtgagcccctgggatcgcaggcccgccagacggtcgaggacggcgtcatagtcatcccccagatctaccggcgcccgccagctggagacctgcgccgggggctggcttggaagtcggaggcgcgcttcgttggcgaggggggtgtagaaccagtcgctcttccagtcgtcccacttcttgcggagggcgcaggggatgtagcagttcagcaccggcccccgcggctggaagtagcagccaccaaccaccgacggcggcgataccgactgcacggtgaagaaccaccggaacagccgaagagatgggcgcaccccaatgaacatctcgcacagatgcgcgaagatggccaacgtcatcaccgcattgggggtgaggtgcgccatctggagatcgtagaactccagaacatccataaagaaagaagaaaatggcggaaccagccccgccattgcaaaggggaggaagaagacggaccgcccagggtagtcaggtgccgggcgtccctcgcccagcatcactatctcccggccggtggcagactccggcatgaagcggcgcggcagccccgcctgcctctcgctcacgatgcgagaaggcggtagtacgctaccgtcgagcagagcagagccccgtgccatggcgccggaggaagggatgattgagaacgagcgcgtgtggcgaaggtgaggcgcagcagagagagagttagggcgcaagcggcgaaggcaaggggaataatggcgaaaggaagggagcaaatcttttccacggtgtctttatacccttgccatcgctgtgcccggctcctcgtttctcgcgcccactatctcgctccctcgtttctcgctatctcgctccctcgtttctcgtgcccacgcttccactaatcccattcgcccgcttgcggcgcatgaggtggatatgcggttgcggcagtcgagatagatcgtatcgtgcgcgcgttaatcacgctcgtcgatcgaagtgacgttgccatgtctccaggcggagcaaatcggctcgcccagattcgtgcgctgctcaagagatgtggcagtcttgaagagaccgcccattattgacagccaagttaccatgaccgatgtgcatggtttgagaccgttgggtttctgcccaaccatggagaccggtcccacctgtcaccaggctttaggagtggcgtcacgcccgaccgcttcccttgagaagggcgatcgccctggcataacgccgggggctactgtcggtgatatgggaccgggagtatcgtgaccagaggcttgaggcagacacaatcgcccacgtggcccggcaccctcggggacgtcgggcccgagggtgaggtgtccgccctcctcttgatttccccgaggggggtcgggttactcctgccccggccccgacggccgaggcaccccgacccctaatgaagtttgcgccacatatatgggttaggtgaacacggcagggctcacctaaccgcatttattgcggactggacaggcacgtcatgctgcatgcagcgcagtgcagcacgttcctttatccggtctgtgaccagtcacagaccggtcagatcaacggttaggtggcgactggcggtctgacgcacgcctcgccccgtcccgtcaagacgagagcctctaggcacacgtctccagccggagctagcgtgttacttcttagagatggcacgttagccctggtcagatgaataccaggcttcatcccaaccattacaggcaagatgttacacgaagaagggcgaaatacatgttgcaaagctgacgcgtggtggacaagaatgaccgatttgtgaccggtctgacactgttcatatcgtcagcagacagcctcgttctcacaacgagcctgcctccggcagaagtggtggtaggtatgtgccgtcccgtcagaaggacgttcggagggcaaccatgcaaatctccgcttcatttatgaagagaagaaaagtccagtttggaaagggaggggtgcatgtggtatccccttgagatataaaaggaggaccttgcccatttagagtggggggggctggagattgacgaacaaagaagaagggagagtttggctcacactttgtaactccttcattcatagatccaccaaaacacaggagtagggtattacgcttcccagcggcccgaacctgtatacgtcgcctgtgtctcttgctctttggataggccgcgatctttccacatacagagagagcctgagatctcaccctgagcccccggccgaaccggcaaaggggggcctgcgcggtctcccggtgaggggccacgagctccgtcaatctttttttcgaatggaggagtatctttcaaagtgtgtcatgtcatcatgatctccttctgcttaggtacgttagcattttttttaaaagaaatccaatgcaaaatattagttaaaggggtctaaaataaatatttggtaactagagggactaaatcgaaattcactcgaaaaataaacccctccctctcccctagaggtggccaaatgggccgggccaaacgggcggcccggggcacggccgaacctgtagcaggcacggcccggcacggcctgctacagtaacgggccgtgccggcacggcacgagtagccgtgccgtgcttgggccgctggccgagcccgcgggccggcacggcacggcacggctactgtagcgggccggcacggcacggcccgcggcacggcacggcacggcacgccggcggcccgtcaggcgcggacaaggcgggcggcggtcgaatgggaaggcgccacgtggcactaacggctatttgaccgttcaaatttgaaaataaccgttgggaggctaaaaaattcataaaaatttcgaaaaaattccaaaaaatctcaaatttcgccctataaatagggcatgaaccctagccatttctcctcatcccacactcctcatcttgtgctctcaagtgttttaagtgctctctttgttctcaagtgtgcattttttttgattttgacaaaatttgctcaaattttgtcaaaaatcaaaattagtttcgtagttcaacagtttgatcgcagaggtttgaagagctcgcggttggaaagatgtaagtaatattcaaatttgtgtattatttgtattgtgtttgtgaattcaataaatattcgaaaatttgtttatgtcggtttaaattttcagaatggatccgaactttccataccagtcgccgtcgttcaccttgggtgatttcgaccccaactacatgtcggggtttgacggtacctccggatcggctccaactccaccatctgtggaggaggtaccggttcatacggctgtcgttgaggaggtaccggttgaggcggcgacagcttcggaaggattttccggaaccgcgagcggaagtgtttcgacacacaccggctcgaagagatcgagaacctccgttgtgtggcaaaacttcgacgagataaaggaaacatgccccgacggaagggaggtatcgaaagcccgttgtagaatatgtaggcaaattttatctgctcgttcttctggtggtacaggtcacctcaagcgccatgcggagtcgtgtgccaagaagcaaggaatacaactccggcagcagcaacttatggtaaacccagacggtacggtacgcagttgggagtacgatcccatggttgctcgggaatctcttgtccggttaatcgccaggcaagatttacccctgaactttggggagtcccctgcttttgaacattacattcagcaatctcataaccctaggtttaaagctgtgagtaggcaaacatcaactagagatttagagaatgtttatcacaaggaagcaactgcacttaaggaactgtttagtacatgtactttctctgttagtgttacttcagatatatggagtagtagagctagagaggattatcttagcgtagttgttcattttgttgatgatgattggcaattacaaaagagagttttagggcttaggttaatagatgtctcacatacaggagaaaacatagctgaaagaattagggaagtaattaatgaatttaatcttgctgataaaatatttgctgtcaccctagataatgcatctgctaattctagggctattgaaatattgcaacctttatttagtgtgtatgctcaatcttttctactccatcagcgttgtgcatgtcatataattaatttgattgttaagactggcatgaagagggtaggtgaccacatcgatgctgttcgtcaagcaatcgcgtggttaactgcttctaacccgcggattgctgcatggaagaggttttgcaatgcggccggtgtgaaagctcgtaagtttgccaccgatgcagagcatcggtggaatgcaacgtatttaatgttaaaagttgttttaccttatagtagtttcctttctgattttgttcagtcacgtggtggcccaagaaacagtgacgggtcttcagtactgaacgagcatgtttgggcaattgtccaaaaatttcaccaatttctagaaactttttatgattgtactctaactttgtcacaagtttattatccaactgctaatataattttgcacaaccttcttgaaattgctactttatttaaagaatacgaaaatgatgacattctaactgaacctgtctttcacatgaaacaaaaatatttgaaatattggaaaaatatacctatgttgtatgctcttgcttttgttttagatcctaggtgtaaattaaggggattgtctgctattttatcacttgttggagatactataggtgtagattatagttctttttatactgaggttagacgtaaattatatgaggtttttggaagatatgaagtaaagtttcaggaagttcgccagcagagaccccctcctatccccactacaggtaagaagaagatacagtggggtaggatttggggtggatcgtcttcaagttcaatccaaggtggtggcagttcgtcggctacaagtgtagacgcctcttcgcatgttgtggccgaagagttgtccggttatttggacagcgacgccatccaccacgaagcacaagatttcaatgtcctcgggtggtggaatgaccacaagataacatatcctgtgctttcaaaactagcacgggatgtgttgacggtgcccgtgtcgacggtgtcctccgaatcggccttcagtctatgcggccgaatcatcgaagaccggaggacgactctgcgcagcgaccacgtcgaaatgctactaagcgttaaagactgggagcttgctcgacaacatgcccaatacactgcggacaaccaagaattggccgcccagttcgagcaactctacctggatccagaccaaccccagtagaattttgttagaagtagttctgacctttgagctgtactcttttctttgtcatggttttctcattttcccctatgagtttttacatgacaaagtttttaacgaggcagcatgtatcattgtatcctgtaatgatataaacatcaataaaggtcattactatttttaacaaattcttttacaatattttcgcaagtgtggatttatctttaaattatttcaaaataatgaatcacaatctatatttttaaatttttcaacacaacaaaaaaataccattttttcttttttttaacattagcaaatcattacttttttaaaaaacttttatttccattttttaaataccattttttcattttttaacattagtaaatcattacttttttttaaacattttatttccatttttaatttttttttcttatacatttactttgcttttttttttaaaaaaaaacactgtgcactgcaggctggtggcctgccttcacgggccgccgtgccccgaacggcccgtgggccgcgggcgtgccgtgccggcacgggcacggcccggccatccacgggccgtgcttgggccggcggctcggcacgtgggccggcacggcacggcccgtttcatcagccgtgcctaacgggccgtgcctaaacgggccgtgccggacccgtgcccgtgccgggccgggccgtgccgcccgtttggacacctatactctccccccatcgtacgcaacgaaacccgattgccgcgccgctccccgtggagcccaagtggcggcgagggtttccgccgcctctcgtccgcctcgccgacctcggaccccggcctccatcctcctcgccgacgagagcccaagtgtgccgctccccgtggagcccaagtggcggcgagggtttccgccgcctctgctccgctcgccggcgacagccccacgttctcgaccgccgtccccaggtccgcttccggaatctcatcctttgcgggctgatactgcttcgcgcgtcaagccatcaccagctgctccctccgtctccggaacaacaatattctctccgactgctcacgacgggagagcggcgcttcggcgacggcgatcccggtacgcacacgcttgagaggctcccactttcttcattctgctactgtacggttggattcgtgcataacaatcactcaaatctctatgtctaacctgcccatgattatttattaagttcgagttggttgaagaatccactttgttttgggggaacttttacatgatagagaaatgaatggtcttccgttgtgaaacaccatgcttgattttacaggatggtgctgtgttgtctcgtttctaggtttatagactgtcatttgctatagaacctcatggtttatagttaaactgcacattagatctgtcaagagcagcagacaacagtagtagacgttttatttattaaatgatgaactgttggtctcaactctcaagcagtattttgattatctttaattctaagtgccaatagcagcaatagtaatggacgtttctaaatgtaattataaggtttgtgtgcatatttactttgatacaaggatgcataccgtgcatgcatctcaattatctatgccactaatctaatatatattttggagatgaaggaacagcagatggagaaggcaaacaacacaatgtttttcaaccaagcaactatctactctactccaagtatctaagggtaatgatactaatcatatggatcccttaccctcaatttgatatagcgctattgttcatgtgatatgtattgtctagtgaggcatgctgaaatttggctttaggatcaggttggtgagttattgttattttgggagtatataggctcaagagcatctgacacaaaagaactcctactctctaataaaattattgtgtgctatttatggggctgcctaggtgatgaggaaagaatgagttcacaaacgtgttaaactgttaatccagtatccctgaaaagtaggttggtttaatttaagttcaaatgccttgtggatttcaattggtttttatggctgatcttttgcggactgggatggaagtttggtttaatcattttgtactaggttagcttgtccatttctcttatgctctcgttggcatgttgtgttcttgctggatacttattcatctcagtaccttcatgaaagtggggtcaatgtcatccataactaggtcagtaaggactatgcgcaagaactgagtcgagtctatgtaaaagtagttgtccttttgatatggtagaggaattggtaggactgcttaaaaatagttgtccacgtattcgtttttaggtaaatggtgttataggactgcctaaaataaattggttattatgaactttgattgatcttatcagttcttgccctcttgctatgcactaagtagtcacctcttagcatttatcatttcatttacatgtttactctatagttcagtagttcttttgacatgattggtgtcttcgattttcttccatagaaatgtaagttcgaaaatattgaacatgtttgatgctttaattgtcgttggggcagtcactttaggctgaagaatcattgtagcgaatggattatcaacaatcagatggaatttatgacatgccagatgaaccattgtttacactaaatttgaggttgagccacagcaatgacctggatagagttcataaatctttcaccagcaagattgataaggcccgaacgtatctcacgggtaggttcagaaggattgtcaaggtcaaaggttctaagagaaaggagttcgttcttacccctgaaggccctgatgtttttaccattgctttcactgatggtactaacagagtaactgccataattgaagagagaaatatgtggttgagaggtttccaaactgcagacggacacatttttgagtttaatgatgaacacggcaatgaagggaaggatgctaatctggatgacaagactgatgaaatgaataatcagttcaatggtaatgacaaaacaagagatgaggaggtgaaggatgaggaagaggctataaaggaccaaaaactgaaggttataaaggacccaaagatgaaggctataaaggaccgagggatgaacaagcactgcaaacaaaaagaaaagagcaaagcagcatgtggatccaaaaagaagcaagtgaataggaaagaccaactcaatccaaaaaagtatattagaggatctgttctcttacggcatgatagcaattatggttctcttcttggacctaacagactgcctctgtttcaagtagtatacagtacaatgagggatatgctgcagaatttggctcactttgatccaaacaactattcagataaacacaagcgctcgatggctgcactgatcatccatacagctgagactttgaagaataaatatatatcaagtcttgtgttaaattctttcaatccacatattggtgcaaggcttcaagcactggatgatatgggagcagcacatattaacgggtggtctacagcctctgaattaattttgaaatccattcacctcccatcaaaggtttgggactttcaacagcaagaattttccaagtgcaatgaattttacaaaaatcag

SEQ ID NO: 8248 - DNA, 9372 bp, Oryza sativa
cgtcgccgccgaatggtgtcgtcgcctatacggttggttggtcacaccaccgttcatgggcgtccatgcctccgcctacacggctggcctattatgccgccgctgttgggcgtctacgacttcaccatcggcctgcctccgtcgccgccgactggtgtccccgcctatacggtcggttggtcacaccaccgttgatgggcatcgtcatcttcaccgccggcctgcctccgtcgccgccgactagtgcctccgcctacacggctggcctattatgccgccgctgttgggcgtctacgacttcaccaccggcctgcctccgtcgccgccgactggtgtccccgcctatacggtcggttggtcacaccaccgttgatgggcatcgtcatcttcaccgccggcctgcctccgtcgccgccgactggtgcctccgcctacacggctggcctattatgccgccgctgttgggcgtcttcgctttcaccgtcgaccgccttcgtcgccgccgactggtgtcttcattgttattgatggacgactttgttcccacattggccacttctgccatcaccaaggggaatattacaaagctaagtcatcatttattttattctttatatgatatttttcctttccctctgcctcactacaccaattggtcttccattgagtagtgagtcgggggctacagatgttatatcatatttttcataatatttatcttgattgcttgcgacataatctgagtacaaaagtacctatcgagttatggagttctatcttcctatgctttccgtttggtttgccaatggatcgttgcctttgggccgattcctagcacccgggggctcgttggatggaccgagtaacgcaaggtgctaagtattattcggaataaatctaaagcatagagatgagataaatttattttctgctcttaataattgcaaaagtacccgagtagtaaattctgatccgtgaaactttgttccattaatgacgaactcatgtcactcatatgcatgtttgggaagtgcctaggccgactcccggtgcttgatggttatgactagtcggacagagtgtttaaacgtacagagtcatctgctcggggaaatcaaaattgacaagaggagaaatacatatttataaatattttaaactgcttgaatttttctcgagtattatatttacatcagaaactactcatcctatatgtttgttctgcaggatccaaatccagatatgcataaaagggattcatggctttaagcttatctcttatgctccaggaatggatcagtcagaacatcaccaccggctcgccgtcgtcgccgccgactggtgtcttcgcctatacggttggttggtcacaacaccgttgtcaggcgtctacattttcaccgccggtttgctttcgccgccgccgactggtgtcaccgcctacacggctggcctattatgccgctgttgttgggcgtctacctcttcaccgaccggcttgccttcgccgccgccgactggtatctccgtctgcatggctggcctattatgccgtcgttgttgggcgtctacgactccaccaccggcctgcctccatcgccgccgactggtgtttccgcctgcacgctggcctattatgccaccgttgttgggcgtctacgtcttcaccgaccggccgcctcgtccgtcgccgactggagtttccgcatgcacggctggcttattatgccgccgttgttgggcatctacatcttaatcgccggtcgtctcgtctgttgctgactagtgcccttacctctacgtctggtttatacagctaccactactgatggacatcatcatcttccgtcgccgactgattatgccgccgccgactggtgcttttatcttcacaactgcgcgtcttcactaccggtttgcttctgttgccgccgacttgtgttcacttcattacggcaatacaactttgtcatcatggtggggcgacttcatctttattatcttcggcaccgggaaactctattgttgctacttcgcaagttttactacttcaccaaccacgacgtctttgtgaacctcgacatctcggcatgcaatgccatgttattttactacaacaagtggctctccaatattcaggatttctacttggacatcttcaacacatatcttcaatcaagcaatgactactcgacgacaagaagctataattctcgactctatgttcagttgtttcccaactaaccaaagagtcgggggctacacaaatataaggctcaaaatttgacaaattttatgtcaagctgaagaaatcaattcatcaaccaacgagtcaactccaggagtcattatcttcatctttgattcggagcagacattctacttcaacaacttcaaatatttcggtttagacgagttgggcaacaacatcaactctcctccaattatttgtcttcacggttggcctactacgcaactgccgatagaggatctcatcgttatcatcggctgctacatcgctattgactggatcaccgacatcgtcatcttcatcaacatcttgtcaagcctcatcaacatagcctactctgctgccgttgatgagaaacttcgtcatcatagtcggctatctctgttgccgctaatcatcattaccgtcggatgcgtttgtcgccgccgattattttcttcatcttcatgattggtggatttcgccatcaccgttgatgcgcgtctacgtcttcatcgtcggtttgcttttgtcaccaccgactgttctttcgttgttgttggacgcctacatcttcactgctagctgacctgactgttgccgactggtttcttcgcctccatggttatgcaacttcattacatttgattggtggcatctttactaccactgacatcttccgttacttctgatgagcaatttcgtcttcatgttggtcatttcatctccatgccgactgcgtcagctattgccaatagacaattttgactatgacagaaggacaagctatatgctcaggggctcatcaactcaagcgtgaggattatatctccaatttggacttgttccggatacattccacatggattcatagtcatgagtctattttctatgctcaaagactggaccaattattattccccgtaagggctatcaaccgaatacttgcgccagtcgggattcaattgttacacctattttggagtatcccataagggataatcattcagatcagaagctattcatatgagctacacttggtctatattacccggaagatttattactcggaagcatgttacatgcgtcatcctttaaagggtgtcgaaggcatattttttggcctaggcctaatatgtctgcagcccatattttcaggtgtggcctgtcacgttcttttagggacttaggcacttttcgcttaggccaaagtgcgcgtgatcaagtgcccaataccttaaaatccttttataccgcagttattcgactttttaggagttggtacaatgcatcttaaaaggtgtcaaacagtaaagctttatatagctggcccgctgacttttttatatagtcatggtgctgtttgggtttttaagcaattgattggatacaatatcattgctttttgccacgtaagtgtgcatttttattgaccaatattatggcttaggctgattatatattgtggtcatttttcaggcggttggtaaatcctttatgagtttatttactcggattttataccacatatgccatatatttccaggtgtggtggaaccatgtgtcttctagggacttaagcacatctgttaaagcagtgtgcgcatggcgtatgctcaatactttggaaatttctttattcacaacatacaagcttctttatagctgttttgctatgtgaattttcaatgatgtagccaactttaggttacactcatcatattttacaaagcagtcggtatatcacttggatcatattattcagggattcacaccgcatatgctacatattaatattaagtcgcttggttgactacaattatcgaaaccactcggtgcatctagtcgatgcacctgactttattttttcagccctccacagtcttctgttttggaaaaagcactcgggagatcatggcgaagatgattgaagcactcggctttggagtaatctagttcgaaagaagattatctttccgactgtaaaggtctcaggggctactgtggagattatgggtaccccatacccacacggcatggttatccgactagttataggggataacttatatatataaaatatgtaacagatcatgacttgggtattacgtttccctgtatattatgaaacggcctaaagtcctggtttgataagattgtaaagtagatttaggaaaccgataccgtattggttaaggtttctatcttgtaatcctgccccccgtcctatataaggagggcagggagcccctctaggggcatgagacaactagatcgtcagatcaatacacacccggcggattcaaatccccaaacaggagtagggtattacctctcattgagagggcctgaacctgtctaaatcctttgtctccacatccatccacttttaggtctcgtgcgctaccccattttattattgccgaattcatgtttcgacagaggaggaggcggcggcgtcttctcgggctttcgtggggtggaggcggcgtggctactggcgaggagaggacgagagcagcggacgacgcgtttttttgatttttttttttactagcaaaagtgcccgtgcgttgcaccgggtgatcacggagtgtgtacagtgacaaaaagtgttgtttggtttagacaactaatctgctaaaaaaattatttaccacgaacgtctcaagcacccatgtcaaatcaaagatttaaatcaagattgactggttccaccacaagaaacttatccggttaaactatacccactttgcaattgtgggaatatacatgtgtattgttacctgagaaaaatatgtggacttcaacaaatcgtaaaaatcaatcttattaattttgtgagagtgagtattgttttttatttacaaattgtatttgaggtcaaatattaataagtagacattaaaaaaaatgaaagaagattagacggtgaggggaaaaaataaaaaaataaaaaaaaagagcgaacaaggacaggtcaagaaaattttattatttaaacatttttaataaatagatgctcgtgttacgtgtgttgcaacgggtaaactaaaattataataaatataaaaatattagatcgttaggatttagtttttatgttatgagccctttaaaaaaatatattccttacataaaaaaaagttgtaaaagaaaggcccattagacttaaaaccaaacaaaaattaaaaccaaccctataaatctctatatgtgccggttatatggtatacttgtgctgtttttttattcaaatacagagtgctcatttttttttaaaaaaaaggcccgtcagatctaatccttatccccgagagagcaagcggagagcgagcggagcaagcggcgcctcgatccttccgtctcctcatcttctcgtttttcccgacttcccttatcctctctctcctcccttcattttcctctttctcggggttctctctactgccatcgcaaccagcgacgccctcccctctcccctcaccagtgcgccgcttcccctcccccttcgcacggcgccctccacccggctgacggcgccctcttcctttcggtcttctctctcgctctcctctttctcggagccgaggcggcaggcggcggcgcaagaggggaggcagcgggcgacgggtggcggcggcaggtggagacggtgaggcccagcagcagcgggaggcggtatcggaggtgatggccgcgtccgcccctctgcggcagcggcgggaggagcggtggccgcccagaggcgccctcccaccgctagatccggcgggaggaagggctccggagctgcgccgcctcgccatcctccccgccgccacctaatgcgtcggtcgatccagcggtggcggctccctccgccccctctcgccttcctccggcggcggtggcagcgtcggcggcagccgcgggcggatccggcggcggcgggcggatccaacggcggaggctccctcctccgccgcctctcttctccctccggcggcggtggcggcggctgcgacggccgcggattgatagcgtggcgacggctgagggcagcagtggcgacggccgaggtcggatcggcccctccgctgcagcggcgggaggagcggtggccgcctagaggcgccctcccaccgtaactaattaacaatgtttgttcaattatttagttattaagtaaagtggcaaaaacaccactaaatatgtcgtaaaaaagtattttaaccatgtctagtatgtttgtctatttacgcaaatatttatagaaaagatgaatgatcaaatgaattcaaaaaatcaacttcgaagatgaacgtacagcgtgcatggcaccctcacacgcaagtgggctatgcctgtcatgatgcaaggttaggctggtgaatgcaaaattggtcattctctacaatggtgtggttgaaatcttttgttgaacccggcacatggtcaaacgatagaacttgtacatactccctccgtctcttaatattagaggttttgaccactcgtgttattaaaaaaattatgcaattatagaaaacaaaaagttgtgtttaaaatactttggataataaaacaagtcacaaataaaataaataataattctaattttttttaataaaacgaatggtcaaatagtgcaagcaaaaaaataaaaaaaaatatattaagggatggatggagtaattcagagtacaattggctttttgtttgattaggctgtgtttagatccaaagtttggatccaaacttcagtccttttccatcacatcaatctgtcatacacacaacttttcaatcacatcatcttcaattttaaccaaaatctaaactttgaatccaacttggagcacgagagcaacatatcacttggcagggctacagaatcctgacgcacatcaactcactctcatatgaccatgcaaacaagtacccatatcattagtctgacaaatcccacaatataaggtacaacaaccacatcatcattcatcgtcgcttgatgtgttcacgtcttaagcgtatgttcggcgtgattaaaaagaaatgcattgatcaccacctactcttccgccatccgttgtgaactcgtgattctggtgcaagcaagattcctccacgttgcagacgtggggtggggcttgatattcctggcactgatctacagagtgattaaacaaacctcacagccaggacaacaggaataaggatatactactagcaactgccgtatagcaagatcaggaagatccagcaaccaaacggagacaactaaccggctaaccgcagtataccagaagtagctcgatcggtaagagccagatccagaacacacacactgtttttatctcttggtgcaacacagcctgtgtttgtttttcttgttgcaacccagcctgtgtttttcctgttgcaactgatcccaattctcaaggaaattaaacagatcatctgcatggctatcctctaactttgaataactacttcctcccttaaatataagggattttggatagattagacgctttatagaaccataaatctaaacagagtctatctaaatatattatattttaagacagagggtgtaacatgtggagtattccttctatccatgagtaacttgagcttttcacttaccagcagcttttcatttatttacccccaccagttctataaaaaaactaaaaagtactactagtattactccatctttggcagcagtcgctgtgtttagttcgtgtgcaaaaaatttttttattactgacacacgtttaaagtactaaacgtataataatattaaataaattacagattctgcctgtaaactgcgagacgaatctattaagcctaattgatccattgttagcaaatgtttattgtagcatcacattatcaaatcatggcgtaattaggctcaaaagatttgttttgcaatttgcgtgcaaactgtgcaactagtttttgtttcacatttagtgctcttcatatgtgtccaaacatttgatgtgacgaaaaagttagaagtttgacggagaaattttgaatctaaacaccgccagtgttactttgcaaggcggaaagacgcaaccaggcgcacacggttccaccgcaaaactgccccccaaaccgaagcgcacgctacctcggcatccaccaccacggtgtttgcttgcttgccccccgtgaccgttttgagccgtccgtgcaggcgtgcattcaccagcgcgcgcgcgcgcgcggcgctaggacacgccgtgtcgcggcgcggcacggcacggcaagtaccttaactgaaacccaccgcgcgcgcgcgcgggcataggcgacgccgcgacggtgcggtgagccgttgagcagtgagctactagtggacggcaaaggcgccgcccttctagtaggtttcagtgtaccaagggattaataacaaaatcacgctctgattattttatcgtctagaattaactgtaactgcgtccagatcctgacgcgtatcactccagataaaccaaaagattacaaaaacatatctgctctttttatttttatcgtctaagtttaatagaaaaaactgcatcctgatgctgaatgtctgatgcgtatcacaacagataattaagcaaagattaaaaaacaaaaaaaaactctatctagaatcctatatgtcgggactcgctctacagaccgggacagggaaggtagaatcagctttcgttgacccgctcggcgttagcactcgagagtccccgtccatcctattaatcctcgggcgtagcaccacctcacctagtctccaagctccatcgaagacgacgactcactgctagctggtagctgctgccggtggtgccgatcgactgccggacggcgggcagagacgccatgggagaggagaagagccagcagcggcggcggcagggccaccctctcctgaggggaggcggcgcggggaagcaggccgggcggcgttacacccacggcttctccgcctcccagatggtcgggctcgccgccctgtgcggcgcgctggcgccctcgctcccgccggacacccgcgacgacgactacgacgacgccggaggcggacgctatggcggcgccggtgcgtccgacgccaaggccgtcagggacttccttctcgcctccgccgc

SEQ ID NO: 8249 - DNA, 6375 bp, Oryza sativa
tctccatggcgttcctaagaaaatgtatctgataggggaagccaattcacctctcacttttggaagaagctccaagaagagctgggtacccgattaaatttcagcaccgcgtatcacccgcagacagatggacagaccgagcgtctaaatcagatcctagaagatatgcttcgcgcatgtgtcctagatttcgggaagacctgggataagagtctcacctatgccgagttctcctacaataacagctatcaagccagcatacaaatggcaccctatgaagcgttgtatggacgcaaatgccggacaccgctattgtgggaccaagttggggaaagccaagtgttcgggactgatatcctgagagaagctgaagctaaagtcagaaccattcgggataatctaaaggtggcccagtctcggcagaagagttatgcagacaaccgacgccgtgacctggaattcgcagtggatgactttgtgtatcttcgggtcacgccattgcgaggtgtacacaggtttcagacgaaagggaagctcgcacctcggttcgtgggtcctttccgcatcattgctcgacgcggagaagttgcttaccagttggagctgcccgcctccttgggcaacgtgcatgatgtgttccatgtgtcgcaactcaagaaatgtcttcgagtgccatccgagcaggccgactcagagtaaattgaagttcgccaagacttgacctacgtggagaggccagtgaaaatcctggacaccatggagcgcaggaccaggaaccgggtaatccgtttttgcaaggtccaatggagcaaccacgccgaggaagaagctacctgggagcgtgaagacgagctgaaggcagcccatccggatctcttcgccagttcttccgaatctcggggtcgagattccgtttaaggggggtaggtttgtcgcgtcccaaaacgactctaaaatacatcctcgaatttatgcctagaataattaaaatccatgtgaaagcctccacaattaaaatgtgcaaagttaaaagtcaaataaggcttggaggatttttgtatatttcctaatagcctaaaatgcgtaaataaattttagtggaattttcagagcacaaataataattattaagaaataaacaaagttaaaatgattttataaaaggaaaaaccctaaaaagttccctttccctccccctctccctcttcggccggtccggcccagctctctatccctccctctcctctccccgcggcccattcggcctcctccccgcgcgcgcgccgctgacgggcgggcccgcccgccactctcgctgacgggtggggcccacccgtcatccccttcctcccgccgctcccgccgccgccgcgaatcccgccgcccccgtctgccccgcgtgcaatcaagaggggggaaatattccccgtgattccctccctctttccccccatttttccctccctctctccctcggattcgtttggaaatctctcccctaacctcgccggcgccatcaatggcggccggatcttccgcgcccgtttcctcctcgtccggccgctctctctcactcccgaccctatataaacactccccgtgcctccctccaccgtttccgccactcgccgccctctctccccgtcggaatcgagctcgcgccatcgctctctctctctgccgtcaccgccgagctccggtccgccgccgtcgtcgccccggaccacctcccgcctcggcgtcgccaccttcggcttcaccgcatccccggcgacctcgtccacccctccgtttcattcgccgaccgccggaacgccgtcgaccccgtccacccgagccgcgccgccgtcttcctccgctccggtcgccgtttccgtcgtcgccgtcgacccggggtgagccgtggaccgccgcttcttttccccctccccttcccctctctcggccgccgctccgccgtgcctatggccgccgccggcgaccataggggcgcgggcgcgccgcctcccgccgctgcgccggcgtggccgccttcgggcgcaccgtgcggctgccgcgtggggcccggctgtcagccgcccgcgccctcgggtgcggctgacgcgtggggcccacggcgccgcccggtgcgagcccgggtgcgcccggtccaccgtggaccgtgaggctgccgcgtgggccccactcccgtggacccggtccgcgcgcccctcccctcggctgacgcaataaatccatttttaaattaaattttaaatgaagaaattcgcaaatattcatttaaagagcatataaacttcaaatggccataacttggccatttgaactcggaattggaccgttcaagtctctaatttttccttaagaagtcaagaacctatttttgtgctttgttcctgcttgttatatggagtttattagagtgaaagccttttcttttccgttggtcgtgtagacgctgcagcttcggaagatccgctcttcgtggaagttgaagccggcgtttgggaaagcgagcaaggcaagtcacatcatccttgaacatattgaatcccagtttataaaaatatgttgatttaaattattgcattatcgctttatttaaattcccgcgtaatcactgttttatttagccatgcctatttacctttgttatgaccttattattgttattgttattatttccttgttcaccctagaataaacaaaaccccaactagtggacactctactcatggtaccactagtatgattttaggtagatgcttcgctatttaattaggtaacattaggcggttttacaactctagactttgggatattcatatcacctggacactttggaattgttggagtattgtggaattggattcacacctccccctctattcaaaatccccaaaatggttttaggctgggctcggggtgcatggttttgatagtagcacctcggccatataaggaccggtcttcgggcctctgttgcaaagcactaccgtacttccacatgtctagtgggtaaggcttagtttgtggctcagtctggttataaacaaaagtagacggatggagatggacgaagtcgggggtcgatggacatctctagggcaaatgaaggctacacgagctgcggcccggtagtcgagatgtcatggcacagggccggtgtcctgctgctaggggctcagtcctgcctacctgtcccggagattctggccgtaggtgggattgggtcggtactcttgtctatggctaggatgggttggaaactatgtcacgtcttccgtctgtataccgtggtggtatgtggcacgtggttgcacgtgaggaagatgtgtcttgtgggtaaagatgtacacctctgatcagagtataacctattcgaatagccgcaccctcggttatgggcaagccgagcaatgtacccaagttagtgttttaattcttaaaacctgcttaacaactaaaatgtggaatggttggcctgggttggcttgggacgagctgggacccagggtcgggttgccagttcggtctgaatcatcgtaggccttgggttaaggcaggttcgtgtgggttcacggccttgataaataataatgtatagttctagaatcgtgtctacaaaatagctttgagcaactaaatatctttaaatgccgtttactgcaaccctaaccctttatattctaattcccttgtactcccttgcatttattctgcacttgtgggtgtgtcttgttgagtacggtggttgtactcagtcttgctcaatttttcccaaacccagaagaggagcctctggaagatgaaggctttagtgtctagctcgtgcctaccgtcaagcgcctgtggtcgtcgccctagtcttccgctgtttcccgtttgtctttgtgtgtgctgggccttcgtcgcccatgtaataaattaactatttacgcttccgcttgatatactctgaaatgtatcaactcttggtgtaccttgcctcctgggacaaggaataatacacgcacgtaaggaacgcccgttgggttaattccggtcgtgacagtgcttgcctcctgtctgaacgcagagtgcacgatttccgaggcgcaactgggtggttacaagggaacatggtataacaattaacgaaggaaggatcaaatgcaacaaattaggtaggctgccattctgccttgcagacgggacaagcagattaagtgcgatcctatcaatgcataatatttttcaagcaacataattaagttcaaatataggctcgagatgttcaaaggtggcttgccttgctcgagatcttgagcttgatcctcgaaatcctcgcactgcgggtcttcgggctccgaaactatacgcaaaacaggacaactcaataaacggcgaaaataaagctctattaattacctctaagcgtgccattagatagatctcgagattaggaattttggaagttgaacggagtcaaacggacctacggttgggaagatattgaatttctaagattattggatttttggtctaaaggaaaaggatttatttaaatcctttttgaaaaagaaaagaaaagaaaagaaggagggggaaaaattagacttccctcgggcggctagggcgcggcccgagagaaaagggacggctctgccgagctaaatgggccggccggcccaacaaggcgacccagagcgcgcgcgcgggcggggaggagagagggagccggtggaccgggctcacctcgcgtggtcccgagtgggacccgcttgtcggtgacacggttcaccgtgcggaacgcgcacccggcgcgcgctagggtttgggggagggacgcggtgcacgcgcgcagttcgcgggggacacggatgcggcgggcccacgcgcagcctcaccgctcgcggtggaccgcgcccgcgagcggggccgaggggagcggctgaccggggtcggctcgacccggtcttggccgagctggggccgacgtggcgcctacgtggctgccacgcgggccggcgggaggtagacgacgacgccggccggaacggacggcggacaacagcggcgagcggcggagcgaaccacggcgatacaggagaaagcgagcacaccgggtggttgcacgggacgaggggagtcgagccaacggctcggattcgccggagggagctcgacggcggcggattgcggcggcggcaaccggcggagggaaaaggggaaaacggcgacgaggtcacggggggccgattcccggcggcgagagcatctacgcggctacgggaatccgtcccttgcgccggattaggaggaaacgcatcgagtgaggccggcgacgagaggcgcttccgagctcgggcggcgacggcggcgagcacacggcgagcggcggcaacggtcggggcggcgccggctagctacggggaggctactcgtgctactacccgagtctaaggggaggagatggaacgaggaggaagaacggagggaggcactaccgtgcgggcgggcgcagttacgagagccgacggcgcgaaacgtgatcgtttcggcctcgggctgaggaagaggagggggagggcgcgcccggagtccccttccgcgtccttgctcgtgccggctcctccgacacgtgcaacgacgaacggcgacggcgaacagagcacgggaggcggcgacaatggcgtggcggcgagagacgaaaaagagggagattggaggaggaatgagcttgggtttataggggcgacaatgtcggtttgggagaggggaaccgacattggacggtcaagccggcgagctggcgcccggctagcggccaaaacgacgacaggaggtgacgccggcgagaggaggaaaagaagaaaggaagagggaaagggggcttgcctccttgccgctttgggaaaaggaggagggagcgggggtgacgcggcagaaggaggaggagctctgcctcatttccttggaagctagcgcggggagaggcggggccgagtcgatgacaacagcgatgacggcggggcggtttggagcggagcggcgacacgggcggcaggcgcggacaggcgcggctgaggctgacggcggcggcgaccaggcggtcggccaccatggcacgcgcgcgcgggaagcaatgggtggcgcggcggtttgagcggcgcggctcgggcacgcgtgctggctcgcggggccgagcggctgcgcggctgcaagcgcggcagggcggcggggccgggcggcgcagacggcgcaggcgcggcacgggcggcgaccacgcgggcgcgcgcacgcgaacaacggcgcgcggggagcggcagcgagggagcggagagggagggctcggctcggcgcggctcacgcgcacgcgcgcgcggcgcgcgg

SEQ ID NO: 8250 - DNA, 14082 bp, Oryza sativa
caatcaatcaatccagccctgccctcctttcggtttcgggatcccctttccccgctttccctgatgcgagaccgaattcctcctccccatccggatccggctggtcaccgttgtgcgtgcgtctagtcggagatcagcacggcgaaaaaaaaaacccgtgtgatttttaatcgagaatttcgacgacgccatgcgtgcaccgtgcagcgtgctgcgccgccgcctgtgccgtgcggaaacggccgtgcaagctcctgcaggccaaacaggccgcggcccgtcacaggcgacaagtcaggcctgccactgcgataccgacaccaaagtatatatgtgctcccgtaacacgtcgttttgttttttttttgtcaaagtttaactgctaatttccatttttatactactccaagtaacattatttttgtgtaataaggaatgtttagtgcttgttgggtggcgcaagattattcacaccgcacgccaggcagggcgcaatcgtgtcaggaaaggccacggaacattatttttcggcccaaccgatggcggcggcgggcacctcctcctcctcctcatcatcagatcacctctcgagcacggcgcaccacctcatcggccccgtactcccccgtcccgttccttcgttccgattcggtccttcgcctccaaggctccaagccacccgcgacctcgagcttcccttctctctctctctctctctctttctctctcgcggcctcgcgtccgcctgcctcctcgcgacaccgcccgttccgttcgagggggggcgaagccgggtgggagggggaagaggatggcctccgaggacggctgcggcggcggcaacccgccgggggacgcagcggccgcgccgccggtgtggaacgccgcacctgcggcgggagctggctgcggcgatctggaggaggacctccggttccagtgctgcgtctgcctgtgagttacgccgcgtcttctctctgttttttttttctccgcccatgttgtagtgacctttgccggcgtatgagcagacgatcccctttcgttgattggacgttcgtgctgcgtgattacgcgccctcgcttttgatccagtgcaattcgccgcttattttcgtcgttgatattttcttttttgcatcgattttatgctctatacattgcgccgtccctaaatttttgcgtagtgatattaagcttagatattgttaatgtaagatctccatctaggaataccggtgacgaattgtagccataatttgctctaggtgacgggaaaagcaattgttgagctcgacatcttgcaacatttaggggaacatctaaataggtttagatcatgctctagacctttgatggcggagggcctgcaacagtctgttttgttgccatttgtctaaactgcgttttacattggccttctcttgtaaatgctgaaaaggcacattgtcttgctgtagtttttttttactttgactggttttgaatctctggtcattgtgttaattcgcaaatgatggcatttaaagaaagcacagatatcttatgtagttgttcaatctttcttgcagggagcttctgtacaaaccagttgttattggtaagagtttgctgttcatgctaacataaagagcaacctgattgcatagtatatattttttgaaatctcatttatcaattactggtgcagcatgtggacatatgtcatgtttctggtgcgtccacaatgctatgcatatcatcagggagtctcattgtgctgtctgtaggcagccttataaacattttcctagtatctgtcaactcctccatcacttgcttataaagcttgaacctgtggaatacaaaagaagggaaaaagaggtactaggtaagtatccaaaatccaaaccattaaacctctttcataatataaacaatactgttcatagtaaatgtttgtatttcttgcgaagtatggatactgcatgtattgtgttttgcatatgaatacaccgtcaatttcgatgctcttgcagatctagttcaattttttgggggtcatgtttggattgttatagaagcatttatatttcaaaattattttgcgactgccatctaaagtgctagaacacaaccagttctactgagcaataatgcaatttcataatttgaattcaaattcatcaaatccaaattgattggggtcatcagggcagaagggaatgtgatggtgtattcatgtagagggtgaggttgttatggcatcgatggtataggttcctagttggctgtgcaaacatggatgtcagaggatgttgctggcaatatggggatagggatttgtaagttttgggtgagatcattggatgaggaggatattggtgaatacattgccttagagtttgtgtttaatggatattgaaagtgtagaaaaagttcacaatcttatgctgaacaacacagagttttttcgctttgcagttaccatgacagttcttaaatttcacaattcacactatatggatgagtccatccagttttacgttttggcttattttttgtagcaccagagtttcaagaattacagcacgcttaacaaaccaaacatggtttcctcttccaatagctgtttgcctgatttcagtaattagcacgtcctatttttctgcaagttcttactgatgctcttcttttggtttcgactcagaggatgagaagcgtgtggatacatattctccacaaatcattgagtttttaaactccaagagcaacaattgtggtaagaattgtgccatacaactgcaatgatatttgtctcagctctcaagtttgcctgaacttataagatgtgctaccttctgcaagaaattgatggggagaatagacctgaagaaagtaatagtcgacctccacaagaagttacatctgatggcaacactatcaatgggcatccgaagaaagttaagctggaggacgtgtcatgtgctctttgtaaggagctgttgtatcaacctgctgttcttaattgtggtcatggtaagatttaaagctagaataaaaaatgttacgtattgcgctaattgtctcacatactgacttacctttatttatgaaaagtgtactgcatgtcctgtttgtcgtccttggatgatggtgcactcaaatgccaagtttgtggaggtcttcatccaggagattttcctaatgtttgcttggatttggaccattttatcgaagactattttccagcagaatatgacttaagacgagagaagattaagcttttgaagggtgaatgcaatcaaggatcatcttcaggtaagcttatctcacatggtgtattttcttatataccatactgatacagcatattaaaattaaggaaaagatcctattatttttttagaagtaattttctaaccatagggcgatgttgcttatgtgaagtatttctagtatatggtgtagcattatcttctgcatgaagagattggcgtttagaacaagattcagtcaaacttttgaaactttccccatcaataacttttaaaatgcttagcttattttttttaaaagttatgtgaagatttaccctgaaaatcactatgataatatcatcaacttattagaatttataaatttatttccaatataaaattgtgaaagctgtactttgaggactgtaaaaaagtcaaaagtcatgtatgctttgaccgaagggagttactatcttactggtaacaatgagtattatatatttatatgccaatagccactatgatttatcctatgatgtgaaatgcgtagatgaatattagcaatagtttgtagaaattaaccacaagattttatactaccccagttacaggtcagtaggccacaaccagtgatacagcactggaagagtgagaggaaccagcttgctgctttctgggacagtcataggaagttggtttcgatctactataattctctacgatactgggctagttctttcaattgtctgaaaagatagcatggataatttgcctttcctgttttgctattggttatggaaagtttgggcacgagttatgaaagtgatatctttgtaaatacgtataactttcgaaaggaataccataactgatttcttctttcatggctaactgtttttttttgtggtgtggttaggtacttcatgcataaaagaaggcaggggtagaccaacaaataaggaaaaccgtgcacatcaggatgatgacttgtcagatgttcatattggggttggatgcgattcatgcggggtatgcacaagttgtgaactttttaagatttggtgaacatacatccaatggataaactgttctagtcgcctagtaatatccaccatgcagcccaaatagtgatttttggttactggtagtactttgggttcactcagtgccagaaaaaaaatgatttcgtctcttaaattattcacactaagttgttgcaatctccatattctatcttgtgatcactttgatgggaacacattttcaaattttatttaagttattagtacttaattcaagtgtagatttgtgttggaaaattagaaatttgtttgcaagacgaggtttacataagttatgtgtccagttgtttagtgttctctagcctttctggttttaaaccttctaatgtactcccaccgtcccttaatataagggaatttggagagatgtgacatccgtccaaaatctcttatattttgggacggagggaatattgttttacacaaaaaggaagccttaaatattttataaggtacatttgtatcatgcctttattctcacttctctgctaatatgaaattgacgaatgcattgcagatgtatccaatacgagggaagaggtacaaatgtaaggactgcactgaattaattggatttgacctctgcgaagaatgctacaatacaaaatcgaaacttccaggccggtttaatcagcatcatacccctgaccacaggatggaacttgatcattcagcactcttcaataggttgatgaggctacaagggatacacgaggagggcccaggagagataatcatagaaggtgcatttgttgctcctgacgctgtggtgcatataatagcagatgatcatgaggaaatcgaggataacggtgaggatgatcacttgctctagaaacgaatcagtggtattaaacctgaatttcggcattgtcctttctttaatgtggaggaggctacatgaatcatgaatggtactgtatgaaatggagggattgaacaaagcttgtaggcgtgtaacgcccatagccccttacttcaatctaatgggaaacatcttatttctgcttttgtaatctacatttatattcttgttaatggaaatacgaatgagaaaagaacggcaccaggtacagcgtatcacaattcacaactgcacaagcgaagaagcatcctgtagttattaatgttttgtaataaataccttttgttttataaatcttcttttgcacgtctagaagcctggtaagctcttttccttgaggctccagacttcaacaaaagggggtgtttagatctagtggtgtaaaattttggcgtgtcacgtcggatattatataggtgtcacatgaggttttcgggtatttatgaaaaaaaactaattacaaaatccgtcagtaaaccgcaagacgaatttattaagtctaattaatccgccattagcaaatgtttactgtagcaccacattattaaatcatggagtaattaagctcaaaagattccacaaattagtcacaatctatgcaattagtattttttttaagcttatatttaatagttaatacaggtgttcaaacgttcaatgtgatagggtgtaaaatttttctgtgggatttaaacatgaccaaaatagaatgtgcaatctcgtccctccgtcgcgagcggatttggatcggcttaaacagtaacagtgtatgtcattggatgtaaattgggcgtgccagattgcatactgtactgtacaaagtactgtagcatgaagtactgtagccgttgttactgtagcattcgatctgagccgttgatcataaaaacggacaaccaaatttgcgtgcagttgttatctcgcggttgcaactttcatgtataactgcacctcatcccaattcgtcgcgagcagctccaggatcacggcgtaaacccaggagcggagccccaccggcacggcgatcaaagtgccgctgctgcatgggcctcccccctccccctcctctcccaccaggaacaacgacgccgcgtgccccttgatcgccacgacccagagctgtgcggtcgtgtggagtgtggacgaactggcctcgggctgattacgtagttccgtgccgtgcgctttcgtttttcatgactacgattatgcttctgcatccgcttgcgcgtggagccgtgcacgcgcgagtgagcgacacggcaaggcaacgaggcaaaggcatagagcacgcgaatgggggtgggtgagtggcgaggccgtgacgggagagagaggcaacgggaaatgaggtacgctgcgtacgcaacgcgcggggggcgtagtggttgggccgtgtcttcatccagcggttgggccaggtttcagctttgaatcctgcgcgcaaagggggagagcaaggaacaagtccatttcaactctgaaatataggttcaatctaatttgtatcactcaacatcaatatcaaatgttaactccctaaccaataaaatcagtccaatttaactccctcggctatttttgcgggcggtttttgttgatgtggctcattgacctagtctaaccagctgagtcagggggcccatatgttagtgactatttttcttcacctctttctttttctcttccttctcttttacccatcaatgcaattgggttgctggtgagcgagtcccctcgaccaatgcccccgacacggcactctgtggcaccgagctcgttagatctagcccgaggctcgtcagatctagatttgagaggcggcggcggcgacaacatgagtacttcctcgagcgtgcaaggccactccaacaagggtggctcgtcagatcaaactaaagatcgatggtggcaaagacggaggaagctcgacagcggcagtggagaaagttcaggaggggactggtgcttcacatcttaagggcacgacttccccgactcctcgacacgatttcgaccgttgcctcatgcatcatgggccttcatcctaataagacttatgtgttcttatagaggcgcaacccatactaacgtgaatgaagatcttcaaattagctatgtgaggccaaacttcacctcaccgtacactgtgaatggccttactgaaccttcggaatgaaaaagattataaggaagtggacctccaccattatatcagcaaggagaaacttttgatggtatttgtttataatgaagatgaatacgaagttaggatacacaaaacaagaaaatcattagcgcatgattagttgaattttaattattgtaaactttaaatgactttattaaaaaataaattcatttaatatttttaaaacaacacctatatagaaaatttttggcataaaatataccgattagcaatttaaaagatgggctaacgaaagtcgaataaaatatgtaattttaacagagatgaacaccgccaatgagggattttgtaccggtggaaaggaaaattcttcctttctctctctctctatctccgcgggaaaaatctctcgtgtgccttttcattattctaagtttgactagcatgatactagtagcaactaacgcttctcttttcaactccatggcatcacaagctggctagttgctgctggccagtgtatcgccgcgccgcgaaatagacgaacctacagggtgtgtttggttttgcttgcaccattctagcctggtccgtatgttccatccaggcttaccctagcctggataggtgggtgcaaatagggttgttaggttggttgtacgagttaagttggttgattgtacgcgcaaattaatcctgtatacaagagatattatttggtttggtgtatgaggttagaatatggttacctcctcttttgtatggtaagattaccccttgcaattttagtgtaccattcaattgtagttatagtactattcaatcagccaaattttgttaaaatctgttgcatatgtaatgggtgaattggtataaagaattataaaaaaaataaatggtgccaacgatcaataattcgccgctttatatacgctataacaggtgagggaaaaaaataaaaagaaagaaaagaaaaaaaatgtgcatctcgttctcgtcgatgtcatcctcccgccgccgcactaatcgttgctgcaccggtcgccgtcctccacccgctgcgctggtcatcgccgcagccctcctccgcaccggtcgttgtcgtcctccacccgctatgctggctgccaccgtcctccactcgctgcgctggtcatcgccgcaaccctcctcctccgcaccggtcgtcgtcgtcctccacccgctgcgccggtcactggtcgtcgctgtcctccacccgctctgctggctgccaccgtcctccactcgctgcgctggtcaccgctgcagccccctctctttccccactgctcgctaccggctaccctcccggatctggtggccggcggcggaagaaggtgcgggacggcgacgattgaagacggtggccagggattgaagagctcatcgtcgttctctccgtcgagctcgtcgccaaaccatcgcctctggcttcgctctctgtctaggtatgaggaggggggggagaaatgaggacggggcggtgactccatcgcaagctgttgcgtgctcggtcccgactccctattaggaatgcaagtgggtagtcccgctatccgtataaaaacccgtttgctagtttatttttcacgtggtagtataaaatttagaagaaaaaataaactagaagtgagataagcgggctaaaaaaacccgcttacccgctccacttacatccctactcctaacacgtcgccgtgtatagtttgtatacatacccgggacgaggcaggcaccgggcgtcggcaagcgcgtcctgcgtgaccgaccggaagaaactttttcagttgttgcaaccgctagctctcgcgcctttgcctgccttgttgcctcatgcgcgcgccgcaacgcaagagtgaaacacggaggccgccgcgcccgcgttatggcgtaaccgcgccgcagtataccgcattaaggtgctgagtcatccccgtactgtacctgtttctctctctctttttttgacgcatcaatgcgccctctgcatgcatgcatgcatgcctgcctgattggagcccctgtccttggctgcagtagtgacagtggccacagacgatgaccttgtggcttgtgctgattctgaccgtctcgattgaatgacgactactcaaagacacagacacccacaccatgagagaggcacaggaaagagaggcgtgtgcgtctccatatgcgcttcacgcctctctcacggcctccctcaacacgggtataaaaggcgaagcagtgggtagtgctaggttgggttggtgcttggctagccacggtattattgcgtgaaagagggggaggtgaggacgtgaggtgaggtgaggtgaggcagagtgaccacagcgacggcagcgtagccatggcgaccaggccgggccctttgaccgaatggccgtggcataggctggggaacttcaaggtacacgcccaaattctcaccttctgatttctgagcgaagaaaacatgttcatcctttttccttgctcccccgttcgttcctcttgatgaacttcaacagatgcagttgtttgcatacagtgaatggccagccaaatccaaaccttaaaattgcacatcccagtacatgcatgcagtttcctaaaaaagatgattatattctcggctagtagctttgtttgacatgcatggcatggggtggcatgcgcagtacgtggtgatggcccccgtggtggcgcacggcgcgcgccgggtgatgcgcaacgggtggggcgacctcgacatcgccttctccctcatcctgccgtcgctgctgctgcggatgatccacaaccagatctggatcagcctctcccgctaccagaccgcccgcagcaagcaccgcatcgtcgaccgcggcatcgagttcgaccaggtcgaccgcgagcgaggctggtcagtcacctcaacacgcacacgcacaacaacaacaacaacaacaacaagcagctaccaccactgtatatattcgtgctgatttgcgttgcgtgctgcagggatgaccagatcctgttcaatgggttggtgttctacgcggggtacctggcgatgccgagcgtgaggcggatgccggtgtggaggacggacggcgccgtggtgacggcgctggtgcacacgggccccgtcgagttcctctactactggttccaccgcgcgctgcaccaccacttcctctactcccgctaccactcccaccaccacgcctccatcgtcaccgagcccatcacctgtaagccacacgacttaaaggctgtgtttctttactcaatattctcaactccatcctacttgtttttccacgcgcacgcttctcaatctattaaacaatgcttttttataaaaagttttctatagaaaagctttttttaaaaaatcacattaatctgtttttttaaaaaaataattagccctaatttatcatttgctaataagtggctttgttttacatgcatcagtcatgagttcacacaactcatagcagctcatctcacttcgttagtttttgtttaatgccttatcatctcatgggtgttcatttaattaacttgttagtaccgtaccgtgtctcactgttcagtctaataattgttatatatagttgattgcgttcttagattaatgaagtgcgcagatcataaatagtaagcacaaagtggccgatattgactcctctcgtttgtttaatttcatgaaaaaactttttgtcacttgccggagatgccatgccctacattcctagtatgttctcgagttaaaatatgatgaagtagcagttgcactcctcggaataacacattcttagataattaaagaattcgtcgtagctaagaacaacacacatgaaagtaaagaatgaccagcaggatgcaggaatcgaattgaagacactgtacggagtattaatttcagaccaacagctcatcttctaccagaaaaaaaaaatcacaaatgttctgccaacatcatttatgttctctgatccatgaacagtaccacagtatcttttttttttttttgcaatgcaccttttcatgacaaaagaagaaaaagaacacctacgggacgggattgtgatatgtccagtctgaggctctgagcttcacactgtgtcactgtcgtagagtaaacggcataaattggctgtacctgctaggcagagagagagagaggcccgtccagcctgcaagaaatgagaaatgcatgtgactttctgaattgcagcgctgatgtgttcgattcagtttaggaccactcccggtgcaggccaatagtaggagtattacctttccttaccaatttgaccgataaatgctggaaagaacggccggtatactcctattgacatttcacatggcatttgcagagcttcagtgatgatgggtgaacagcctacagtttacagcacagagcctgtagtttacagtacagagagtacccaataaaacgagacataaatattgcggcttgcagaaaatgcagtttggaccacctccacaaccttctgatctagatatagctgttgctattactgatactgaatggaaaactgaaaacaaacataggttaagggttggtttagttcacgccaaaattagaagtttgattgacattggaacgatgtgacggaaaatttggaagtttatatgtgtagaaaagttttgatgtgatgtaaaagttggaagtttgaagaaaaagtttggaactaaactcggcctaaggccgtgtttagattcaaacttttttttttcaaacttgcaattttttcgtcacatcaaatgtttgtatatatacatagaacattaaatgtggacgaaaaaaaaccaattgcacagtttacatgtaaatcgcgagacgaatcttttgagcctaattacgccatgatttgacaatgtggtgctacagtcagcatttgctaatgatggattaattaggcttaatagtttcgtctcgtagtttaaggcggaatctgtaatttgttttgttattagtctacgtttaatacttcaaatgtgtgtccgtatacttcaaaaattttgtcacacgaactaaacacaacctaagtagaatacttcttccgtccttcaatgacttttttttaaacaaagttaacaaattagtaataagggtaaaagatcgaagtgctcctcattaataagaaagtagtattgttagtgatagttaggggtattgaagggatacaaaatcttaattcacggacggagggtaggtaagaaagttaaaataagtcttttatgggcaaggttgaaagactagaaatgaaatccctttaggacaaagggagtagtttttatcaaacgttggcaaatacaggtcctacaagtagaacaattcgaaagggattgatcgactattatagttgctttctaagtaaaagaaaagatcatatatctgggaggaggctattacctgaaattgaacgaggtgttttagctataaaacatcagtgtgatgttcatgcataggtcctgttgtttttttataaagcacatatataagagtatgtacctaccctgttaatgcacaattactattggcacttacaacgattttatacattgcagctgttattcatccttttgctgaacatgtggtctatttcatactgtttgcaatccccatactgtcaacaatttatttgggaaatgtttcggccatgggcattgtggggtacattgcttacattgacttcatgaacaacatgggacactgcaattttgagttggtgccagagtggattttccaaatctttccaccccttaagtatctgatctacaccccatcgtaagtgcaacactcttctctcatgtatctatcatagaaatgtattaccaacgtgatgacagattggatcactgaattcacataacttgaagttcagcctcgtgagttcataaacccaatgctaacaaacaaatgctatttccttctgcaggttccattctcttcatcatacgcagttccgcacaaactactcgctattcatgccattttatgactacatatataacaccatggacaagtcatctgacgagctgtatgaaagctcactgaaaggaacggaagaaacacctgaccttgttcatctcacgcatatgaccaacttgcaatcagcctatcatctaaggataggaattgcatccatagcctccaaaccgtacagtgactctgcgtggtacatgtggacgttatggcccttggcatggctgtcaatggtacttgcatggatttatgggtcctcagcatttgtcgttgagagaattaaactaaacaagatgaagatgcaaacatgggcattaccaagatacaacttccaagtaatcacttcccctcgcttatgcatttctaaattcaaaggtatggattatggaagatactaactgttctggttttgcactctgcagtatggccttacgtgggagagagaaccaatcaacgacttaattgaaaaggcaatattggatgctgatatgaaaggggttaaagtgattagtctaggactactgaatcaggtgtggagttcttacctttaaagctcgtgtaatgagaatcaaattaatagtttaatggcatggtaaaggttgaaagtagcatgataaaacgtgccaaaaataaacaataacaagaaaatctcatggacatgtcctctgtttcatgttaaaaatgtgattagttgaaaaaggacagcaggagtgcaaaaatttaagtttgtg

SEQ ID NO: 8251 - DNA, 10228 bp, Oryza sativa
gcaataagtacgagaaaaatgaatttttgaacacctcaaattatgaaaaattctacaagtttgacaacacaaaatactacacaaacatataggactaaatttaattctcatataaaaaaatactccataagccacattaatatattatttgccactctacaggggactcggtacccttatttgacattgaaatgctaggtaggaaataaaaatttctataattgtacttttcatgaatggggattgaaatataacccaacatacttatatcgtcgaatctattaatatttattatttgtataacacgcataatatatgaaattatactttccccaatgcaagatatacacacacacacacactcactccaaggtccaaactctaaaaggataagaaacaaagggttagaagaaataatacaaatagcaaatcccaaaaattgaaacaacccttaaccttttcgacgcccctccataatctctcgaggctcctccacctacgccgatcggcggatggactcggagatgattttcaggtcgatcgacaaagaggatcggccacccaggcgttagtagactcgatgtcgtagccgtaaatttaaccgcagccgccgagcaagccggtgcctggacttgtatacgagatattcagatatatatataagctgcgcgtgtgccggcgtatcgtcgtcgtctcgaaaccgagggtaagtaggattagcagcctggacggacagctcgatcgaaacctagggataataggaaacgaacttgttctctctcacgtacgaactcgtgcccccaatttttgtggaaacaaatttggtagatacgggttgtaatcccgtgcagcctgccgcagatcgtcgcggagtggccgcagtatcggttggatctggatggtactcccgctcggctccaagcctccaggcgcgcgacgccgagtctgtaagcgcgcggcactcgatcgggctcggctcgcgtcgaaccagaaagcgtcgagcggatgacatcgacgggcgcaacaccatcagggattcagggccacgtgcatttttcatgccatcaaaaattcttgtatacaggcccaaatagatgatagacttgggctctggaattatattgtttatgcatattcaagccccaacggaaaaaggaaaaagaaaatgaagcggagcttacagtacacacatgaaaattccttcagccgggcattgatagcatacatgatacatcatgaataaaccatcactatcagaacgtcgaaaaccaccatgcataaaccatgcatgcgagagtaacatcctggccattagtagcatatgcatgggaagacatcatactacagtaacatcacacatgcattcatacatgaatgccatctatagtttgtcaatatcagaagacatactgctaccggagcccagcaacatcagaagacatcatagtaccatcacacatgcatacatgaatagcacattctattagatttagagcaccatcaaacgtccaaaacagtgtctcgtagtgttctgattatcttcctttctgctacatgtgccaaacgtgtcgtgggttggagaagtctgatgtttttcgccgggccagcgatagaagccggggtgagtttattaaggttgggaaaacaattgcaatactgcagggttaacatggttgctggatggcaatcttggcgctaagccagattactgaagaagagctaaggtggcgccacggccagcagatatacacacggtaatgaccagttatatttagtccagctccggccaggccggcagctcgttttttccaaaccatcaggtgatcaaacaaactgccaaagtcccattgtgttccagcgaaagaatggtgtttttctcctttgtgaattcaccttcatgtggaagaatttagtgttggcgtcatcatgcttgatgtgggtcagccgagaatgctgacgcatccgtatcctttccaacgatgctagggctgatgtagaaagttaatttctgctacatagctcatagctatgtgttcaaaagattgcaaagataatgtgaacgtacttgtgtcaacctgaacattgctacctctactcaattcccagatctgcagaagggtggcactgtgtaagagttctgctcatattgtaaaatgcaaaagggaaagggagtaacattttgatctaaccttttaagctgaccccctcctcagccttgttgcacaagacgagcaacggatctgttgaaggaaaaatactcattgccttccttttcttctcagcaactagattttcaaataacttcttgtgctttgctttcaattcttcatgtttatgataaagcttgattagaaaacaataattagttagtataatttagccaatactagcatattaaaggtaaattcgtagttaccttatcattttttttggcatgcttttcctttctcattacgttgtatagcttcattttgaatttgggaggattgtgtactcaacgacaataatccatcaacggataatagcaccttaacctcctttttgccctctcttggatccaactttaagtgtgaggtatgcaaaaacatcacaagctttagttaaaataggaagttccccttcaacaatctgaactgctgtggacaaagagctcgcttggagtgcaatctgggctgcacatggtatatttgaatgatgttccaacacgcgatttattccacccattactacaactccaacagaagcgtgcaaacaacctgataaagcaacaagttcacgatccttaacagcaagtttacttccaggaaatgcatcccccttgataaactcaatgtgttttattgccaaatttggatctgttgtccagcaatcgtctgcatagaattccttgcttttgacaagagcttgctcctggaaatcccatacttttgctgcgatatgaagagatcttaagatcaatctggatgcacttgcccagccattgatatgagttgcccccacatagcccaatggttggagctgtgcaccaacccttgaattcaaagatttcaaaataagacgagatatgtagctgtttttcaaactttctgctgagaaaatgatcagggctgccattgctctcttgtgttttgctgagtaattgtatcggtcaaaatgtgccaaatcctggaccatgtttttcattacgctatatcccacctgaaaacgtgacaattcatttggttctttgcctacaaggtcaccatagttgctgttgtgttgtagaagtattgagcctttaatatacttctttggccttggtggcgcattttccttcaccacatgttccttgcttgaacttgctaattcatacttgtctctttgcttgtttttcttatccatcttctcacgcttctggtcctctataataccctcctcccttgttttacctttctcatttatagaaccctccagcatctgcatctcctccttatcgtcaaattcatagatttggccatcagcagtcctaaatcctctcatccacatgttttttccttccactatggcagttacagttgaagcaccatcagtaaaggctacagcaaagacttcaatcccttctggggtaatacagaattcctttctcttggaaccagtacccttcacaatccttctgaacctgcgcttaagttctttgcgggctttatcaattttttgggtagatgatctcaggatagcactgaagtcattagcatgagttaacttcaggtctaaagtaaatagcagttcggatggcatgtcatacactccaaatgactgttcatcacccattctgaattagaaacgagctgatagacaagttgtgttggatatatcactgcaatcaaaatatcgacaacattattaaacacacagatgtaatcaacttagcttttttatacacagaaaaataaatccaccaacaaattaaataattactcaactacaatgtaacatctcaacaatgatatagcctaatccctccagtaatttttcccttccttttattttttctggttcttttggcttttgctgaccaacatataaaagtaatacaatgattcgcaatccatttgcgtattccaaatccctaggcagccaaatcgcacacattatattcttgaaatattatactgactcagaattcatgtacatgcttagtaagcaacaaactgcagataaagcaatagtgacacatactcttgaatcaaactaaatatgtacaaacacataccttcagatgcttggagaggatagagggggtgatgtgcctgtacaatgtacttgagctttccgttggtgtctggtcaaaacactgcactgttcagcttctccttgtactgctgcttcatctcaaacaatttaaacttggaatagtggaatagataatgaaggtgcatgtgtgatatgcacccatatatcaataaatatgtacaaacatcttgtgattacttcgtttttaaagaaacacacagtactgccactgtaccgacatttcctcgcatttaagagatgtctgaaacatctactaacaaaaaaaaattctggacaaatatgaagaaactgtgaggtgtgagagaaaagaaaagaaagaactggctagtatagtagtattaattgcagtaccgtcgataacaacagatctttttttttaaaaaaaaacctaaggcggaactttgttccacttttatatttagaagaagagaattgacctagtttataagaaaaaccgggcccaaaaaccatacaataacaacatatcctagttttcaagaaatgtacaattctgctatatgcttataagtctaattaatgaagtttagagccagcaacagcaaaggggaaaaaataacaattagcgtgtaacttagaaataacattaggatctccatcaagaaaagcaatagaaatcttcacaagaaccgacaatctttatcaaaaaaacaagcggattgtttacccctgattatgtaccccgtttcacatcgcaagaggtcaataactttcgtttcgcttcttctataaccagtgccctagaaatggagcgtactggaatttttttgacgcaagggtgcctaaataatcaacagcaaaaccggacggaaagattccagtacgcacgaatcgagtttatagcaagcagcaacatatcaaggcaaacgcgtacctagggttttccgccgtgatgcgtcccctgctgccaagacaaacgcgaccgctgtttgattcgtcccgccgacgcggaggcggagggctgggggcgggcgcagtaggggagagggcggcggcggcagaggcacgcgacgcggatacggcttgacgccgcagaagctcgccgatcgccggattctgaaggtgccctaggtggggaatgcaggtaggcttgaggttgagaacggaggccgacgccgccggcgatcggcggccaaaaaccccacccgcctttcaactctaggagagtccgctcgcaggcaggagggtcccactcctcagcacgcaacaacgtgcgggaccaattatttgttgacacgtcaatgtttaacttaacgtctagtactaattaaaggtttacttctaacccccgtgattagtccatttctagcatcagtacctcacggtttaacttgatttaatcaaatattttgtctcaaagcaaattaccaattttctaaaatatattcttcagctatgtcacgtttttcgatgtccactaataaattatgcaaaaaaaactttgattatactattgcaaaatctcttactattttacttaaaaaaagaaatgtttccttcatccgtcaaaacaaaataaatagccaaaaaaaaaagtccgactccctctcagaaacgaaaaaaaaaagtccgactctaaatccgattctccccttaaaaacagaaaataaaacacaccactcctctcggtctcagtttgagtccgagatcccaggcacagtcctctcggtttcaatctataccgtgatatcccatacatcttggtgaaaaaaaattgatgtgccggattgaaaatatgtttgcaaaaacggaacctaccggaggagagcattccatttttatatgattttaatttttgggtttgtacttttctatttgagtccctgtaatttttatatttacacttgagtccctataatcttgcaataagatacttgagatcgtttttttaagaaaaaataataaaagggagagaacaatgacagacaggtgcataaaaagaaaaagaaaaagaaaaagaaaaactgcaaaaaagagaaacaacaacaataaaattttgtttcccctaagtggcgaaaaaaaccgtagatccgattcctataaaaggcaaaaaaaaaagtggtgaaaaataaaggctagatccgattactttaaaaacggaaaaatgaagtctgattcctataaaggtgagaaaatctgaaaaaacatctaaaaaatttcgtccaattccctaagaaagtggcgaaaaaaagggttcgtaaaaaataaaaagctagttcatacaaaataaaaaatacgcgcgagaaaaaaatagaaagggcaaaacaaattccgatttctaatcagtatatatctcttctctatctctaatctaatctaactatttaaaaagagaaaatacacgagaaaaataaaaacagttcaaaaaaatgcgtgagaaaaaagtcagaaaaagcgcaaaaaaatgctaaaaaggttttccatcttccataaaaaaacgtgcgagaaatattatttccatcgtcggtaatttttttaaaaaaaacatacgaggaaaaaactgtaagaaaaaatgcgccatttctaaaaaatgatttgaaaaaacacgcaagaaaaaaacaccgtctattaaaaaaacaaatcgctccgaaaaacctgtcagaaaaaaaaaacgctaaattgatggacgcttgagtcggataggatccatcgattttttgccatctactacacggcttttatttcgtcatatattcttctgtattggaaaaaagcaaaaaaatgaacattaaaaaaaaggaagcaaaaaacgcgcgagaaaataattgtcaagaaaaaccggcaaaaaacacacgagaaaagaaaagcaaaaaagggagaaacatatggttttcgtcgtcggtaaaaaaaattaaaaaagaaaacatgctaggaagaaactgttagaaagaaatacactatttctgaaaaatggtttgagaaaatcgcacaagaaaaaaaatacaccgtttataaaaaaacaagccgctcattaaaatataaacattatcattgacatgattatgcatgaaaaatgtatattatcattagaatttatttacccgttgtaacgcacgggtatttttgctagtttatcaaaagtttaaaatgctactacaagcttccaatcagctagaaatacatactccctctgtctcacaatgaagcacctcctaacattccaatgtaaaattaaaggaggataaaagaccaaaataccctttattgataataaattagtattggtgggtaggtggcaaggggtattaagaaataaaatttttcgatttgcgaaccgagagtagataagaaaatagaagttgatttattttgggacaaagtttgaattacagaagttgatttattttgagacgaagcgagtacacatttgtttctggcgtaaaatgacataaacagtgtacaaaaaaaggggagaaattcatcagttgtaacttgcaaagacatatcatcgttgacaggcaggaacaaaatccagcacagcttctcccacgagctcctcccagactccaccctcaatttgctcggtaatgtcaaccaactgcgtcctcatcgttttcacccagcctgttccttcaacctcctgcttcacaactctctctatcatgatcccagcattatctctcctgctcaccacgaacatccgtgccccgtaaatccaatctttcaggatgctccagacttctatccccaatgcaggagaggaggcgtccatccatgttcttgagtgtgctttgctccatgggaatgtacttagcaaggtgttctcgccgatctcaacaagagcaacattgacacaatcgaaaagaagcctttggtatgaactttgctcccgaagctccaagactttgttgaacagaatcggatcaagaggacagtcaggtaaatgccagccagtgaaaagcatactcgactgcgcatcgtctaatccagcagacgacattatattttgcacaagaacatggcattccgattcatcgtcatctacatcagggagaaaagaagactgccctcgggtgccaggtaatgctgattctgaagtggtgtcgtcccatgataaggaacaagcaacagcctcaattgctgaagatcttgagacagcttctgaagaaagttaagcagaaatgtcagtatataaactaaccaatctgagacttgaagaactctaggctggaaactagacttactagcattttttgatgtagtgcttgcagatgattcaggttcattacaactgctatcttcagagggtgcatcaagaactgacgtagggctgggttggtcgcgtgtactatttaggacctcattcagtcctagtttattcaggtttccacttcgacaatccaatgatgcaggtacatcagttaaagcagttgttccctgtaataaaatttctcatcaaattctctgtggccgaacaaatgcattgaacaaatatttcttacaaatggaagaaaggatgtcatagctcaagaataaatgtgcccatatcaattacccagctatatgaaaagaacataagatttggcttgcaagatagatgagatgaagtgcctacctctgaagtgctggttgattgcacagcacaaatatcaagtatgtcctcacaaatggtggatttttcattaccatccaaatcatggttggcatcttgttgactatcaccgccacagtcttcagtattccctgaagacaaatcagatgtatgattggcagatatctgccttgttgttcttttacttcttggaaagaagaaatctgaaactctacccctgaaaaatgatttttctttatttgatgcgacaatatgttttgttctttcatggccctgatgatttgaagttttcacatttgccaccatgttattaagcgtggatggaatcagaggaacagatgttgatcttggcaaccccataggtctctcaccatttttttcatctttcctacaagcagttgcatatttagcttgagtaggtagttcattttctctgtcataacagcgactggtagaaacagaaggtaactcattgatgaaattatcattcttcacatcctgaagggagagcatctctcctaaggtgcatgtgctccttggcaattctacttgctcttgactgatctcatcacaagttacagttgcccatcgctctgaaagccgttgcttggcttccttagtaactgatgactcagcaaagtgggagatcttgctaaaagacgatcccagatagggatttccatgttttttggtataatgccatgttcgctttgacacaggactacatccccctgagtcactgaagctgtcaccttcatcttcaatatagtcaatatcagaatcactgttctgatcaatttctgaatcacctaatgaactttcatctcctccatatccatttgagtatgaggaagataaaaaagattcatctccttgatgacagccatcttgctggttatgaatgataccaggctctacttttgtagatcgtagggttgccccattgccatccaatgctaccctgaaatcactggggttaattgatagaaatggagttgtcctgggggttagctttgcatttgttaaactcggcttccctggagtaggcctcaggagtactattctacttggcaaggagggattttcttccttaaaattagaactctgatggaactctctcattgctgctccattttgctcttgaatttgctcagttccagtttgtcttgtgccatcactctcaaaagaaccaagtggctttagtaccgtaatccgttttttctgagggggtgctagattggtgtgagaccctaccaactgtcttgagaaaattgagttaggttcttcaagaaatttcagaaacaaatctttgtttgaacctaccaccctaagagctttttgtaagttcctttgaatgaagcggct

SEQ ID NO: 8252 - DNA, 8568 bp, Oryza sativa
accctaccaactgtcttgagaaaattgagttaggttcttcaagaaatttcagaaacaaatctttgtttgaacttacaaccctaagagcttcttgtaagtcctttgaatgaagcggcttctctgccatgccttagcatttttttccatgacacttcctcgcaaaatatccactctgttacttgtgttcccagaagaccctcctttctgcgaaattttgtcctgaaaatagctcatccgtgtttgtgcttcagatacttcatacacatcattatattgaactgcttcctgacaaaatgggtggatatcttgtgtcgttgactttatgagacgatgctgctcttgttgctttaagtctttgtttagtgcttttaactggttacatgattgacttttcctgaaccacttttggcctggtgtaaaactggtccattagcaggtagatcctcctcaaggcccattaatcgggcaacgacacctggtggctttctctttaattccacttctttagtcatctcttttgctaataacacttttaatgaagttgcatttgattttctacgtgaagaaccatcacaaggtgcctgcagagaaacccatattaataataaaaaaaagagcaagaatcatcacaggaatgaaaaaaaatactagctggatcagcatagtttaatggcataagcatattgcactacatatagttttacacttcattttcatgtgccttttattctcaaaattatttctaccacatttcatatcaaaataaaattgtcacataggagtagaggagcctaagttaaccacacagaagaaaggtatgccacaggatgctcacaggttttctgtccgcatgaaatttgtcagagtcagtggctttctccaaatatgaatagatctgttggacaggacaacctgaaaggattaaaatttaaaattatgtatgttctgcaaatagcacaaaccttagagatatacccgaaaaaactaaagatccacaaaagcaaaatgaagcgagaaataaaaaggaatagcaaaactgccaaaacatctcattatcttggaagagcgtaagaataatacaatgttgtgtaatccccccccccccccccccccaaatagagaaaaatggcctttgatagagcaatactgcaaagtattggcccaatggccctagctaatatttccagatgcatagcatatccaatttcccacacataacatagaactaactagatgtagaacacattcaagaagtgccaaatttctgtttcaaaaaagagaaaatgaagaagaataagtactgaagggcataataatttgatataatggcaagaaatattgaaatttatggaaaaccctcaaatccctctaataaaatacccacataaatatacataccatctccttgagtttgacccatagctggctttgctccagacatccctcaacaaattgattgccttctggcaataggtagctgcaactcaatcttctggagtatggaatcctgaaaatagtgacatcccatgaaccatgtgtgattttaattttccacaaactaaagccaagtgacctaacttaattacaggaaccatttcagatactagtgggtagtggctggcattgatgagcacggtgaatatatctgaaaagctctcagaatttaaagcacttagggtttgtacttaggggacatgattctgagatattgctgtagcaagatgccctctttccacaaaatttcaagagacacatgcttaaaagctggaattctgcaggcacttgtaaggcagattggtgaaagaggtagcacagttcatggtctgttcttgtataaaatcacaagaaatgagaaatggcgagcagaacgataagattcgacggggacatggcagcacttggcaacatagaaaagaataaggcgggagaaaaaaggacaggataaaagcatatgagcagaaacaattacaaaaaaatatggacccatggcactaacaagatcgtacatacttccaaaaggaatcttgcagcaaaaacataatctctgaaagactgtattttctgtcagaaataaaaatcagttatgagaggtaggaaggcgtattttaccatgtctttagatcagacaaatgtgaaaacacgaaacagaacagaaaccgagcaagtacaaaatacccaggatttctactctacgtacaggcgacagaggaatctctgtagacatcgttccaaaggcttcagaatttatcaggaaaattcgtcagaatttcgaatcttgacagtggaagagaattagggggagggggggaggaaaaaaagactgtaaaaagtaaaggaggagatgtactccacgtagaatagaaaacaacaatgggtgaaactaccgagatgtttaggtttatacatgtccaaatgagcactgcaaccgagacaattcctcaggtctgtagtctttcgcaggttaaaaaacaccaaaatctaagcttggcttgctgagtgtaactagattccactgttacaaaaagaagtgcacaacactgaagtaattacaaaaaccagaacacgacattacaaccagagggtacaggaaagcatccaaagaatcttgcagataagagagacttcgaggtctggtgatctgcgctgtttttgttctattcctcactggaaatttacgaatttcatgaagagtttggaaatttgatcaaacaggtgtgatgtttatgccaaaccgacgaatgttcatcatgactagaccttgtataacagctggcattccattttatttatggtgcattttcttgactgacacaagttatccccaaatcgtatgtcggacacccctagaaaaattgcatttgccacttcccagatgacaatcaaatcaaatgtagcacacattgagtttccagtattgatatcacaaaccgaatacgggagaaaaaaaaaatgcacagcccaaacaatgcctaatcctgcataccaaagctccaccaaatgaaacagaatgctggcattttccatccagcacaacccaaatccaaccaggcacatcacatcacatcccatcccatgggaatcccggcacaagaaaggcccgaagttaagtgagcctgtgatccagagagagagagagaatcgctagtatgcacacctggggtgatgcggcagcggagcattcttggccgccgccggcggccggggaggggagggagcagcttggcttgcgcggcggaggcggcggcggcggtgggttttgggagggggtaagcaacggagcggaggagacagtgaagcagagtggagtagagtggagagtgtgggactagtgggatatgcggaaaaagcctttgcgagccgtttgtttgccgttcttttcttcgcgggggcggggcgttcgcttgtttgttgcttgtgcagctgtgcttctggcccgtggcgcgtcgtgggctgcgtacgtgcgcgcgcgcgccatggatcgccttaactaacaaaaaccagaagttggtggtcactgggattggatcgaaggatattctcgtgcgttcttactgggattggatcgaaggatattctcgtgcgttctttttccttcattttttgtgtgaagactttttattactccctccatctactttcgatctactttcgaatgtcatatttatcttgacacataaatcaaagataagtaattctatttatcatccatttaaacatgctactagttatttctcgtaaacaagcgattcattaatatttacatttctcgatgccatgtagccaatcttgtgtggaaaaatggagagtcacgcatcaaatccgaaaaagtcattaagagaataggttgttggattgaaatatgtctatcaaaaataaatttttcagatttggaaatatgcatatcaaaaatagattaagggagtagctgctatgtcattctctttttattaactgctatgtcattctttttgtgaaacattaactagactactactctctccgtcctataatataagggattttggtatgtattacactgtttgatcactcgtcttattcaaaaaatttgtgcaaatataaaaaaaatgaaaagttgtgcttaaagtattttggataataaagtaaatcaaaataaataaataataatcctaaaatttttttaaagaagatgaatagtcaaacagtgtaagcaaaatgttaaaatcccttgtattagagaacgaatggagtatgttcttaagtacatgtgtttccaaattaaggtgattttttttcttaaaagacatgatccattagtctcaataaatgtgtgatatagtaccagtgatgaaaccaacaacatttttatcaggactacgtagaaaagcctaagcaaccgtccactggatggagatgtcgctctataacgtatcgttatttttatttaaacacggtacatatgcttatatatacatgcgcactcccttctataaatattagtatctactcgtatattatatcgcttataaattttttgaaaatgtaccagtattttctaaaatttatgaagttatcacatacaactcactattgacaattatgttatctatcacaaacaaaagagataatcataaatataaatataaggaccatatcaaatgcaggactgaaattagcgccaatggaagagaaattacacaacacgacataattagtggcatgagagtaattgtaagaaactgtcggtgtataaaagttcggcgacggtgcatacgctagaaaggaaagcacagcattcgctcgagggagaaaaaaaaaagtaaagccaaggcgttcgtgcattagccttttctacaacaacagtatcaatataataaaaactttgtactacaagtgctatttacaaacagaactaatttgtccttactttaagcaaagggaataaacagacgagcaaaacgtaaccgcgcgccattcttcccacaagaagatcaaccagacaaccaccacacggccacaagcccacaagcccaccccaccccacgcctcggcggctcggcgctcacgagtcacacgacccgcgaacacctctgccacctatccgtttccatccagttaggcaccgtcccttaacatttgtcgctgcgcacgccgcgccacgccacggtccaacacacgacgccacctgctgcccgcgcaacagatgccccccgcccccggcccccctctccgcgcaggcgcggctaggcggctagctatagcggcgcatgccccgcgcgcgcgcacagtggatcaaacagtacgcgcacagtgcacgcagcgcccgtcatccacagccacaccgtccgcaccgcgcgccccgctcactcggccgctaaacccaaaaccctccccaccaaccgccaccgccacggctaccaccagcagcagtagcaggcgcggcagagcagaggaaggcatatccgcgcgcgcgaatgttgcctcccgctacgcgacgtcgcgccgggccggacgatgagacggagcagagcagcgcgagtgcgcgacgcgagccatgaccaacggcaggcgacgccgcttccactgtcgcggcatctgcgtgcatcagcgatgcccggccggctgcccgccggtcacatggctataagcatcgaatcgtagcgtagcctcttctctttttttttctttttctctgcgcgcggcagggcagggcagaggcaggcgctttcccggctggctggacccgtgcctttcgggaattaatgaggaggggtcaagatcaaatcgcgagtttttttaaaataccgctgcctacctgtaggctgcggaccgtgcaccagtgcatgtcagatacgtacgtacgtattcaggtccagccgagccagagccagccagccatatgcacagcgccacaggattttattccgaacaaattgtatgagaacatgtacatgacgcgtcagcccaagccagtgtcaggactcaggacgagctgggacgagtaggcgggcgcgaacatgaaaacggctgtttgttccgttgtgcagcaggcgacgtagagggagagggaataatcgtatgatcgtcgttgcgaaatcgtgcgatgcagcgggggagaagagaaggcggtttatgtgtacaacagtggcgcgtgttaggatagtggacaaacgatcaccaggggaaaaaaaaaaactagcacccgtgacacctgaagatgccggcgatcgatgctgatggtgatgggacgcgcggaaccgaagctagctagtccaccgctgccatgatgacgatgggggaggagaacattgatgtgcagcttgatggtgagctaccacaagttctatatagttcaatgttatggcagtaagatggaaacgtgttgtgtttttttcgtgtcatacactggtgcggttacttgtttaggttctcgattgaatgaatctaccaagcatgccaagcaggcaaggtacatccgtacgcatcaggaaataaaggccatttcctaatcactttgtcaatttttttggcataaacctttacataaaccaagtgaatgattattttttggcattgccaattgttttggcttgggtaagtttgggtctgtttggggaagcttttagattctgagaagcagctgtttggtagccagcttctgagaatctggaagagctctgaaacccagcttcttagtttatttttcagaatctgtaactacagattcttagaagctgtggactgtttggggtagcttctagtagaagcagctttttgggaaaagctatagttgggacaagctcccccaaacagggcctttggcacaaaccaaccaagtccaaaattccatgcaaagagcatgaaagtccaaagaatatgtttggtttgctatcagggtttacgattccgacgaaatccaatcggattaagcgaaatttcgacgttccgacgaggcttgaaagtagaaactgtttgagatttcgagaagttttatccaaattcaaatataaattgataaaaaagaaaaaatcaaataaaatcttataaatactatgatattcatagaacctattgggatataatttttttaaaaaaatgatgtattgtgtgtatttactgaaattttcatcatgaaaaaaaaagaatttcaggaaattacctctattacaaattactgatcaaaatttcgatgatttcggttagaatttcgccaaaaccaaccggtttttgagaacttgtcggcaacttagggaatttgtatttaaattttggtttatgaaatttgttcggaatttaccggttttccaccggatttcgcgaaatttcgaattccgccagtgcccgaaacggaagagcatgtaggaattgtaaaccctgtttgctatcttcttgggagcattcaattgaccatttttgacatttctaacaacatgttcatagtcataaaacaaaagcagcatgttcattggattttattatacatttataccacgtaccaactccaaaataagaacttcaatgcgccttcactgaggcaaggtgcacgcacggcagttattgcaagatcattctgtcatgagcatgtcaattattgcaacatcgttttgtcacgtagggaggccaccggagagataaaattaactagcattgggatcgaaggcaatcaattgctggacctgttttttttatggccaggagcaccattccatcgatctccctgcccaactcggcaactctacggcaattcgcagtacagttgcagggtcagggaagcatatgaggctacatgaatctacacattttttttcctctccgatttagcgtccagtttgggagtaaaaacgatatgagtagtggagcttctgcggtaaccgctacaggtcagttgattccatgggtgaaaactggaaaggtaaaaacttgtcccaccacgttgccagttgcatttcatgttgtcccactagttatgatcagtttcactataagtttactatatcggcaatatttctttcttggagctgagattgattcttgggttgttatctcactctatcctttgttatctttagtgctagttcaaaattccttctctccctttttttttcctgaatgaacgtaatagctcaagtaccaagcatcttgacaactccttgcatgtaaaaagcatctcaagaaactatcgattcaccaagaagcttgtgtgatatgaacgattgaacggtaccttggaggcgtttgtaccatactaatgtcagacgataactctggagtgctggtaaaaagttcagtctggtcgcccaaatacttccaaggaaagcaggaattgagctgtgcggccttgtgcagagaatatgtagccttttactgtggcccgatactgtttagcatagttcttgatcccgttggaatttcttgaaagaaaacatcacatgtcggggggtaaaaagcttcagtcaaaaaagcttggaaaattgacctcaggcaggcagagctcggggatttacctttgagcttttgacccttcggctgaagatttacaattcaatatttgtatcttacaaccattgctagcaacaagtaaaacagatg

SEQ ID NO: 8253 - DNA, 63580 bp, Oryza sativa
ttattctattcttttcttcattgtttttcatatatagattcattatatcccatcccaaaatcccaaatcaatcaaccccgaatagtctccaaattctcaaatcaatctctaaatacataacaaaatctttaaaaaattacatcacaacttctacaaaattcattacaaatacatcacatattcacatcacacacaaatcaaatacatcacatattcacatcacacacaaatcaaatacatcacatattcacatcacacacaaatcgtctcagatccgaatcacatatttaaaaaaagaaagaaataaaggaagaagatgaacggcctgcagccgcggcggcgcgccgcctcgccggccgccgccgcaccgcccgccgcgtccccggatctgccgccagccgccagcgtgccagcgcgccgccgtgccgcctcgcccggccctctgtgtgccgcgccgccgcaccggccggcagccgccgcgcgctgcccgccgcgtccccggccgccgccgcgaggccgccagccgccagcgcgccgcctagcccggccctccgcgcgccacgccgccacgctggccgaccgggcctatgcgccccgccattgcagagggaggtggggaggagggagaggaggagaggaagggaggagggagagaaagagataagggtgactctgtgaggagatgagttaaaaaaggagaggaggagattgtattggtccaacccgcgtgcagccaccccgcttatgtcgacttttttcccggttggtgagatctttagtcccggttggtaacatcaaccgggagtaaagcttatattgatcttttttcccagttggtaacaccaaccgggattgtaaatagatcttggactaaagatcaaaaaattcatcagagctttcaaactgggactaaagatgtttttattcccggtttttaatataaccgggactattgtgaaatctggtggaccgaccaaagatggttcctccaccagtgatgatactgcagtttttatactttatttgtttctcgttttataaagaatgtttcgatatttttgtttgtttgatgtttggtcttttatcaattaaaacagtttaaccatatctttttttttctttcttggatcaagcatccgacgatcgaagctacgtttttttctctttttttttttaaaaaaaaagaggacgactagagacgacactgatagaattgttgcaagttagatgctacaaaagtggagatggtttttcgtttcttgagaggatattatctctcatttcttgcatgccacttaaataaaacaagttcaagtttaaatttgacttcgataagttataataaaaacaaattaattttttaggacaaaaacaaattaaattgaaactagttttttttgcggggaaaattgaaactagttaattaacgtgtgtatatttgttataacttgtaaaagttaagggtgtgtttagttctttgggtgtaaagttttttaagtatacggacacacatttgaagtattaaacgtatactaataacaaaacaaattactgattccgcatgtaaactgggagacgaatttattaagcctaattaatccgtcattagcaaatgtttattgtagcatcacattgtcaaatcattgcgtaattaggctaaaaagattcatctcgcaatttacatccaaactgtgcaattgatttttttcccacatttaatgccccatacatgtgttaaatatttgatgtgacgtttttagccaagattttttttatctaaacaaggcctaaattaattttaacttacatgtttgcatagtgatatactcactctgtttcacaatgtaagtcattctagcatttcctatatttatattgatgttaatgaatctagatatctacttacattgtgaaacggatgaagcatgtatcttttactaatctatcttaccagtttttttaaaaaatattttaattactatttagattacatgaaaaaagaggtgatatataaatctcaacagatgaaaacactactactgtcccacgaaagcaactgattaacccaaaaataagagaccggatcggagacggcgccgcgcggtgctacgtacgtgaccgagtccgagagtgactccactcatcgtaacgcctacatactatcctccgtgcttatatacttcgatgcacgtgcgcccgacctcttcggctcttcctcgtgttacccaactgacacgctcgtgaaaggcctcgctcactaatcactatggagccggaggaggaggaggaggaaccaaacatgtacaactcggaggccggggaggagaaccacgtcggcggcttctacgagtgcacgggcctccctcgcgacgcggatgggttcgtcgccgccgtccacgaggtgaacccggtgcagttcctcgccggcgtcttccgctacctgggcgaggacatggcgggcgagctgctccgctccgacgacgacgacgtgctgcactgcccgagcatcgccgcctcttcctcgccggaggagctcctcgcctgtgccgcccgcgcctacaccggccgcgaccgggagcgatgcggtggcagcgtcgtggagcacttgtacatgatctgctcctgcttctgcccgcacgcggcgacgacggcggctcatgtgtcggcgcccgtcgtcgccggcgctgatcacgtcccggccccgtgcgacgacaacggtgtcgacctggcttttacgcaggacgagttgaccgcggcggcggtgaccgtgggcgaagtggacgaggacgaggtggccgtggcggcggcggcggcgacagtggacgcggccgtagacgagatcgtcctgaatgcactgggattcaatgagtttgctcgcgacctgaaggagaccatcgaagcaaaggatcgtgaggacgcgttgcgcgcggagggctcgtcagtttctcccggcgttcgtccaccggtgtagccgcgtccgcgttcgtgttgtcgtgtgacatgtttccgcccttacgaatcggtgtcgtaatagctgtggattttttctggacgtccggagttggaggtgtatgctgtagtacgtaatacttcagttaacgttttgcacaaaagttttgcgctttggataattgaatagttatccaacctaggtctgcttataatccatcaccaatataggtctgcttgtagtccttcaccaacacagatatgatggttcgtgccctatcaaacattcttttccttgcaagctaactatactactctctttgattaaaacaatgatgtttaacccctattaaaactcttaaaacgttcactattaacttatctaaaaaatacttagctccaaaacataaaaaaaaagatgggtatatttattttgattttgtaagcttagtggatcttataaatttaacttttcaatagaaaattattgtcaaagtcacatataaaaataccttaaaagagttaaacgagctgtagtacctccattatgaaaattcacatttatgacaagtggtttgaaattccctaagaaaatattgttgtattggatgattacatatgtagaaaattgtttttgtttctcacgatgtgactttgtggctcatgttttacgagattcatctctctctctcttgtatgcacgagcaaatcaagtcgcgcacatggctggcccaccaaggcccacgtcacgctctacgcagtgaaacaattcagtcggccacgtgcccacatgtggaccccagactcatgtgattgcgtttctcccgtgcgatcgtgctagaatttttatgttttttcacctatttttattactgactttattttaatttcccctataaaaacatacaaataataaaatttattgttgttttaagcctttgttgaaaaaagtggcttcatgtttacttactacagtaatttgattgtaaagttttaaatttaagttgaaaattttattaagttggttgaaggttttcaaatttgagttaaaagttttgaattttaagttaaaagatttcaaatcttcagttgaaagttttcgaatccaagttgaaaattttaaatctgaatttaaaaatcttcaaatccaagctgaaaattttcaattctgagttgaaaaggttttaaatataagttggaagtttataaatcttcacttgaaaatttttaaatctaaattgaaagttttctaatataagtttaaacttttaaatatgaacttaatagttttcaaatctaagttgaaatgatttcaaaatttcaaaatttgattcagtaaaaaaaagaaaggataatagaaaaaagacgtgtgcggggaatttttttagaaaaaaaaataaaaagtaaaaaaccaagagacacacgcgggaggttagcgagaaacgcataacaaaagtgggtccaccactttctttcaccccgtgcaatatttccaaaaaatggtgcgtacgcagttacgcaccaattagccacaccctaggttctatcataaatcacgatacaatcttattcttctttgctcgagatttgtgatagagcacacatcacaataaaaattgacgctttcttaaaacaaaaaaacctcaggtttgactcccgctcaggcgcccgatgggaggaggttaaaatcgggcgctgacggcagcgttcgatttacgtgcaaaactactttaaactgatttttctcttaaattacttatccaaatcatgatccggttgcaccattaaattcgttgtaattaaatcttcgaaacaaggccactcctagatatattccaaaaaaaaattagcttattattgaattatttttaaaggttgcacgatattccattaggtatattggaattgtttcactaagtagatcgaaaatgtttcactcgtttaaattagatgttgtttcaccttatataaaaacaatgtttcagcaaatagcgaaagaatgtttcagttcattgcaacattagatctatacatagtgaaacattgtggtacactaggtgaaacatttttcagtggaacaaaaaaaataaaccaaattcccttaataaggagtttccaaaatatgtgggggtttttttgcaatggaaggtttcgttcactgcaacattagatctatgtcatagtaaaacattgtaagtacactaggtgaaacatcttttgtggaataaagatgatggataagtgggtgggccaaacaggtgctcacgtgggggagggcgagcgatcgattttcccacctccccggtagaccgatgctgggcattctccggttttatcacaaatcgcggtacaatttttctttgtgtttgcttgagatttgtaatagagcacatgtcacaagaaaaaaaatgacgctttcttagaacaacaacataacaaaaaaacaaaaacccatccaaagcttaagcccacggacgcggtgcgagtgtgcgacgagcccagagaggcaaaccaaacgtccaaacctccgcacggcgccgccgcacgatgcccccggcgccaccgttctcctcccacggcgacttcgtcgccgccctccaccgctgcgccaccctcgcgcacctcaagcagctccatgctcacgccgtcgtcaccggccgcgccgccgcgcagaccaccaccttccacctcctccggttcgcctccctccgcctctcctgcctcccctacgcccgccgcctcttcgacgccacgcccagccccaacgtcttcctctactccgccatgctctccgcctacgccgccgcctcctcccactcgcaggaacacgcccgggactccctcgcgctcttcctccgcatgctccgccgcggccgacccgcgcccaaccagttcgtctacccgctcgtcctccgcgccgcctgcgccattggggtccagctggtcaggtcgatccattgccacgcctgcaaggacgggttctacgggcacgattttataaggacctcgctcctcgatgggtactcgaggtacgggatgatgggcgacgcgcggaagctgttcgatggtttgactgataggaacgtggtctcctggaccgcgctggtgtccgggtatgcaagggcagggaaggttggggatgcgatagtgttgttcgaacggatgcctcagagggatgtgcctgcctggaatgcgatcattgccggatgcacacagaatgggttgtttgtggaggcagtggggattttcaggaggatggttgatgaggggttccggccaaatggcaccacagtatcttgtttgctgtctgcgtgcggacatttagggatgctgaagattggaaaggtgatccatggttatgcgtggaggagctgtgttggttttggctcatccgttgtgaatgggttgattgatatgtatggtaaatgtgggaatttgatggaggcaaaatggatctttgatgcgttttctgataggggtctgaccacatggaattctctgatcaattgccttgcactacatgggtgcagcgagagtgccattgcggtgtttaattcgatgaggaatgaaggggttcaacctgatgaggttacttttgttgggctgttgaatgcatgcacccatggagggtttgttgatgaaggtcttagatactttgaactgatgtgtgatgagcatggaattgagccagagattgagcattatggttgtgttgtagatcttctttgtcgagcaggacggtttcaggatgcgatgaattttatcaatgatatgaaagttcaaccagacgaagtcatttgggggtcattactcaatgcctgtagaatacacagacacctagaactggccgagcatgctataagaaacttgttggatttgaatccaagtaatgctaattatgtagtgatgcttgcaaacttatacagtgaaggtggcttctgggaagaggttaggaaagtaaggaagctcatgaaggaggatgttacaggcaagaagctgcctggttgtagctggattgaggttgatcgcaaaactcgccggttttattctggtgatgatggtcaccctgagtcagaggatatctatgacactcttgataagttagctaccacaatggaaatgcaggctacatttgcatagattaataattcatattcaaaaatcagcatcttctaattctgtacatgactgaaactgttgacctaggcagcattatgctggtagatagatggtcgtgttcccttaaacacttaccctgagctatttatggctgaggtactgcttatatgccactactggggtgtacttctacaggatttatccattgtaatgctgttatctttgcatatcatgaaggtatgtgtatattatggatggccgaatatgcttctgcttactcccattttgtatcccacacctggtgatcttttttcttaattctgtcttcagtgctgccactgtgtttcccttggttcggaagtaacaaactgtcctatctggcatgtaatacctgctgctgctcaaccattataggtatggataacacctctatgtcggtataccatgaccaacctttgttttatggtccagtcttcacaaaatctacgctcgctgataatttgttgtcaaatgtcaacagggcatattcttgttctttttccccctcttgtacaggagcaccaaagtaaaggagacataagctaaagatggagtgaagaacagatgataaagagttttctataaactaccatttttatctgttatgcaggtaattttatattaattcaatttgtggagaacccttgcaaaatgctttcattatcaagtactttggacttttgagcctggactaacgaaaagcattacattaacagctggaatagctggttgagacttgagacgagggatatacggaaagctgcaatcagttgcatattggcctctcattatcatgtatgattgtaggagcatggttcaaagaatatgttctgctccttatctgctttgcagtaagaccaatacacattttatcattttatcttccatatcttatctcggtttctcttgatttgctctcatgtccaccatttcctccctccaattcaaagcttcttcttgtttaaacttattatgtaattcgttctaaattggtgggttctcaatctatcatctttttatcctgtctctgcaaggtgcaaaaaggtgattctttgaaagaagattctgggtacggagggaattgcgactgacgagatgcttacagttcatctgctcatgtgatgtgtcacatggcagaaaacatggagaaatgagcgccatacgttgccatgctgcgattctagagatccagtcatccagacagtggaaaggggggtcgtaaaggatggcgcagattatagaataaccatacagagtacaattgaaatggaccaacgatgaaaggaaggaaatctgagaataaattccagtgcagtgccagtgtcagtttcccggtgccatgcctgaccatgtaaattgcgatccgtatgactatccaaaagaatggcaatggctgtagtcctccgaatttagtgagttgaaagtgacttgtgagactaaataaaatataagcgactggcaatggctttgatcctgtagccactagccagcgataactgataagtgcagtaatgtctcagacaatttttagggcgagaacttttatggtacaatgtactgctagtatatactataagtatatatgatctaacggtgtagattgatttgattttttagttaattagattgcagtataaagtttgaaagggtaattttgtcttttctttgttattctatcatcaaatcatgctatcgttacgtccttcgtcatccaggaccaggtactcccaattagattcaatctgaacagaaaattactaaagagttattttattttctatcaaattcctaatatgcccttctatatactgtcagtatatactggtagtatattgtaccgtaaaagttctctcgacgagcgatgacagtggatcgaagattggccgaatatgccatgtttgacagtggatcgaagattggccgaatatgccatgtttttggaagatttactccttctgatgttccaaagaagggcgcccttggcatgcatgtcagtgctagggtatgcttagaagagcttccggcggctgtatcttataatcacaagtttcctcaaacaacctagtttttcatccaaatttggagaaattacggaatccaaaaaataaaagcaagtttttacagcctttttaggttcttaccaacttcttctaagaatcttagaacttgtttggcagagctctagctccagctccatctttcctatagctggagtccaaccaaacgatttcagctctacccaaaaagggatccatctttcttatagctggagtccaaccaaacgatttcagctctacccaaaaagggagtggagctgactagagtactctcgtaaaaatgaactagagaggtgaaactggatttacgcagctcgacaactccactacagacccaacttctaaagttaaatttagaagttgaagctctaccaaatgggaccttaaactcccataaacatgtcctaagcttagaatctaaaactccttcaaatgtccaaaaaaaatctaatcgtgggaatctaggattaagtttttttatgagacagaatgagtatgtgcctctaaaatctctttaggggaagaatttttttaaaaaataaaagaaccggaggactgccaataacattacaaagatagcttgcatgtactccttccgtatatgtgcatagctagaaataaggtcttttagggagttatgctttgagattatttggtgacctacgatttacaattttcattgcattttgtagaggtcatgcacgcttatatacagtggtgtgaatgtggcatgtgtgttaagtatatgcatccaattatactctcttgaaaaaagaatcatttttaggaagagtacaacctatgccctacaacaattgaagcttgaatcaatatattttgtctcctacattcttaattaatcggagcatgatcagggcatcagtagcaggtaatacctaaaagggtactagtgatgactgatgaggtccacatgaactagtaagttaaaattatcatgtactaacacaatgttaagtacaaggaccaccaagaggttgagacttaccagtgaggtttaaaagatcccatcatataactattaatttggagacgtttcacatatacttgaaagttgcctaagtgtgacaaatgattggcatttcctttttaagtctttaagtctaaatacctcaagtagctttcaagcgccataaaaaatcacgggtggaacgagttaagaactaacctagcctggagttcctccatgaccttatcactccaagacagaacgacaaggcgatcatttcaaattctaatatcatgagcctagcctccctccggtttcattttaattgacgttttgaacaatgacacggtctacaagatatatttttgaccttatttttctattataatatatataataaataaatacatatttatttttattatagtgctttaaaagacaaatctatatatgttgttctagttcctttaaactaaatatttttaaagttattgatggttaaagttataaaagtttgaccttaaccttgtccaaaacgttaattaatatggaaccaaaggagtatcaatactaatatctcctttggaaacatgaatttttctctcaattcacgcgatcattgatctaattcattaataaaatcacatacaacttcgataaatttgttcattctaagggtccctttgaaacataggaatttcaaataatttggaacgaaatgtatcaattcctataaaaatcctataaaattaaatagggggaaaaactttgcttccattatttgagagtgcaccaaactggcacatatctctgctcctgtaccggtccaaagtcaaacgttaatacgttatatgcattctcctagcagtcgcctatacattactgaacacgcattcgggaagtacaaaaaaaaatcatataagtggtgtacaaactacaaataccacagttgtcaaccttttatttattattacgtatggttttttttttcaacctgatagcaaacacgggctctctcctcatgtggtcacccgatcattgacaaagaaaggtagattatacccgtttccagtttttccacctgacaattatatcacacatgatactttgttgtacaaagcaaagctctacttgagagttgagataaagggatttttgctaagattttgtgtaaatttatatcaaatcttagtcaaatcccctgttccaaacagatgatctcagataaaaaatactactatctttttcttcctattatacaatcacgaaacctgcagcatcagatcaaccttgaaaaacgcttatatgcatttcgttcgatcgatgatgctgcatgtatgtactactagctcagctcctccggttccactagacatggcctcccatctcggcggcgacctgcgtgccgtgcgccgacttgagcatgaacccgccgacgctgcggtccggcttgccgctcgcgtcgtcgtcgtggtacgcgtacgcgaacccgccgtggcgcgtctggtccatgccggccatctcgtcctcggccgagatgcgcagcaagcccagcttgttgagcaccaggaacagcggcgccatggtgaagctcacccacgccgcgatgaccaggatgaccactatgtgcgccccgagcagccggccgccgccgcccatgaacagcccgtacgggcgcccgggctggccgaagatctggtccacgtactccttgcgcgcgaacagcgccgtgaagatgaccccccacgcgccgcacccgccgtgcagctgcgccgcctcgagcgggtcgtcgaacttgagcctcgccgccagcgcgttgaggccgatgagcacccacgccgagacgaacccgcagatgatcgcggcccacgggtcgacgacggagcaaccggcggtgatcgccgcgaagccgccgaggaggccgttgcagacgtcgatcacgttccagtgccccgtctggagcctcttcccgaagagcgtcgtgagcgccgccgtgctgccggcgagggtggtggtcacggcggtgcgtcccaccgccgaccactgcccgtggatgctaccgggcgggccgtaggatttgaggatggtgaggaacgagccggggttaaacccgtaccacccgaaccacagaaggaagctgccgagcacgacgagcgacgcgctgtggccgcgcagcgccaccgagcggccggcgtggtcgaaccgcccaatgcgggggccctcgatgagggcgccccagagtccggccacgccgcccaccatgtggacaacccctgacccggcgaagtcgatgacgccggacccgaagagcagcgaccccgacgtccgggaagccgaggcccacccgtcggcggaccagatccagtgggacaccaccgggtagacgaagccggtgaggaaggcggagtagatgaggtacgccacgaactgggtccgctcggcgatggagccggacgtgatgcccgcggcggcgatggcgaaggcccactggaagaggaagaagctgtagtcgaagccgacctgtgggacctgcttgaggccgaagaagtgcttcccgatgaagccgttggacggcgccccgaaggcgaaggcgaagccgaagaggtagtagaagagcgcgccggcggcggcgtcgagcacgttggtaagcatgatgttcatggtgttcttggcgcggacggacccggcgcagagcatggcgaagccgagctgcatggcgaacacgaggtacgccgagaagagcaggtacgtcgagtccacggccgacgtcgtgtccgcgaactggttgcacaggtagtccgtcgcgttcgccgccgccgtgcccagcagcgggccgagggtatccgcgcacgttgccatcctcgccgcctcgacgcgcgctcaacacagactgtagaggagaggggaggagcaatggaagtgtgggctgtgggtggagtggggagcggccgcgtcggatttataggcgacgtggagagggagcgagaaggaatccatgacttggggggtgtcgttgttgattccttcaaagtgtgaagggcccacctgccagtgaatctttggctacctctgaaatgtgggacccctatgatttgcttgttgatttgtccccctcctgttcgtggtcgtagttcatcgaatcccgtggaatctctctataggcctactgtaggctgcggcctggaggctgtgtttagttttttgatataaagtttttgaagtacacgcatacatattttgaagtattaaatatagactaataataaaataaattatagattctgcttataaattgcgagatgaatttattaagcctaatcaatatgtcattagtaaatgtttactatagcatcacatggtcaaatcatgacgtaattagactcaaaagatttgtctcgcaatcccatatttaatgccttatgcatgtgtccaaacatttgatgtgatatttttggctaaaattttctgggatctaaacaacgcctgagtcgcaatacagtggtttgtactttcttttaaaaagtaaaaacgactgtttgtacatttcgtcctcctctatatttgtctatagtgaagcacttgttatatttcctcctctgtttgtacttaaactttctttacttttttaacaatattatttttattatatttccacttgtaacacttggaaatattttataatttctaaatctaattggttcaccatgtttctaaagaaaattttggttgcacgaaaagacacacatgaatatgttaaccaaaacacatgaaatccttcaagctttctgagtggtactatctccatttcaaaacatatgaatttctaaggccctgtttgtttcagtttaagattattataatatatattattgagctagattactataaactgaattataataagattataataaaccgatatagaataagttgttagctgtttgtttatctggattattagctgtttgctagttattagctatccaataattaaaaaaagcacctttagagtggattaccagattatagtaatctggcttatagattataataatctatcataataagttatctgtttgtttcagcttactcctaataataatcagattataataattctaagtggaatcaaacaaggcctaaattgtttaacaaacattgaggttaggtcatagtctttttttactttagtatagttaattttttgaattttgaattgcttggattccctaaacccttccaagcatatgattagctatgaaatcattgagataatcggaatgatggaaactactacttatattgtgatgcaattgaattctaaaaatccttatattttggtattcatggagtacttttgaagctttcaccaaaacacagggctacgaattgaacccaatgattaatgttgtgtttttcctgtaactctaccatcatgtaatgattgtcgctctgcctttttaagcggctggtgctggttgaacgggaaagtattttctgaacctaggtgagctgcacctaggctcattaccgctagatgcgcctcaagattcggacgtacacgatacccacctgctatatgtgagaaacctgagaaatcatcacgaatcgcttaatcgatcgggcggcagacgccctaggtgcagctgcacctaggtgtagaaaaaccgcgtccctgttgaacatgtactccctctgttttttaatagatgacgctgttgactttttctcacatgtttgatcatttattttattcaaaaaaatttacgtaattataatttattttgttatgagttgttttatcacttataatactttaagtgtgacttatatcttatatatttgtataaaatttttgaataagacgaatgatcaaacacgtgagaaaaagtcaacggcgtcatatattaaaaaacggaggtagtattatcgttcatggtacttctctacccacctgaaattttcgttgtctatcatcgaagaagatcagccgttgcacctcatgctcaaagtgcaggtgctcgcgaaaaagtccagcacgagaattcctggaaatcttttataggagtacgtacttctctaactgtcaagctaacctgtacaagtgtgcaccacccaagtaaataagccatcgcagctatctcccattttgcaccggacttttggaaaccacagatcaacgtatctcctcattggcacaccacctgtcgataggcagctcacgcacgacgatgcgaccatcgtgccgaccgcgagaccacggcgagaggcataaaaacaaccgatcccgagatgggcaggcatatcggcgtacgcacgcagcccggtgagacccgccgcagttggagcgcgcatcgccatcgccgcgagcccgcgaagtccacggcgccctcgtcggcggaacaccccagttgctgacgagactgacaggtgacagccgagacagccagaaaagaaaaacgaagccggctgtactaacgacatcaaaaagaaatgggagccccgtctgtttcagacgtaatggcaatggtaatactaattagtaataagataagctcccagttgacgctccacaactagccaatttccatttcgcatgttcgattattccccctgacctccatgccatccagtgtgcatcttccgtgtcccgaagagctgctcccgagtaaactatgcctgaatccagagtccggaaacacatatgcggtgtctggatctgccgttgacttgtggattgtgattaaggaagtgttctcctctctgtttttcgtctgacatcaccgtcctgctgccgattatagtattttgagtttacagtggatttggcctctcccctcatttgctgaatcttatgaaaatgttttagctgtttgctcctgacagaatagtgtgacctatcatgtgaaacgcgagcgcaattgtactgtactatcatgtgaaacggagtatttccgatttcaaaccgtattacctgccaaccgtttcatggtgtcaggggtacgcgatccgaggaggtcgtatattgtactcattgagcactagtttggcgtatcgtaacgttgagcttcatttagaaatcagaatgtacagaaaaaaagagttcgctgcctgtgattcagttctgaatctgatcgagctcacctgcatctgtgctcgagcgttggttcgtttcgtaatttattgcagcttgaattttgatgacagctgttactgtttctggacccttcgagatggcgattgctcgagctcgctacgtcaacaggagggccgttgaatttacccattttccacgcttgcgtacgtacgttgcggcggaggaatcggcttgctcttgttttcttttttaaaaaaacgcagatatattgtttttttactccgtacctctgatccaactaaccgtatgctgtatagtgtatatacagttcttatcttaatcaggaacacggaaatgtcgccgtcgtgatagggggggccgagaaatcgaaatgctcgagaggtgggggtggtacgtcgtgtggtaccgtgctgtattgtttttagttttccacgttctcatgatcgcctcctgggcagccggcttctatctgtggaggaagcaccacggagaggagcggagagggagggcgcggatcatcaacggcgagccgcgagccgcacgggaagcgcggcacatgcagatgtaggcaatggcgcacggcggcgcggcctgaagccctgaaccgcgcggagaacgacgctctccgtctctccgagtcccttccgtgcgagaagccactaccgcacggtgcgcgcggggatgcagccatgcaggacgaacggggcgcgcgggggagtgcaggccgcagtccgcagtccgcagggcaagcggtcataataggccgttcgcagaagcgtaaggaaggcctttcatggctcatctgtcacttgggggttgggcggctgggcctactttgcgattgggcctcagccatacgttccttagcggaaaaagtacaccaaaggtccctcagcttgtcatcgggatagaaaaacgtcctcgaaccacaaaaccagatatgcggggtctcttaactatacaaaaccgatcacgcgaggtccttcggtgattttgattccgattttagtctatgtggcagctgagtcagcgtgggacccacgtgggtcccacatgtcagactgtccacgtcatctctctctttcccatcttctctccctttctcctctccatcactctcttgttagggactctggtcaggccgacagccgatcgatgggtgtggaggagggggctgaggcgcagctgttgcgacgtggtaaattgctcggctacctagcgacggcgggagcagggggtgcggagtggcgtcggcattgcgcggggaggctggtgcggcgcgtgaaggtgctatcggcgggccgacgcagtgcgtgaagacgtggtcgacagcgacaagaggccagcttggctaggaggtacagccggcgactgtgcggagagcgggtggacgcgggaggcacaactacagggggcgtcggtggagcagtgtccacgcgtcaatggaggatggttgatggtggagcaatagagcgttagctatggatctacaagggaagagcgacccagtgtaaacctagcccgatcttggccgggccaccaacgatggcgctttgggcgtcgtcttccctctcagaagtgttgtcgagccatcctcttcctctaactaggctgccgcgtgaaaaccctgtcttggttctctctaagaccttgatggagaggagcagcggtgctcatcgtcgctcttctccctagagatgtcgtctaggaaggtcccttgccaaaactcctcttaggcagctggtgcatgctcgctctagatgtcttgtgctcttgtgacgatgctctaggttatgcaagtcgaccacgttggcgggccctaggagggagagtagttccttcttctctctcaccctctccctctcaatctcaaatacatggctagaattgagatcggtggtcaaccgtagggcttggttttgggcggtcttagctgtagtttgcttgttggtctagtggcgaccaatcacgctttgcgatggtcggtccagtgcaagctttctcctgaactatgtgtatttgttgttagtgcgtggtggtgaaatttttttcttccctttcctggctactgtcttccaagatactagccttgtactactattcaacgaatcatcgtgttgtctggtggtgctgatcgttaaaaaaaaaacttgtagtactactatagcagtagtctagtacaagctagtttctccataggaggatactttggaccatctcgcagcgattctcccaaatggcatatgccgagctccacgttaacatcataatgacctaaatactgatacaaacaggacacgtctaaacatgtacaagaaagccacaaaaatccatacaggtgcaaatgcagagaagaaaggaagcaaatatcaaaagaaagccacaaccaccatgggctgaagtgccaccacgcccacacgactgcctcagcttatatatgcacacttcacaaaacactttccccaaacggacacgatcgatatgatcctactacacaaactggcccgccgcggcttgctccggcgactttctgggctccacgcgagccgtctccgccgccgacttggccctgacgcggcgctcgccttcgtcctcgtccacgtacccgaacccgccgtggcacgtcgggtccatgccttccatctctgtcgcgggcgagacgcggagcagcccgaacctgtgcagcacgtagaagagcgtccccatggtggcgctgacccacccgacgatcaccaggatctgcacgatgtgcgccgcgagaagcctcccgccgccgcccatgaacagcccgtacggcctccccggcaccccgtagatcagctcgacgtactccctgcgcgcgaacagcgcggtgaagatgatcccccacgcgccgcacccggcgtgcagctgcgtcgcctccagcgggtcgtcgaacttgagaatcagcgacagcttgttgcagccgatgaggacccacgccgacacgaacccgcagatcaccgacgcccacgggtcgaccacggagcagcccgcggtgatcgcggcgaagccgccgaggagaccgttgcagacgtcggtcacgttccagtgccccgtcagccatctcttgccgtagagcgtcgtcagcgcggcgacgctccccgccagcgacgtcgtcacggcggtgcggcccaccgccgaccactgcccgtcgatcgtgcccgactcgccgtagatcttggagatggtggtgaaggaccccgggttgaagccgaaccacccgaaccacagcaggaaggtgccgagcacgaccagtgaggcgctgtgccctttcatcgccaccgtgcggccggcggcgtcgaaccgcccgatgcgagggccctcgatgaaggcaccccacaggccagcaatgccaccgaccagatggacgacgccggagccggcgaagtcgatgacgcccgacttgaacagcaacggacccgtcaaccggccggccgaagcccacccgtcggtggaccagaaccagtgcgacaccaccgggtacacgaacccggtgaggaaggcggagtagatgagatacgcgctgaagcgcgtccgctcggcgatggaaccggacgtgatgccggcggcggcgatggcgaaggcccactggaagaggaagaagtcgtagtcgtaccctgtctgcggcatgtgcttcagcccgaagaactgcttcccgatgaagcccttggacggcgtcccgaacgcgaaggcgaagccgaagaggtagtagaagagcgcgccggcggcggcgtcgagcacgttggtgagcatgatgttcatggagttcttggcgcggacggagcccgcgcagagcatggcgaacccgagctgcatggcgaacacgaggtaggccgagaagagcaggtacgtcgcgtccaccgcggaggaggtgtccgtgaacctgttgcagatgtagttggccgcgtcggtggagttcgccgcgccgccgagcagcggcccgaggctgtccaagcacgtcgccatggtgtgtctcactagccaagtgtggcaaggttttgtgctgcttcttgctagggtttaggaactaatggaggttttggtgtgtgattctttgaagtagacgagagaatgagatgctggactatttataggggcagaacacattggaatccatggttgatggttgtttttaattggatgattcgtgatcacagacagcgggaaatgcaaaaccgaggtgcgcgtggatgcatgtatactgttttggattccttctaacatgggagtggattctaatacctcaaggggatatcccctcgtatacctttttcttccaaattcgatgtaaatagctatggaaaaaatctgaaaaaaattaacaatgtagagtataatgatacctactagtccaccaaaattcatattcaaattcgatctacacatcgagaaacaaaaaagacaaatttagatataaacagtacgctactattcatacgctgaatttgtcttttttatatctcgaagtgtgagttgattttggacttaagattttgtgaagttgtatatatgtgttgtatgaatgttgtcaatttttttcagaatttttcataaccgtttagatggtttttgagtaaacgagggaacatcccctcgagggattagaatagtttcccttctaacatcacatatactagtgcctgaaaacctttttttttcttttttgccaactgcaatgagttgattaatttttttagtggcagcaaccaatcttttcatccaacaggtgtgatgagtaaaagaacgagcagttcacctctattaatgaatgattgaatattactgagataattttatcatccttaagaatacattgcagataccattttttaatgtaaaatttggcacatacaattacttttttttagtgaattaaatttctcttgaaataaaggtacgctgcaattttatttttttgttttgaaatttcacaaaacaagatttttaactgatcttgatatcatatttagtttcatgtataggttggttcattcataaatttaagttcattgagaaagacatgtgattcacttatcttcaaaaattgtcagtgatgatttaatttgttacctagacgtctcggcgctggtgttgtaagactgttaaaattatcccaataggtttacactggttttgcgacagtgatatttgttttgtttttacttaagtattgtcttgacttttgatgatgagcgactcaactagcctgagttcccgctttgctcagaaagtttcagacatcagtaatttatgctgggttgggagtatccgacagatccaagcaaggtcgcatacgcaagatgccagattcaactaagatccaatgtcactatcagaaagtcgtgttgttgccatcacagctaagattcttttatgcattcaacattttttaaaggaagattcagaaatgttcttgttattatatcgtctgaagaatcgcattttgtcaacttcaagtattacaggttttaatctggtatctcctcgcatccttgcacgaggtagttgcttgtcgtcacgtccgactatacgcatactgttgtgtcatgaagttgcatatatacaaccatatacttgtatgcgtaatatccattgactttgttgattaactgtttaagttcttcaggcatgcatgtaaacccagcagcggataggtcgtacctagcagaacatggcgacaaaactcatcaatcgagatggtatatgatgtgtgcaatgcgtacttagcgaacgattagatattcgataaggttattggcacaaacggagataaacccatttgcttccataccataccggcggcttctgtcttggaagaaccttgtgattaatttgcctccctgaagaactcgtgtctgactgaaaccatgtaatcaacaggtagtccatgctaaacctgcttgctgactactgagtactctgtaattgtcaatcagatctctgtgttggtctggctacattaacctgtacgatattttcactgaaactatatgttttaactcactgcaaatttatgttgtttgtcttcagaaatgagggtgtcaacatagattaaccatgtattcttacttcttggcatagcagtaggtaatttcttccagtagaataaattcagatgatgaagcaattccttaggtcaaaactctgacaagactggataagatgtggtggatagggacgcaattgcttcttccttgcaagtatgacttgcagatgctgcgtatctaatttttacactctggagatagatcacgctgatgcgattaaatacctattgttttatacttttgtcgtgcctgctaccacacctgtatgcatatcagaaggttgaccttcagaagttcagagaatggacggatctctagtaaacgaatcgccattggacggaaacgagtgtttcttattagcaaattgcaaaccgggtgtcctcagcgagacgttgatgtctagtgacaaatagttttcacggatgagataaactagtcttctcggctccagggatcaaatgtcaataaacgccaccgtaaaagattttttttctcttcttacccaaatgctactcttgacttattgataaaccaatgtacagaaattgtactgctcgttaagtttatgagatatactagtcacggtttctgccttctgccgcagctgatttggggatctctctacgttactgttgtatgtgtatttcagtcacccctgaacttatctgaagctttgtaatgcttttctgaaacttttcacgggctttgtaattgatggaggcccaatttcaggcccatttgaactgcacttatctttggtcttggcgtcttgctcacagctgggccacatctgttcatatgtagtatattttttccacctcggatatctgcagcgcgcgcgagagaggaacagagcaactcgccaacaagccgatgacgacaacgcaaagcagcctctgttcgcatcggcgatgacgcgaagccacaaaccgcgaacgcgaccgatgcatcgccggatgcggccgcgcgcgcgagccgagggcccaacgcttacgtccacccgcgcgcacggagtcgtggccgtggtcactccaccacagctgcacggctgggcggttggccggttgcgcagcagctggttaaaattggctgcacggcggcatcattcaaggcgttggagtacgtagacaaacaggttcccggtcaagatccggtagctgagtggagctccctggtcaggtgtacaatcttgtgcggctatcctaaacagcgagataactttggatgatgtcaaacataatactgacattgaacaaaacagctggctacaaaaaaaaacaccttaattggctagacatggtaatttaaccctgcgcatcaaagcaaagaaccatggcaactactactccacagtccacacatgtctcaggcagaggcaggcgacgacaaagagtacagcagcgtattcaagctgggaagcgacagccgacaggcaagggtgctgcgaagaaacagtagctcctgcaaaccgtgaggaccggggtaatgcagggtctgcgggtggcacaaaagctaccagcagcacgaatgcgctgggaacggggagggcaccacagcaccattcgtgctcagcctcagcagcagcagcacaactcgcaacgatatccacacaaacagagtgcccggccaaaaccacagaaaaatcaggggaaaaaaaatctcatgctgatccagtgatcctcctgccggccggctgccagagatgagagatgcaaggtatggtattcatccattcgtcagtcaaaaggcactcactgaatgtgagtgaatgcacaccgagagagagagagagagagagaggcatgaacagccacaggacgagtcaaagtaaagcaagcaacttcactcgctcacatgctgcaacaaccacactttcggtggcttaagtgaataatagtaggccggaccacctgcttctagggcagcaagacgcccgggcggccggccatggctgcctgatcacaggttcagaaaccaccactgccacacgcacacacacacgcagctgctagctagagtcgccgaccgacccatccatggctagttgccatggaccatgcgtccaacgaaccatcaattccgagctctcaacctagtgctcgatccactagctcgggggaaccaaatagctgctactaccatccaaggattcggtatattctcttttgtaccatacccccattttccctcctgcctgaatgaaacggattgtgtggctagtaaggctgtgtttagtttacgctaaaattgaaagtttggttgaaattgaaacgatataatgaaaaagttggaagtttatgtctataggggagttttgatatgatagaaaaatttgaagtttgaagaaatattttaaaactaaacacggcgtaaatagtgttgctatcggtgcgagtaaagacgctgcagatagcgactgacaggcaaatcaatgaattggccatttttcatgcatcaccatctcataattttatttcgtgtgatccaatccacttatcactcactgatctatgtgcaatgaactaagtccagaaaatatctgggtagctgcactttggtttgtttgatttgtacctaacttctaattcatccattggaacaattataatgtttttaagcagcgataactgtgcgatagacttatggttacatgactccaacttatagaatctaaatcctactccctctgtcctattaaaaacgaatctagaaccggatgtaacatacatatgtccagattcataataataactaggatgtgtcacatccggtactagattagttttaatgtaacggagggagttggacgacatactcacatattagttcattttcaatgaaaatttagtgggaccaagtaattgttgttagttactccctccctcccaaaaaaaccaaactactccctccgtcccaaaaaaagacaaaccctggtttccgtgtccaacgtttgaccgtccgtcttatttgaaaaaattatgaaaaaaaattaaaaagacaagtcacacataaaatattaatcatatttttatcatctaacaacaatgaaaatacgaattataaaaaaaatttatataagacggacagttaaagttggacacggaaacctagggtttgtcttttttttgggacggagggagtagtactgaatgtgatatatttgtccagattcgttgtactataatatgtcacatccagttttagattcatttttttgtgggacatagtgagtatgtctctttatgcttgtgttatggacgcactagcttgtgtatatgtgcgttccaagtaatcgaagaaaacaattttgaatacttttgattcctcttaattggaatctcaccaatttttaagtaccatcataaaatgacacttccgctctaaagttatgacggcattatattttaagcattggcccaaaatacaccaaatgactaaccatgtgcactgaaaaaggtgtcatattaacattataatgctgtgaaatatctcctgaggcacttagccccattactcatttttaaataaaataattcaaatctttaagctgatgttgaaatagtttggctatgtttggcttttttggagactcaaggtgtgattggttagggatggtaaaactttacatagtaaaaacattattgcatattttagattttgttttcaaaaagaaaatagttcatattgcatcagggaaatttggcaaccaatgaaaacaaccaattccttcaaaacaggctagagtatcgcgtctatagctttgagattttgtattttattcaatatagaaatttggttgcaccaagaaaattataataaaaaacaaccaaagtattaatattttttattttatactttaaagattttggttcaaaagaatagcggaaaaccctgatggaaagctcaaagcgaagtcccgctaatatcgagtattcgagtctcacttctttattattctgaaaaacctattatccacaccactataattgacatggcataattaaccatgtaacaacgcttttatgttgatatactgaaatgccataatccttgtcgcaccaatttttttcacggcgtaaaagtattatcttacggtaccatttatagttgtgttgttgtaaatgttcccaatcgtacataacgtgtagaagggtttatttcaaaatttgtttagaataacgttcagaaaataaaattttccactgccttcgcccgagagcaggaaaatcaaatgcacctacaaagagaaacggcgcaggaaatgaaaacaaaagacaattaatggagtctagtggcgccggtcaaagagagcattcaaagtggattgcactcggaggaataaacaagaatactttgaacagcccctgcattgaccggtttttggggctcctgaataaccactagcctctcaggggctagatgcccctgccccctcgcacaccattttttttttacacgcagagaagaagagacattatcacattaggcacgggcttaattatctagcaacaaattagctacagaatgaggctaagcgcagtcaccgaactaatcaggaagcgaattagtcaccgaattcggcgagggagagagatcgatcgacgacgagacagacgtcaagatgaatcgaacttgtagtacttgtcgacggcggcgaggacgtcccaggtgcagcttagccccttggggaagacgacgaggtcgccggcgccgaactccacgcactccgacgagcccttgatgtgcgccctcaccttccccttcaccaggtagcacgtctcccgcgcgtcgaacttcaccgggaacttccccgtcgggcaaccccacctgcgcacgcacgcacccgcccacgcgctcaattaaacacgtacgccatgaaggagcaggaaatggacagcgatcgatcggcactgtggcgactcacttgggccaggacttgacgcctagctggagcaggcgcgactccggcgggttgcgctccacggcgatggagagggtgccgccgccgccgggagggtccgtgtccatggtgtccgggtttgagctcgaggccatgagctcgcgcgcgaggtcgaggaggagaggagggagaccgggagagggtgagcagtagcttgcagttaggagtaggaggaatgagttaaggagggttgtgtcagtttgggaggtgagatgatgagttcttctacttctagttctcgcgaggggggaaggctccaagagagggcagttggactgatggctttcctgtatcaaaacaagggcaagaggaatctccttccttcatgtttttaatatatacaagtgtgtgcaataatattatattatttttacccagcatgtgtatatcatttgggacaagtcaatattatacatatttttttctgaatggaaacaagtcaattttatcctcttcctatgaggccaaaatagctctatgttgcttactatctctgctctaaaatatactatatccgttttaaaatataagtatttttagtgataaatctgaagatgtagttatccaaattcatactctctttatcccaaaatataagaaccaatgattggatctaatatttcgtggtactacgaatctggacaggctgtccaaattcatcctatccaaattaatagtcctaaagaatatctcattcaatcctaacttcttatattttgagacggatgtaataactaaaagtttttatattttgggatggaagtagtaaaatattttgcctatgttattagatggacaaaatcccttatattttagaaaggcgatattaccttttatgagagaattttctcttatttgtactcttcatctaaaatataagtatttttagatatgtgtagagatacatagccagaaatatttatattctaaaccggagggagtagtagtattttgatatttgtatcaaaattagcattaaacacatatccatgacacgaacatatactttggtttttttttaataaaacttgtttggaaatgagatatattatgtttttctaacattttttgtgcctgcttgattgctcccgtacaactgtttgctacatgaaacagcaatgccatggcttgctgttgcagactaataagctgcggtcagacagccaagagccatggtgcattaactttgtgcaaataagatagtgaaaaattaagttattttggaaccaagggaatattattgaaaaggaaatattcacacaacaacttatgtatccacaacatttacctattgttgttttaaggcccaaccctacttgtcaatgtgatagcaaacataagtgtattctatactcctatattggtaatacttatcaaatttgattttttcacaaacatgtggcttttgactctttaagttttaagtttagagatataaatgcgaaccactctgaatgtataacttttgttaggtacattacaatgtaaaatgacacttttatgttgcataattagatattttaaatgctttacgttattattaaaagttgatcagtcaataagaggagtaatgcgacatcttatctacctgttctatccttgtcctatctaatctttttctctttacgtaaaactatgtacctctttgaacttgtggctctaaccacctccaaaccattcagttcttaaacgaattggcgagccgccaaattcaataaatagagcagaaaatattgaacaaggtaaaaagaaaataaaaactatgtacaactattcctggttgcccgggctaacgactaaggtagccattgaacttggtccttaaccatttagttggataaagttgaatttgattcctaacacattctattatgcaaccggtctagcaataatatattgtggcaatcagtctagcaagtatcgttgtttgaccgatgaaactttagacattatttcgtcgatcaatcattgcatatactacattacccctagcaacttagtacaatatatttatatctattgaaaatttggttgtggggcggataacaagtggtcaattctcatggaggccacaccgttcatcgcacatgaaaagaaaaaccgtcgtcatatgaaacacatgcttagacagcttagtgaacattacataaataaacagagacatacagtatcagagataattgttgagctcggggggcaaagaaacaactctcagccggctgcaaacttgaaagcaacctccaccgaatttgtcacgagaagaacgagacccaccgaccacacaccacacaatcacacaccacgccaccaccggagaagcggtcaaaacagctagagctcgcgatcaaccgcgagccgcgcgacgacgaaggggttaaaaccccgccgtccctatccgcttcgctgacgtggcgcctcgggcggggcccaccatacgaccaggccattgaccgccagcccccgccggcccgggatcccgtgcggcgacaggccacatggcctccttccttccttccccccgcccgtgcgggcgggacacgtgcggcggacgggaccgcgagatgcgatcggacggctggcttggctggcgcggcagcggggccctctgccgggcgaactggcctatgcgccgatggacggtggcgatgcgacggcttcgatggatgaggggatgatacacccatccttttcccctgttcgtacgccgtgctccccgaaacatgtggggccagtgggcgcgcgacgcgtggccggcgccggcgcagctgccggagggcgcggatcgtttgtgcttttctcgcggcggcagcgtgacacaagacgacagagagtcaaacagggcgtggatcgcgcttcagctttgagtttgcaaatgaaatcgtagaatctggtatgattcggtacaatacgacggaattcgagttaaaacaacgaaacacgaaatgcccgctttttgtaacaaactgttggtcgggtttaggaggggcctaatcaggaaaattgcagggtccattacaacaagccaacaatacgccagataatggcctacccgcggcaccatggcagttctcccctctgaagagaaactggttgaacaaccaattctttattacagtatcttttgtcaacatgctgttcaaccaattctttattacagtatcttttgtcaacatgctaatgcaatgctacattagggtgtgtttagttcctgaaaaaaattggaagttcgaagaaagttgggagttcagaaaaaaaaagttgaaagtttatgtgtagaaaattttttgatgtaatataatatgatggaaagttgataatagggggaaaactaaacacggccttagtatctggattccaaatctttcaggtaaaattgtttgttcacacagttgagggagtcagctactaggttgtagcagtaagaaacaagcaatcccgcagaagtgaagaatcgcgtcacagaactcagaagctaagtggtaacagaaacatagcacggatcaaacttcaagtttcaagcaggtactgtcaattagacgctacagtgacgttttggttgaaacttgaaagatttccagcattgcaagttcacaaaacaacagatcagcggcaaagctggagccaagaacgaggaccagctgctggcggataaacagttcacgcaagtggtagatctcggaaacaagaaatggaatgataccacaacttgacgtttctcccttggtagcagtctaacaatcaatcaggcaaccagcagtcaaatgcagcagccaagtgaacgtgaaaacagtctcgtctttcattttcacctcgtctagccaaatatcagaggacggaatatctgaaaatttattttcaccacttttctggatgacaaattcaactgatggacaaatcagaaataatattcaatagcacattcaatgtgataatcactttttcgcggggccaataggataatcaatatagataaattctaaattgcagatcttgttgacattgtttcagtcagttagaagcaaagacatgcaatctcatatggaaacaatcattgcttgaacactctcgcttcagaactctagatggcatagcctcatggtaaacaaaatgagggctgtttttaggctacttgcaagttagaactaatttcaagagaaattgatcaaatctaccataggatccccaaacttttttttgttgtgaagtggagatagccactaccagtactaccaaacagtttgtcaaatctattaaattggcatcaaatcatccccaactgtagcacaattcaacccaatagcagtttggtactcttgaaagcatttaatattactaatcaacaatcagaagcagcttgttgactcatgaacgcactttacacccaacatcaacaccttctagctagaactagcaatgtgacatgaggctggtcctttcccgactgactccaactagtgctcatgggttacaaacataaaagtatttcctctgcaatttcagacagaaatttgcgtggtagagacttttatttaggttaattcgccgtgctaatggagtttccactgcaacgccactactgattggatgaggctgctaattatcccattgcaacagtacgtctggaccctccagatattcctgttgtggaaaactctagcaggaaaaatcgaagccaatcgatcaatgtgacatcgacgttacacccacctgcttccaacatcgcgcacattgaagccaacatatataaacaaaaatctatcttgtgaatcaaagtactacgagaatttaagaaaacctcgcagagattggtaccaatcaagagccaaaagcactaaccaagcaaccaacaatgcaggcaaggcatagagattcaaaaacatcggcagcaaaaggtacccagattgatctcacgacgtctcgagatacatgaaaagaaatctaaccgacgaactaactagaagaatccatcaccatagagacagatcagcctctcaaacttccaggagagccccccacaagagcaccggcccccacacgttaccgtaagcgcctcaggcgaggtcggtgtcgtcgaagtcggcgccgtcgaaggagttgtagaagccggcgaaggggaggggcccgcgggcctcgttggcgcgggccgcgcggtggccggggaagacctccgcgtcctcctcgtcgtcgaggaagacggcgccggcgccgctgctgcggggggagtcgtcgatgtccatcagcgccgtgatggcgtcgtcgtccatgtcgtcgtcggcggcggaggcggcgggatggctagggtttttgcgggaccactgcggggaaggaaggggaggagcggggtggcgagggcggagagggggaggagggcccggtggtggggcgcgcccgctgcggtgccttggatgggggcgacgcgtcgtcctcgactccatataaagttgtgcttgtgccccccgagttctggagatttgtgcgtcgccttcgtcgtgtgccacgagtttttttgttttgtttttaattttatttatttattttcccttttctttttagagtgacggcatcaatgagcccctttgccttccgatctctgggcctatttgggctggccgcgtcgctaggccctctcccctgttctacatgatgctatttgtgaattcttcttttttttcatacggatttgctcgacattgttaaaaggtaattcatctcatcacctgccaaattttatttggaatgaataccgtcttccttttctcgttgcgttttgtgattgtctcgtgtgcgtttgggcctttggggatgtgttcaggccttttatgtgaaccataccaaaattcggtcgcactgagaaccagtacgtgaacaatacgatagtggttctatccggccatccggagaaataaccacgtataaaccaattatggaaagcccatgtactttacgtttacgtacaaattgttcggaaggaatcgcagttcaggattacattgaagatctgcattggcggtactcagttagcaagagtccaaacatataaccagcttatcccgtgctacgaaggatagcacatagcaggcgtcctgttatcgcacaggtcgcataaaagtgggagctactaatacttctttaagacattcacaacatcttgactgtcttctgttctggcagtgaaacctgcgaggcaaggtgctaaggtagtgagtaaagattacggcaaacgagcaaatgcacgcacaggaaatgtggcgagatagaggggaaaatggattacctgatgctaaccgcttgtggtgtccattgacgttccaatcaatttgatcgtcaatgttctcaacaatcttccttttcataccttccagtttccgctgaaatagtggtattacgttcacaagatctgcaggtatagcacagttagtcaggcatgttctgaaccagagttaaccaggctgcccaaaaatcatacttatgaagaatttactcctttgtagttagtatcgagatcctataaacaacattgaactgtatttgtacgtgacataaacaaattaacaaaagcagattaagaaatgtcatagaatttgggcggcgggcaagaatattttgctttctgaaactcaaaattgttgatgccagtggctgaagcttactagttttttaaccatgcgaagtaacccataaccaatatgcaccatacgttacaattactaacaatctgccatgtagcatgtcaattgtcaaacaaggtgacaaggaaggatataacatcagcatcatcacaattactcaaattatgtcaacaataattacccaaccataagtgaacaggttggagttctgatcacttgaaaaattcaaaattgtaagccttatttcatggaaaggcattggcctaaataaaataaaagtcttttaatgccagcaatatcgaagtgaaactgcagcttaagcatgccaaataactatttgtgaaaaacaaaagcagcgtgaaacttaattgatgtttaatcataatcaaatggcgtggatttctcttcctcctgttgtacacaactactgaatctaatgtcataccttgaaaattgtcttgaaaggccttgctttcaaacaccttcaataattcagccatagaggaatccaaatttctctggcactcagcttgtctttctaaggaagaaagctctttttgaagttcttcagattcattgttagcctgatgaaacaacatgtgtttgtcatataaatgcagatatagagaagctaattcatttaagtaagctgcttacatcttcaagttttttcctaagagaaacaagttcagcatcgagatccgaatcagaattcccatcattgagtgatttttttgcaggaatatcctgatgaagaaaacaactcatgtttaaccatcttcatgacaccattttttgaaatagaacattgaagtaaacataaaagtaaagcaaggtttcaggaaacagaattgtatgttctgcttcatcataagaacatatgaaaatgaagactgtacaactttgacacaatatgaattccaaaagaaacatgatgtagtataattaaatatcttgacttcactaaatcaatcacttcaacctcacaaaaaaattaaataaaccaatcacttcaatatgaggaacatacatcttcacgtgtcaggaatccttcaggtattgcgaaacaatgtcgaaggcagtatttctcccaattgctcattctcttatccaatacatccttcaccaagttgtgaatgctgattacaccctaaaaagaaaatcataagaagaactatacttttcagaacgttcaagctggactggtctattgggggaaacatgtgccaattgacaaacatatgaacgatatgcaatagcttccagaataaaatatactaaaaacattactgcaccatgataaaacaaagcaattgttattaaatatgatacatgataactcatagggctactaaatcattagaagtgttaaagtaatgtaatgcttccaaggagagctagcctgataggtccatagttgcttttgaccacaataagtggtatcttttttttaaaacaaaatgaacaatatccattccatagttctgaaaccaaatgaacaatatccattctatagcaaaaatatgaaaacagagaagctaacaatcgaaagaattgttatctggaaccatgctttgctttggtatttttctagctgtttcaatatttacactcagtaatccatttgtgttttaatttttctttttagaagataaatcattgattgacccagctttacaagaaagccacacttagtaattcatttggttttaaatttatgcgtagaaagtttccgcacaagtttgtttatcaagcatatatgcaaatagaaacatatgtgttttataggccattgcaaagtggtactgatggtctgatactacacactgtgcagcacggaaaagtcatctgaattgaaaaaagaaggacggcacgtcacatcctgtacaaaaggggctacaaaacaagtaatcatagttctgcagctgaactgctgaaaggcacatccacatagccgcataaattcctttgatataggatccaatagccagcttgagccttgaaatgaaccaaaattgatcaatgtctactagtcataaccgctggctgaccccgataaattggtgaacgctgagtctgagagtgctaaggctgataaattggtgaacatcacgagcgctaaggcaggtgaagctaccctaagactacgatcaagcattgttaagaacccgacgcacaaagatggaattcgtctaaaaacacaaccacaccatacaagacaccttctatcgaatcgtggaatgggaaatcgcgttccagaaccggattatttttttaaagggaaaaaaactgagggggccggcacgcttcatgaaatccagtggttggggggggaacttacccgctccagctcctcggccttctgggtcgccatggcggcgccgacggcctcgggggcgccttccctggagaagagagaagaacagcaagagggcaagttaacgaacaaccgagcagcgaaagagggggcgagcgagaaagggggggaggagaagtagagagggttcggtagccttactggaggcagtactcgaaggccccgtagcggacgtcgtcgaccgcgttgaggaccgagttgacgaagaacgaggcgctcagccccagcgccgcctccacggcggtctcgtcgctctcctccatgcctggtatgagggggtcctgagtggtggtggtgtgggtcggcggacggcgaggggagcggcggcggggggttgggcttgggcacccgcggtcgccgccgacgacgggtggggggaattcgaaattttccgcggccactttttgggaggaaaggaaacagatgcgcctctctcttttttccagagcccgagctgcacgacgccactgttcggcggccgcaggtgggcttaatccatgtgtatatgggcctagttcgacgtcagttgtgggactaaagccttattacgcatcggaagttcagaaatggaaaaagtacacccaaggtctctcaacttgttatcgagatacaaaatcgtcctcaaaccgcaaaaccagatattccgcgtcccataactaatcaaaaccggtcacaaaaggtccctcggcagttttgaccccagttttatcctacgtggctgctgagttagcgtgggacccacataggccccacatgtcagcgtaatccacgtcagcctcctctctcttctcttcccccgcttctctccctttactcatatctctctctcactaatctgcaagctagccagggcagcgagagaggaggagggcagcaccgcaacggcgacggcggtggccgtagtggggaagcatggcggaggcgcggggaggccggcgtcggcgtcgcccaggcggtggcggcgaggcgctgggaggccggcgtcggtctcgcccaggtggtggtggcgaggcgcggggaggccggcgtcggcgtcgcccaggcggtggcggcgaggcgctgggaggccggcgtcggtctcgccctgacggcgcagcggccgtagttgggaagcacggcggaggcgcggggaggccggcgtcggcgtcgcccagtcggtggcagcaaggcgcggggaggccggcgtcggcatcgccctgttggcggcggccgccgcagtggggaagcacggcggaagcgcagggaggccagcgtcggcgtcgcccaggcggtggcggcgaggcgcggggaggccggcgtcggcagcgccctgacggcgcggcggccgtagtgaggaagcacggccacggcggaggcgcggggaagccaacgtcggcgtcaccctgtcggcagcgcccgcagtgggaaagccgctggtcgtaaccggaggtggcgaggggggaggagttgtcggcggtgtcggctttggaggaggagcgcttgtggtcggggtcggggacggcgacggcaagggagcacgggaggcagagggtgaggatggtgtcctcgaagtcgagccccgatgccacggacgactccgtggagctccgctccgtctccttcgatgcggcggggaggagggccggcgtggccggcggctaacgaggaacgagcgtggtggagaggagggccgtgcggagccattgtcgtggccgcgctctcctccgtgtcctcactaccaccgctggcgagccgccccttatggcatcagcggccaagacctacctctgccgcaagcacgatcccaaccgtgccgtctccctcttcaaggccatcgacgacacctccctctcagcctcccaccgagccgcaccttgtcggtgtcttctgctcctacgccgccgtgtccctccccgagaaggctctcgccgccttccgctccgccgcgcagagctcggccggggccgtcctcaacgaccgccactccccatttggcgccgggtgcatcgagaagagagggaaagagaagaaataaaagaaaagataaaaaataagaagaaaataatgatgtggcatcctgacatgtgggacccacgcaactcagctgccacgtcagataaaaccggggtcaaaaccaccgagggacctcaaataaacggttttggaagttaaaggatctcatatatctggtattgtagttgagggatgattttgtaactggacaacaagttgagggaccttcggtgtactttatccttcagaaattttctaggaaaaagtgcaccgaaggtccctcaatttgttatcaggataaaaaaattctcgaaccgcagaatatacgcggggtcccttaactatacaaaactgattacccgaggtccttcggtggttttgaccccggtttttgtctacgtggcggctgagtcagcgtgggacccacgtgggccccacgtgtcagcgtgccacgtcatctctctctttccccattcttttttctttctttactccatccaggcggtgctccatggaggccaatggctggcgtcgctaggcggggctcgtacgcgaacacccagaaaccagcgccggcaccagcgccgccgtgatgcgcgacaacacatatatgtgggttgttgtgttcgtgtatgtgagttgggaactcattccctccacacgaaaaacggagcggtctattagtgcgtgattaattaagtattagctaatttttttccaaaattagattaatttgatttttttaagcatctttcgtatagaaacttgttgcaaaaaacacaccgtttagcagtttgaaaagcgtgcgcgcggaaaacgagaaagaagggttgggaaaagaggatgccgaacacagctgccactcctcataggtacacatggcttagttcactttgttgtccgaatcaatcatatcaaattttagtaattctatttttttataaattttagtgttgactttgttttgatgccttcgctaaattttattttgatagagtttttagagaggaagcttctgaaaataccaaaatttagtaagatagcaatggttgatatgtgtctagtttgtcacctactttaaaagcggcgacaaactgaatagtcccacaatttgccacaaacgtggccaatttgttatattaggtccaactcttttttaagagtatcaaagatggatcgagagatacgatccagctttctaagaaaacgaacagagtagggtgtattaggcaccccttttttcagccccttccccttatttttcacgcgcacatttttcaaactgttaaacggtgtgttttttgcaaaaagtttctatacaaaaattacttaaaaaatcaaaataatccatttttttaaaaatagctaatacttaattaattatgcattaatggattgctcagttttctatgcgggagggactagtttccatccctaaaaccaaacacaggctaaaactgtccgacacaacactcacaacataaacctaaaacacgctgctgtgaatttgagcttacattatcagcaccctaacaagcttaccaccaaaacaacaattccagaacccagctattgcgtgttttcaactcaggttatgttcggtaggaggggttgcaacattactgtggctacaactacagccagacatgacacaaacaactgatgttggcttacagttgcagccacatagctacagtaaaaaagagcagctgaacatactctacatgtctaatgaaagaacatctattgatccaaatttcttcatctttcagatttaatcttcagttagcttttatccaacttgcttgcaccttatccctttttcaaaccctttcacttttgtaagagagagatcattttatataccatctgtaaaggagatttcacaagtatatatgctttccaagacataatcatttcttccagtccatggaccctactccctccgtctcataatataggagtagtaatctagaacagacactttatagtacaacgaacctggaaaagaaagcatgttcggatctattgtactatgaagtatgaagtgtcacatcctatactaggttactatattatgggaccgagggagtaactaatatactccctccgtattttaatgtatgacgccgttgactttttgataaacgtttgacttttcgtcttattcaaaaaatttatgtaattataatttattttattgtgacttgatttatcatcaaattttctttaagcatgacataagtatgtttacatttgcacaaaaattttaaataagacgaatggttaaacattagtcaaaaagccaacggcgtgagggagtagttatcagtcatgtgataacaagctcaaccatgcattcttagggtttctttggagcgttctttttttaattcctatagaattatattattatgccatgcatagtcatgtaaaactcatttgtttcaaaagagaagccactgctggttataacttccatgttaaaagcaccacatgtgacaaagctcccacgaaattgacgtggaaacgtcaaacgtgaactccagcaaattagtgaaaaacccttttctccaccgtcgtgctagttgctacgctagaggtcagctcgctccttgcctccgctttaccaaaaagggcaaagacgagtcctttttccgctgccgggcgtgcgtggataagccgaagcgcctcccccccggccccaccccctcttctccccatcacccgcgttgtcctatcgtcgcagattcacaggaccccaacctttcatggcttattcggaatatagatagtaaaaacgaagaaatagaaaaattataggaatatggtaggattgtatgtgtaaaacagaggattgaaaaacataagaatttcttgttctccgtgcgcaggattcttacaacaaagaggctaaagtggattctttttttccttgtgaaaacatgggtagggaatagtattcctatggaattcaagatagctaaccctttcaaacgaatgcatctatagtacccagttcaaaggaatcatcaatcctccatttttttcttcacatttcctccattccgaatgagccctcttcctgtttctctcgcaagtggaatctccagccgtccagcgttaatgtggatagagatagagaaagagagtttagggcccctttaaatcgtaggaatgaaaaaacagaggaataggaaaaatacaatattctagcaggaatacacaggaaaaaaacaggaatggccgtttgattggaccacaggaaaaatgcaggaatcagatgagagagatggactcaaagtaaatgttccaagaggttagacctcttgctaactttcctccaaaatgtgcataggattgtccattctataggaattttaaaggattgtataggattcaatcctctgtttcaaaggtcttcataggatttttttttcatagaattgaaatcctctaaaatttctatatttttcctacaaatcaaaggggccattagagtttagagagagctgatgcactttctggcacacgactacacgaacaatcaatcactggctgagaaaacagggagctaattggctactagcatacgacgatcacaattgccggtggaccacgccggcagaggcagtgtgctgttgcggtggacaaaggcaaacgcagagggcggtactacgttcgtacgtgcgtcgcctgtgcacggaagtcagcacgtgaaacgtcgatccagcgcatcccacatgcgagcgtgtcagcgctcaggcaacacgaacaacccccggacggatgcacccccacggccccacacacgcacctcttctctgctggtaatcagagtgctttgtcagcagtacacggctacacgctaatattactactgttccaggccatagcaagcgttattgctgcagtgctgctgccagtaaaatgcatcctggtgtacgtacagtaataagctctacggtgtgttgtgtttgttttagcggcatcaagccaacaatggagacgagagatgtggcccggacggatggcgccgtccatgcatgcacccgtaaatcgtggtcccccgtctgcgtcgccgttttttgaggggatcccaggcttttcgagggtaaagtcaacacaaaagcgagcgccttttgcgctcgtaaaacgaatggcttttcgtgtagctaccggtggtggactcgtggggcgcgcgccctgcgcacacgctgaacgctgccctgtgcaacggcgacgcgcggcgcagtcgtctcccccgtcgtctgcgccggcgggcggaactccacgagagagccgagagccgcccggcgcccgcgcgtctcgacccaaactatctaccgtctccgtttctaaatatttaacgcttttaacttttttaaatatatttgaccgtttatcttattaaaaaaatttaagtaattattaattttttatcatttaattcattgttaaatatacttttatatatacatatagttctacatatttcacaaaagtttttaaataagataaacggttaaacatgtgctaaaacgtcaacggtgtgaaatatttagaaacggatggagtatttgtctaggggtgtgtttagttcacgctaaaattggaagtttgattaaaattgaaactatgtgacggaaaaattgaaagtttatgtgtgtaggaaagttttaatgtgatataaaagttagaagtttaaagaaaaagttgaaaactaaaccaggcctagaatttatttattttgttgaatggagagagtatatatgagtcacttcctcctagctcccagcttctgtaccgacttctcatggttagcgttggcatagtgcaggcacgcaggaacaatgatcagtcccagcttgagtaaccaaggcctgagtgcctgttaaacatcaagatgggctgggtcagactgtaccagatgggttgtgttgccgctggcctggatcgccaaatttgaacttcgtcaagagtggtttgatcgacaaaacgttatttatattttataacatgtttagcctgaggggtcatccgtatatcatttgataaagcttctactcttactttattggtgttttttttcgaacaagattttatgataaattttttacctatacaaattcgatttcttagtttacatccaaacacggatgaacgatgaacggatccacagtttgccttagtctctctaaaaaaccaccaccttcacaaaacccgctaaactcatatcttcgtagttgccggagatgaacattagagttggagaaagcattgcgaataatttaaccggatggttcaaaacatgtcaatattcttttgtaagaaaaaagtgtatctttcccattatttcccgtcaaatgacatttatcaaatttgaattcaaatctattatattattaaaggaatagaaaaaaaagccttcaagtttgctttaatggtctagaaatttccacattaataggagaaaaagaaaaaacagagtctatataagaatacaatttaataatagctgaaatttggaattaaaagtaaggaatataggaagctaagattagagtctaaatcggtatacaatagaactaatggaaattcagaattaaaaaaataaaaaaaattaaatgtaaaggttagagtccatctagaaatacaatttagaaataaaaaaaatcgaaattaaaaaaatatattggatgaagaatatagagtccatatagaaatagaatttaaaaataattaaaattcggaattaaaaaaatattgaaagataagtttagaatccatatataaaaatacaatttagaaataatagaaattaggaattaaaataaggaatatcggaataagagtacagaatacatataagattttaaaatttagaataaaactaataaaattaaagtagaatttagagtacaaatagaaatacaatttataaataactaaaattcaaaggaatattggaagtttgctctcataagagcatctccaacagcctctccaaatctaactctccaaacacccatatagccaactctccatttgatttggctagtcaaactagttgttcactccaatagcctctttatctacgctctctactttaactctatgggctagtttggtttgtagcctaaattggccttaccaatttttgtcaatgtcaaattttggcaacttttggcatggctaattttggcaaaagaaaaaattgtgtttggattgaagccaaaatagcctaaattaactgttgaaatggcctatttcttaggcatgccaaaatttggctccaaaccaaatagacaataaacactattgaaattgccaaatattggtaaggccaatataggcctcaaaccaaaccaaccctatgacaccgggacccatatgtcagcctctgccttcttctttctccccttccttcccctcttcctctttttttctcgcgttggctgggagcagacgacgccgacaagctgggaggggacggcggtggaccggtggtgggcgcggcggggagcttgtgccgcacgggtggccgcagcgagcggaggcggcagccgcggcgcgcgggggacagcggccccggcgagccgagacggcgggccgcgccgcgcgtgggacggcggtcgcggtgagcgggggcggcgcctcggcgcgtgggggtgttgacagaaaacacgaggcctaggagatctgcttaactccagtgcatgtccaaaactcgccttcggatgtatgagcgtgccagttgatttgatcctgcaatcaacaagaaataaaacaaaaaaaccgcaattaatcctataaatgatagccgatcagctaggtgccgatgacatatcatttatttcaagccgatgtcatgcgtacatcgatcggcaaatatcaataagcaaatcagaactaaatctactcgatcggctgtaaatattaatgatatataatccttatatcgatatatacttaaatcaagtgattgagatagatcggttgccttgccgagacagtataaatcacttagatcgaaatatatattaatagtgggattatatacatttatagcatagccgatcaaatggatctagcatgtatcggctaatactccgataccactctatattaagatgttaaagcaagtagaatatatcaaacagaagcctaatatatttagatgcgacaaaatcttaacataaagggcagatttaacatatagattaagcatatggaataaaagtagttaaatcagataagatcggctgaaactccgatactaccctgatcggcaaccagaaagcaggctagagattgcagttctaaacacgacttaatagatcaaactcaactgatgtagcattaagtatgaaaagaaaaaacaatatctagacaatcaagccgctggaagttttatagagtggtagatatatcacataatctaagttaacattgttgtctaacctaatcggctgccttccattaacagatgttagtcgattataggttagataaagatattatcgaagattatatgagatatatgataactcgacgaattacatagacaagattagagtatcataaagatggaagcactaatcctaagaacataaatcgtcgcgacaagttttacctcttgttgaagatcgaagccgatgcagctcaacccgaaagcacaaactcgtcgaaataaaagtaaagcaaaaagggtggcgatgcgccgagattgtattgaatgtcctttttttttacatagggctcgggtctatttatacccgagaattacaagatacgtccataacagacacgactattatctctaacaaactctaagataccataagtctctatagcagacttttgcccaaacatatctctaaggaaattacatagaatattctaattaataaatacaattgccttcccaggactctatccatgcgtggcaatcatcttgaagcacatcaacttaaacccgatgacgtacaccgggtcatattatcgaaattggctgtatcggctagccccgtctgactcgaactctgccgatcctgaccttagccgatttggactgcagccgattcttactttgtttccgcaacgatcttcatcttggattccacttcgatctgatcttcatctccgatgccaatagtgatagaatttaccaaatttggtcgttaacagggggacggcggccgcggcgagccgagacagcaggccacgccgcgcgtgggacggcggccgcggcgagcgggggcggcgcgccctacgccgagcgggggccggcggcggcggcgagcagaggcggcgggctacgccaagcggcggccagggctgcggcgcgcgggggccggtggttgcggcgagcggagaacggcgggccgcgccgcgcgggggacggcgaccacggcgagcggaggcggcgggccgcaccgcgtgggggacgacggcggcgagcggaggcctgcagccgcggcgagcggaggtggcgggctacgccgagcggaggatggcggtcgcggcgagcgcctcctcctcgtgcagtcgtgctccttccgtgcctggttgtcgtgtggggatggaggagatgggctgtgtggggcccaccattggccagccaaatggagtggctaaatttggctagtggagggagggttttggccagccggttggagaggctgttggagcacgatttttggctagaatggctaaattttgacttggagaatgggatggagagattgttggagatgctctaagacatgcaaaattatgttgtcattttaatatatttgaataatacattgagaaaatatatatgctattataagagagaaaatatagtaatactagccgtgcaatctacgcgggccactatgctagttactgtgaagtgaacttgcaaggaactgaccatgcatattcgcaaagtgaattattcaaccagatggttcaaaacatgtaaattttcttttgtaataaaaaagtgtaattttttcccatgatttactgtgaaatgatatatatcaaatttaaaattaaattactgtgaaatgcaaggaattgaccatattcctgtgaaattccgtattcactactgccactcggtacatgctcattgcccaggtaagcagataccatgtgatatacggtaaccggagtagatgggttatattgacgatggttcgtggtttattccttctggtgcaagtgcaatgctaaaaggcttcaaagtgcaaacatatcgcagtggtccattaatccttagtacacaaagtcggatccgttgacatggccccccaagaggacaggcttaaacagagtcatctttcttgagctgtggtaggtactaatcaatgaccttccttcatctctgaatagactgtcatatcgtagtttagcaaacgtaaacgacagctccttcaattccagcgataaaaaatgaaccaaacggcggtcaatacatgcggtttcgcatgtttatcgtttttgttgttgcaataatcaggtcaaatatattcacgcttcacttgagagcgactccttaaaaaaaaaactttggtcagtcaaactcacacgatcgtgccaaaggggtactcatctttttttagtgtcaaatcaactttagcaaaccacaacctccccaggggccagggggtggttaaaagggtgttaaacttcccgtgccatgcatgatgcaacctttttacagtcttgtaaacttaacaaagatgaatcaccccctgacatagtagataaagtccatgctactttatgggcagaaagcagcactactcctactatactgtcctactactaaaacctgggtatcaaaaaggacacctagctaaggtaagctaaccactactctcgcagcgttatcatggcagagattgcaccaacatgagaccacctgctctgctttgcatctcccagcaggagccttgctttgcatctcctagcaggagctcggctccagactccagtgcagcactgcagcggctagccgcttgcatatgcagtagacatgcagatcactttacgcgatcacgtcgcatcaaatccgtgctcgatatggcctaaatccgtaaagtaatctgccggcgctgattgctggagtgcgcgaacaagggtcaggtgatggccgaaaagttaaactgcaaatgggcaatttgggctcgaagttaaggagaatctcgcctgagttgagatcgcgctgcacgtgctcgcggtcgcggcctaaaataatttactagtagtaataaaactatacaagtaggagcatgtgcaagacggtcaaattgaaaaatcgatacaaataaccggtcgtagcgcgtgcgtgcgtgcactggcctgtctggtctatcagcttgattttcagtctctgaggtgtgctttaaccacagtataaacgtaaaaggtgtttaaatggtgctgtcaaacagagatggacgaacaataagttttttaaggagtaaagtgaacgcctgatctctaaatttgcatgtgttattaggttaacatattctcaaatataaatttaagatccagaacttatcaaagtgtgtcatcccggtttaaaattgtcacaaccatattggatcctaaatggtgccgaagcctgcaagctagctcgggaagctagcgtccgcaggtgtgtcagcccttcttcatcttctatgggttccacaagtgaaactttggatccgaccctatacttggttgtgtttagttcacactgaagtttggaaatttggttgaaattgaaatgatgtgactaaaaagttatgtgtgtatgaaaggtttgatgtgatggaaagttggaagtttagaaaaaaaaaactttggaactaaacagagccaaaagtcatggcctcacctcggtcaacccgtaggttgaaaaatcgcctcggacctggcttgtaggtggaaaccgcactgaacgaaaaaattgctatcctagtttagtatatgtaatctggcagtaattaaagttttaaatgtaggccgaaaatcaaagttttaaggcttcgttcgtttgttatggttgggaactctcccattggcagaaattacgaagcaattcattagcacgtgattaactaaatattagttagaaaaacttgaaaaatggattaatatgatttttttaaaacagcattcgtatatacatttttttaaaccacaccatttagtagtttgaaaagcgtgcacgcggaaaaagaggggcaggagttgggaacagtaagtaatgaactcagcctaagggcatctacaaccaaagccacccctagagtgtcctcactaactgagggtactctctatgaaactcatctctcaatggagaatacctctagatgggttcttcaaaatctgaggccacttgatggagaaacgccagctcataatgggtgtcccagcccaaggtaccctagtgaaaaaaataccaaccgtacccctcctcttttttctcatttcgcctgctcctctctccgccttgtctcctccgctggctcctctctctgtctcatctcctctgcgaagaaggcgacggcagtcgcgtcgagcgcaaggggtgccaccggcggttcccgtcgccgccacctccctcctcgccctctccagcaatcgtcgtcgactccctcctcttcatccgcaaccccatcttgccgccgtcaccggcctccagtcgaagtggttccggcactggcggtggccgaaggcgacagatcctgcgtcgtcataggcggatctgcgcccccctcccccccatggccagatccggatggagcggcaccggccgcgccacatcgagacattggacaaacacaacaactactactactccatatgcaagcacggggacaagagtagtacgctgctggtgcctggtgatgagcaaatggatcattgaatggagtgttggactgcctcctttaggtggtgattgaattcagtcacttaaagtcacttaactttagtctttatatttaaatactaattaagaatttttaagcctaattaatccacaattagagaatgtttactgtagcatcacataggctaatcatggattaattagactcaatagattcgtctcgcgaattagtccaagattatatctaagattatggatgtgctttattaatagtctacgtttaatatttatatttagtgtccaaacatccgatgtgatagggatttaaaagttttagtcccatctaaatagggtcttaggcctctttgggaaacatggacttgttccaagtccctgtcacatcgaatgtttggacactaatttggagtattaaacatacattaattacaaaacccattccataaccttggactaattcgcgagacgaatcttttgagtctaattacgccatgatttgacaatgtgatgctacagtaaacttttcataattatagattaattaggcttaaaaaattcatctcgcagattagctctcatttatgaaattaatttttttattagtctattaatactccaaattagcgtccaaacatccgatatgatatgtactgaaaaaattttagccccatctaaacacccccttagacaaatgccaatcctataaatgctgcttcaccagtaccaaggttgttaggatcgggataccaggcagtatcgttttgctcaaagtaatatcgcatcgtaggatcgtatcgtagtatcgggatactatgagattttctttttttaagtttaattaatatttatattaattatatatagacattctatataaaaaaatgtagtaatgatatatgtcatacaaatagagacctttatcaagagaaaccatgttggttttgatatatttaactgatttttatataattttgagtatatttatttacattattttcaaaccatgatattttaaataatattttgtagtatcgtagggatcgtagaatcgggataccacctaagattttataggatcgtgtagtaatgaatagtaggatcgagatactatgaaaattaggatactaggtgggatcggtatcgtttcagcttggtaagatcgtagtatcgtagtatcgtaagatactaggatatgaatcgggatactgacaaccttgactagtactagacatttctatgtcacctgcctatgcgatgcgcctcatctacaaaccgcaagggtaatagttcgatgtcaagaaaaaaaaaagagaaaatcccctgtgtactctcgaaagttcacctaatcccttctgtaccccttttgtacccctgaattttgctcaatcccttacatacccctgaattttagtttggatccctttcatgccctttccgctagttgaccgttagttgaccgttaaattcttatgaaaaagtccattttgccctttggtataaagaagcatataaattaatagagtatattgttagagcatataaatttgttatatgagactattatgtttatgagatagttatgcaccatattatttgtgataaatatacttagatatgacataaaaattaatacttatttattagttattaaaagattttttttagcatatgtattctgaagtaataaacaaatctgttgtattactatgaaaacacatatgctacataaaagaacttttaataactaataaataagtatcaactttttatgtcgtatgtaaaagtaaatttgttacaaataatatggtgcatcacatactcataaatataatagtctcatccaataaatttttacattccaacaatatacttcattaatttattatgtttcttcatagcaaaggggcaaaatggactttttcaaaagaatttaacggtcaactagcggaaagggcatggaagggatccaaactaaaattcagaggtgtgtaagtgattgagcaaaattcaggggtatagaagagattagatgaactttcatggatacttaagggattttcttaaaaaaaaggcgcgattattgcatgcgagaacttgacaaaatcgcattctttcttgattctttctctatgggcctaaagttgatagtatatactaatatttagagcgtgtaaatcaatgcattagctctctcacggaaaaaggaagatagtaggccaaaacaacggtctacatgctactagtacatgccttgaactggtactccaggaacattaaaaccatatttacctgatctatgctgcacatcgcaatgagcagcagagacacttccatcgttttgagcttggtgggcaaaatatgggccaatcctcccagccacaagttccgctgtgatttatgaccggagtcggcgcccaccaaccggggtgcgtgcgacctgaccagcaccgcacatcggcagcgaaaacccctccgttttttcttcatctcttcttccatttcgcttctcccaccaccataccaccacgggtcataaccccctcctcctcctctcatccacccaccgtcacctctctccctcctcaacctctgcttggctgtctgcctcctcgcctgtcatctgtccctctcatcagcagcggcgcacgggtcaaaccaagagccgcagcatcgccaccaccattcaccaccgccactcagactctccaatggcggctcctccccctcctcctcgtcaaaaccgcccctctcctctccttgtagcgggtagttgcttgtcgcgagtagggacgaatctgtgctaggggcgagaggtgtgtgcgcgctctagggggcaatggaggggatgtggaggaaggccaagaaggcgctgggcgccggcctctgcgttcgcctccccgccgtcgccggcgactgggaggacggcgtcagcgagcgccgcgcgtcggatgcgctctcccacgacgcgtcttcggcggcggcggcgcatgtgtcggcgccgaatacgccggccgcggcgttgccgggagcaggcccgctccggaggtccaagtccgggaccaagtccgccaaggttaggctcttctccttttctccctcttcttctcattgtgagttatataacctgtgccttggattgtatccgtggtagccttggttcggggtggctggatgtgaaatgcggagcagattggggtttcctccggggttaggcgcggatttggagcaatgtggcttcacccgtgaacgatttagattcagatgtgcttcccctggccgacagtttttggttgcagtaatgggcgtttcctttgtttgtgtctactgtctagcaatttttttttgtatgcatctgtttttttaatactgagttttgtcttgagcctcgcctctgctagtttggatttgtcattacctttgttactttgtctgcaattgaaatcatcctatgttgtttctgaggaaacatgggtcttgcccattttataataaaaaaaccattttgtgtgcagattttgatgattctgcaaactatttattctctaaattattcaaaggaatatccaaaaaagaaaagagatgcatccgtcattggcttcatcttgttgctccattcttcgtgtcatgttccagcaaactatcataccattttgttcttcaccattcagaaaggaatcaatttgtgttttatagcttctttttgggctctgttgtatttatttcatatcttccatagtacaaaaatttgctgcttgtttctttttctcaaatttatacgccaacagagattcttacgaatttctatcagctatcagtctgctggtatttttcccctcggtatcgcgcttcgttatgggttaattcaaataaaaaaacccagttgttttttttttctgtctaagatacattcatatcttaacgtaagcttcttttctactgttccacttgctcgttccggaatgggaaagttcgcttctttcctcagcaactccccatgtgttcacgtgtagtatcatcctgccgtctctctcttactccgttagtactactactacgtactccaactccaattaattttgtaaaggcgtgttttccaactgtagctgtcatccatcactgaaaatttgtatcaccagcctcttattagaattaccttatactgttctttttatatttatctttatttagttgtcatggcatgtgcgtgatctctttgaatggtcaatgtcaatttgtgatgttttctgatacaatactattttttcgtgtggtgttcattgatgccttttattgctgtgttcacaccttttgtttagtagcagttctgatttagcgagatattgtgtatggtagtgccctgtttgaccaactacttcacgaggatttcctcattactcattactcaattggttgacatttatctgccttggtcagaagtgaagacttgaaaagttctgataataagcatcgcacagttatttattgtgatttccgcattactgcctttgctaagcttgatttgtctatattatcaaatttgacaatttggtaaactggcatgaacgcttactgtgtttagttgaatatattgacacgcatgcaagtctgacaattctttgtggtttctctggtttaaaatgattttatttgtcaaggtaatgccgcgaaatgcaacatatattgggtgcccaaatgcaaaatatgtatttcttttaagttatcagtaaggaaaccgtaaaatcaggtgtgctgtttccattggtatttatgacgtgcatacgttatcataaaatataaaatacagttgtggttgctgacttggtgttagtcaaaagatgtatttgtttgaacatgctttggtttttatgttttagtcaaaatcaataacagtacctatcttaggtcctgtttagattccaacttttttcttcaaacttccaacttctccgtcacattgaacttttctacacacacaaacttccaacttttctgtcacatcgtttcaatttctccaaacttccaattttggcgtggaactaaacacagccttagcttatgatggcaccaatgaactaatagatccaacaccttgtatgtcacaaaaaaagatggaatggatgtgatatgacatcaattcatttagttctggtatgtgtttgtgatatatttttgtttagctttcatgtgaggccctattcgagttgccatattgatccaatgaaaataaatcaagaaagtagtaactttagtccatgaattgcagtttgtgtctatccgactatgtttcagaaataacaaacaaatatattgttcgacgtggatacactttgatgaagaattgggatgaaaaataagtctggataatggtaatttaaggtgggcctaagtaaatttgttgaacatgcagattagtggagatatctatgcagatcttggagttgattcagaatttgagatcggcttctgtcatagtatggcaaactctaggcagggcttaattctgtacagtggaattgatctgtgaagataaggacttaaataggggtgtacggggtgtggatatcaggacaaagggttgttgttatatgccagtctgttcactatgttggatgtaacatacaaaaagttttgttctcaataaagtatcattaatatcagttgaaccgtcttttcgcagcaaggctcatctttaagcccttatgtttcatgttttaaaacacatgtctccatgttgattgcacatttcaaatgtgaaggggtgagttctgatgttgcacaattaaattgatacatctttctttttttctctcaacagggaatgtgcgcaatatgtttcgatcccatgaagtcaggccatggacaagcacttttcactgctgaatgttctcacatgtttcacttccactgcatctcctccagtgtgaaacatggaaattatgtatgcccagtttgtcgagcgaagtggaaagagataccctttaaccgctcgttatcttctattgtacctcgtggtagaagtgggttgaatgtgaatcaagctcgattaccccaacaaggcacctacatggctcttctacgccaggttccaagtcaccatcgagaagcttctggttcccatacttctgagccagttgatttcaatgacgatgaacctttgcagctgatagagtctggtgacagtcgtgatgctagatgcagtagagctgtggagatcaagacatatcctgaattctcagccattccacagtcgtcatctgaagatgattttgctgttttgatccatctaaaagccccttgtgctaacccagaacaagtcacaggcagaccattcaatgccacctcaattggataccctacatctcgcgctcctgttgatctggttactgtgcttgatgttagtggcagtatggcaggcaccaaactagcactcctaaaacgagccatgggttttgttattcaacaccttgggccttcggatcgcctttcagttattgctttctcatctactgccagaaggttgtttcatctccgacggatgtctcactctggcaggcagcaagccttgcaggctgtcaacttgcttggtgctggtggtggtacgaacattgctgatgcattgaagaaagctgccaaggttattgaggatcgcaattataagaatccagtctgcagcattattctgttatcagatggtcaagacacatacaatatttcctcaaatgttaggggaacccgtccagattataggtcacttgttccatcttccattctgaatcatactatctgcacagtgcctgtccatggctttggttttggtgcagatcatgattcagatgctctgcactcaattgctgagtcctctggtggtacattttcctttatcgaggatgaaagtgtgattcaggatgcatttgctcagtgcattggtgggcttcttagtgttgttgttcaggatatgcgactaactgtggaatgcgtgcatcctagtgttcagcttcatactatcaaatctggtagttacttgagtaaggtggctggagatggacgaaatggatcaattgaagttggtcatctttatgctgatgaggagagggacttcttactatctttgagcttcccacaatctcgtgatcagaccatgcttttgaaggttgcatgtgcctatagagattcagtaacgaatgaagccatcaagattcatgcagatgaggtaaaaatcctaaggccaaagtcacctacgtctgagccagtttgcatggaggttgatcgtgagaggaaccgtgtccgtgctgctgatgctattgaggctgcaagggcagcagctgagaggggtgctctttctgatgcagtggctattcttgagcattgtcggaggatactctcggaatctttttcaagaaagagtggggatcgcctgtgcatttcccttgatgcagagctaaaggagatgcaggataggatggctagccggcaacgatatgaagcttcggggagggcatatctgctatctggattgagctcacattcttggcagagagctacaacgcgtggtgactctacagacagtaccacacttgtttactcctatcaaacaccatccatggttcagatgctgcagcgctcacagaaccaatgcccttcacctccgggcctgaggccgcagctccgacaaactaggtcactcttggagaaaccccatccaaggtagaaggcagtttgccattgtctcttgcgaagcaagtgcaaagatgatggtgtagaaatttcattggtgtcattgcttagtaggtcagtagtgcagtagcttagcattcatcctttgttcttctgttcaagtcaaggatggcggtataccggaaatggggaggtgagcttggaggtaaatatgtttttgggggtatactggagaaagtgaatgggggcttggtggtaaatacattgtgaagggggcctgggaagaaatagtagagaactggagcagtggtgtaattgctacaaggagtaagattgtgtaggttggtaatttagattgtcaggatgtttctaattgatgaacctcttttcattttgccttttggtgatgtaaagggtctggtatgggggaggtataccatagaatcttggggaattttgatttggggtggcaatgtaattccatggatttcttgtttttattcaccagttattaattgctggtgttctgctgtcgccttgccgtgaattgcaagtattatccactacatgcacgtccttacttttccgaattgtaagtattatccagttcattcatgcccttgtctttcagggtcatatatgctgatataatctttcttgtgccttattacacaaaccgcacatgagtacacacacctttaagatatgctcataagaagcaaaccccctaacctcacaaaatcaatattgactaaattcatattgaaagtgaatagactaaatttagggggtgtttagaactatgggtgtaaagttttggcgtgttacatcaaatattatatagggtatcgcatagggtatttgggcactaataaaaaaataaatacagaatccgtcagtaaatcacgagacgaatttattaagcctaattaatatgtcattagcaaatctttactgcatcaccatattgttaaatcatggagtaattaggcttaaaagattcgtctcataaattagtctcaatatgtaaaattagttatttttttggcctatatttaatacttcatgccagtattcaaacgttcgatgtgataggatgaaaaattttagggtgtgatataaatagggccttatattgaaaatgtataagcgatattgataggttgtgtgaagttatacttttatgattttaccgccagtgtaattacatgtgaaagtttttagagattttttatgtcgaaagttgtacttccaaacgaatttgctatactactatagtaatttagggaagaaactcgatatagatatttcggggaaccgtgggatacacttttaagggaaacatattcgctttttcgaccatgggatacactttaagggaaacatatcctctaactttgtgcagtctgtagttgtaacactgattatatgggccctactttgttatggcccacatgtcagtgatacaattgcacactacataaagttaggggagtcttttttacttttaagattcatgcacaggatagagagcaaaaattaaacactccatgcaaggtgctagagtcaaacccacaacatgccaacgacatgctcgcgctatccaccaccaagctacgtggttttagttataatgcaattacatagtacttatactttagttacacatttgttacaatgtacctatattagttttatattgtaattatatcttaataaagtttttaggaacttctcaatggaaagttacatgggtagttcctttataaaatctctctcatgaatccactattacgaatgattacttgaattttgagagatcacttgatcattaacaccaggatgccagatgcgtcaagaaaaaaaaacactttcaatcgtcaacatcaataaaaactgaatgcatatggatcactgactcattgtcattgtcaaataaaaacagatgaaattcattaaaaaacgaaatccttatgatgctgttacaattgatttcctcccaaaaaaaaaaaaacaacctagattagcaacctgactaccacctgaggagcctcctccctggctgcaatacctgatacagcggatacggcacgtctgggctgtcgggaaaggtcgggaaatccgtcgtcacgccgcaccgcggcgagaactccccgctgcccacgcgatgcttgcactcgatcaccgtctgcatgcacgacctgcagtacctcgccggcgtcgtcagggtcacgtccaccgccgcgtccccgcggcggagctcctcggcgaggcgctcccgcgcgaactctgggacggcgttcgcgtggccccacgccatcacggacctcgcctccgtggtgttctcgttcctcccgcagagctccggcgcgggcccgctcgccagctggacgccgcggtaggacacggccgccgtcgtgccgcgctcgacgcacgccacgctgtacctgcgcggctccttgatgcggacggtgaggtcgaacgtggggtccagcgtgggccgcccgaggtcgcggtccgggtcgagcccgctgacgccggcgacggcgacgctgaactccgcggacttgccgtcgtcgaaggaccacttgtagggatagtagagcaacgctgacatgagcaccagcgccgtgagggcgccgaggatcccctgaaggatattccagcagaaccccttcatcatcacgccgcagtcttccatcgtaagaatcaacgagccgctcgcataagtactcccgcgagcgccccatgtcgacgatttcgtaggtttctctccgtacgcgatctaagcaacagtagaagaaaggcggttttgctaaatatttatcgggtgatttttttcatagtatttgacgtttttctcgccgcacgatgttttccaagatttgtgcaaaaccacggtcagttgattccatgaccgagtcaacctgactttgtatcgatggattcctatacatcacgcatgttagtagccatttatttcttctctctatttctttctttctttttctagttacaaaaaagtttacagtgcacttatactaaaattacagtctacttacatgccatatctactatttttccaaatataattttaattataaagcactgtaattttagttataaatgtaacatttaacacttcagatatctgcatggtttctcaaacaatgtatttgtactaaaacgacaaatattccagttaccaaaatttatagcgcacttgtactaaaacaatgcacttacatgccatatctactatttttacaaatgtaattttagttataaagcactgtaattttagttataaatgcaacatttaacacttcagatatctgcacggtttctcaagcaatgtatttatactaaaacgacaaatattctagttaccaaaatttacagtgcacttgtactaaaacaatgcacttacatgccatatctattgtttttacaaatgtaattttagttataaatgcaacatttaacacttcagatatctgcatggtttctcaagcaatgtatttatactaaaacgacaaatattctagttaccaaaatttacagtgcacttgtactaaaattatagtgcacttacatgccatatctactgtttttacaaatgtaattttagttataaaacaccgtaattttagttataaatgcaactactctactaacgagcacaatcacaggctacatggacggtttctctgtactgttaatttttttttaccgttagatgcagatttgaggggaggaaaaatttgagtgattttttctcaaaaatcacacgacagatgcctagacagtcccgaagaaaggcgttatgacttagcgtccgccgtatcaaggcgtcagttatatacaggtcgcagttggaagattaatccaaggagtaatcagattgggagtttgatttacagatgagttcggcaatgatacgggagataatttgatttctattcgaatgtttcgcgttgatgcgttgtagaattctgcgtttgccgcggccgattacaattgcaaactccatggatgtccacgagtacgtgctggtaacaattgacacgacgtcacgtcaagcgtagaagcccaaatctggagaggaggccatgggtgcgttcccggagcaagaacagccacctctccttggtcgacgcagctcctttcgaccggaggaagaagaagaagacgatgagtacacggatgccttcggtgtatgcttcggcctgtttctggccatcttcgcgatcatgctggtcgtcctctgcatccgccggcccgacacggacgggatggcggcgagcccgcccgactacttcgtcgcgatcaacgccgtctcgggcgtcgacccgtccacggacctcggccggccggcgctcgacccggtgttcagcctgaccgtccgcgtcgcctcgcggagctccacccgcggggcgtgcgtcagggccggcacgtcggtgctggtgtcctaccgcggcgtcccgctggccggcgggcgcgcgccggcggacccggagctctgcgcggggccgatgggcgcggcggaggacggctccgtcgtcgcgcgggggagcggggcgcgcgtgccggggacacagctggacgccctcgcggaggacatgcggcgcggcgaggcgctgttcgaggtgacgctcgcgatgccgtactacgggcagcggaaggtggcgtcgtgctgggacagggtcggcgacgccgcggcgctccgggtgccgtgcgacgtgtccctggtggacccgcgccgccttgccggaatcactggcttcagcgatctacctagtgccgtgtaaaacgacatattcgctgggaactctaaccacttttgagtctctcgtggtttacatgtaatttaaataatttttaaaaattattaaaatatcaataatatatatgataaatcactccattttagtctgtctttttattttttaaaactttttttcaaccattttaattataagcaaaaaatacaaacaatgagaagatggttccttcagagtttataatccaatcacgagatcaacacaacagcaaccactcccacatgtgttgagttgtaactttccgtagtttctagagtagtgatcactcgtgtcctcaggatgtatctgatttggtactttcttggttttctttaaaatctctatgtgtaaggactttgggggactgattttcccccaattattttttcacactttatctaacgttcgtatagagatttggttttatggacgcattctccgtagattgtatttgaattatgttgtgcatatttgtcaagctcccaaggatatatctgttctaaaatatactcatcacctaatagggttcaacatttgtactaaaatataataacctttacacctattctcatcttgaaaaaactaatcggcacatatgcgcttgataagttataagttgctggcgtacgctcagcccaagccggcccacatgcttctcttttctccatacacggtcgcacttccattaattttgacaatttgaccctttgcaaaaaaactaattttacaaatgaaccgtcgccaaaactaatttaaaaaataaccttttgttcagcgccaaatcgtgtggcgctgaaattagacacttcagcgccaaatagcgtggcgctgaatgtacgttggcacgttgactcagccttccatctacggtggcacggcattcagcgccaggtgatgtggcgctga

SEQ ID NO: 8254 - DNA, 16017 bp, Oryza sativa
attctcaaattgcttttagagtgtgtataatcctgaatcatcatgagaactgagcatttttttcccctgtttcctcttcaggcaaagcagctcaatggaaacggtgaactatttagacagaagtatccaaaattaggagttcgaattatcgacggaagtggcttagctactgcagtggtgctaaaaagtattccttcagatgcaaagaaagtttttcttcgtacaggcacttctaagatagctcgtgccattgccattgcactatgtgacagaggtgtccaggtataatctatatatcaatttgcaaatcatcgttgtcttgaatatattttggttaatttttctcataatttttgccttaaattgcattacattaatctggatcaggtgatcatgaatgaaaaggaggtataccacatgctcaagtcacaaataccagagaacagggcaagctatttgaaactctcgagcgacaacgtacctcaggtaaaaaaattgttgcaagaaatggtgacaaactctcaagcaacatgatgcacctgtagactcttctactagtaatgttaaaatgtagcttatagactcttctacaagtaatgttaaaatgcagcttatattcatgctaatacttcatgttattgcagctttggatagtacacaatattgacgacaacgagcaaaagatggcgccaaaaggaacaatttttattcccatatcacagttcccccttaagaaacttcgcaaggactgcacttacatgagcaccccagcaatgaggatcccggaggaaatgaagaatatccactcctgcgaggtaatacagatatgttatctgctttgttaatctgaaaatatacgacatcaaagaacctcttcttaatagtgctactacctttgtggtcagaattggcttccaagaagggtgatgagtgcttggcacattgctggaatacttcatgctctggaaggatggaacatgcacgagtgtggggatgagatgatggatattgagaaatcatggtcagctgccattcggcatggattccttcctctcactaaagcttgacacctctggaagcatggatggtgtattccatgctagtagatgatgctatgatttccagcaacggcataatccattcattatctagcttgggaaccagatggattattcacttattatcttactatgtttgtaatactgagcttgggtactgataagtcatgaggaggcacagtgcaaacgaacttaattccaatagctcagtattttataatctatagtctatgtcagttctgtaacattacgtttatctcttatttgaatcttgtgggggaataattaaaataataggcaatgttttcttgtttagacttcgcaaagtaaaacctgactgatcgcacggtcagtgctcttgagacgagacaaacaagaccaggtaaagctaagcttactcgctggctcgctgctactatcgttttagccttcccttaaagtttgattcgacactgtaaaattcgcccatgacgctctgcacaaaatctttgaaactagtggcaacacagcaaaatcagatgcatcactggcttcacacttctaaggctgtgttctttcctgggtgatctgggtgattgtgagtgagtttgtttcgttttccgcacgcacatttcccgaactatacggtgtgttttcttttgcaaaaaaaatttatagaaaagttgctttaaaaatcatattaatctatttttaaaatttaaaatagttaatagtcaattaatcatttgctaatggctcacctcgttttgcgtatattcccaatctcctcgatttcctctccactatcgtttggtttgaaatgcttcgttcaaaaaggaaaccatcgacccttcaagcacacagcaccagtggtctagtggtagaatagtaccctgccacggtacagacccgggttcgattccaggctggtgcacgttttgttcttctcttacctttttttttaaccgatccgatgactatgatctccaaaaagtaaacacgcagagtatcagagtgtactctctatttgagtaccagagtactaggcatatgtttgtgtcatggaagagttgcacagtgtattcttccgatgactatgctctccacgaagtaaacacgcagagtatccgactatcaactgcatgtattgattcagagtgtactctatatcagagtatcagactactaggcatatgtttcatgtttgtgtcatggaagagtggacagtgtactcttctttcttgcatgccgaaaatgaagggaaatagtgctggaagaaagcagaaatgctccacatacaaatgattccccaatataatgcattgagctagagctatatcatggcagagagttcacattccagaattctttacatcacttggtattggtaaaaggaacaaagaacgggcaaccaagcatactgctttgcgggcaaccaagcttggaaaaaaaggacagcagttcgtatgagctgttggaatatttaagtgctgaaccagcagtctgtaactctggaatctggattgtttatcctattccagagaaaaattactatatcatctttctggacgataccatcaatggctctgcattgacttccttgaatcacttgaatagcagagtagagaattcataggttaaacccgcgccctcgatttagatcctgtggcagtatataaacttttgtcagctaatgcaatttcattgatgaaccagacgagtgcagcagcatagaaccactcatctatacatatggagacacaaggtaaatgcctcacagaatcagcattaataaagccatattttaggggagaacctcaacttcctaaatgcacatatagatgccatcaggaacttactgcgcgttttgtctcggcaaaactcacttccgcaatgacatttgaatgccttcacaggatggtcgacatcatcaaaatcaatcccatagtcctgcaggtaaacacaagatcatggcaaacttcgaaaaatgacttacaacaggtagtgctccatatgctacatgattcaaccaaacaaaggggggatactatctatgggaaaagcactaatgagtatcaagtcacaaggtggccaccaaaaggtcaaaaagcccaaaacataagatgaaagcaaattcaactagaatgtctgaaaatggttatagtccacatgaaatggagcttaaatttaaattgtggagtacaacctacccatgtgagttcctcaaaaggctctattatccttgttgtgaagaacgccagctaaccaaaaaatggaagacacagaataagctcaatatggtttaacttggactaatatatatcagttacaagctaaagttgaaaaaatacatggtaataatggtggtcgggcgtctcgatctcaacaggtattcctataatattagcatcaaagcacctgaaaaccgtacaatgatatgccaggtcaagaaggaagaagtgttagattcagcagagcacagaagcaacatttttttaagaaatacttatatattcaaaatttggataagactttgttctgttagctagcttcaaataagagtaacattgacttaactatcttgattaagtgctgacatcaggcaataatataggttgcagccaaacaatcactaatctacgacatcaggcaataatataggtgcagccaaacaatcacaaatctacgatgttgttcacagttttgtaacgagaaatatcatataatgacaactgaaaagcacatattaagttagttcacagaaccagggttaaacgctatggtccatgaggttttagttgggaccccactggtagccatttaccagtcacaccaattgtcaattttcaatgaaatttcctacactttcaacttgaagcacacatatcatggagaactcactaaatcgcagaacagtcagaaaatgtacatcaccaggttctcactgggaaaaccagaaagcgacaagaaccagctcatccctttttttacccatcccatagaagcaacagcttcatgtattacagaggactccataacaatcattagacgttctggtaaaaaaagaatccattattataaataataaatggatacctgtggtttataaatcttgcgacgttaccataaaacgtggcatctagacaaagggcttcctcatccttaagaacaccttcagtaccccagtcggcatcaagtaacaatgggtatgtgtgctttgctttaccagtcttttgaattgtacggtcatacaactcaatgttcgttaatatttcaccaacatactcacaaacaaaagcacctcgaggaagtttctcagtactgcgcaatccccatccttttttttcaggggttaagaacacctgaaattttagaaagaacaagaaaaattattaaaacacgtaagcaatgagatgtttactgtgacaagcacatgatcatacacatgatgcactatcacaacaaactgctgcagctaacatcataatttcaacaatatttggcagttgacaaattatcgtcaagctagcaaaaactttgatattattacttacctgtaaatggcgtgtgatgcctcgctgcaccacacggtttccacaatttctagtgcagccgcattttctccagcactccttgatgaatttccttgtaaggtgtcctttacaaggaccaggattcatttctgtgtttgatgaatcagaatttacttctatcttcattcgttcgtttgggcaaatcttgcagtagaaatggggatgtttaagtggttctcgaatcattgagatacagctatctagaaatgctcccttaagaaggccatctgttgtataagcaaactctcctcctgtttctgcagcacacgcacaaggaagtgattgtgccagacaatctctgaaacaatcagaacagcaattgtcatctccgattctagcaagggagatgtttacataggcttcttggagtgtgatattgtgtggtatgtagtgaaatggaggaggaagaatcccattgccatattcattaataattggaatccttaaacgttcttcaccttttgtgatatcattgacatcatgaggtggtctgttggcaccaatatgtagttgatgcggaacaaccggcatattactagaattctggctaactccagcaacagtgcaagaggaagaagtaccaccaaggctcatgacattattaggtggcataaaagcggaattagcttgatttgactgcaatatttgcggcactgaaggtttggacagaatgtccagggcaggaacagtttgtatgatgccttcatgtctaggtccactagattcaacaatacactggcaagtatctttaataagattcttaaaagagaaattgggttctaggctcttgtatttcctaaggcatctagcctccattttcttgcaaattaatttaatgtcaggcagatgaaaatcagaacggtttgccagggaagagttgtatgtgaatgatagtttcccagctccataatttgacaaaactacctcaatgttggatggagaatccttgctgcttacaatttcctggttgctacacgcaacagccctgttcctttcatgcgcaccagatacaccttcatgcttctgatcatggcgagcaccagaagtcctacgtgcatcttcataacgtgaaaaatagaaaatccaaaagacttgattagaaatgaagtaaagagctagcaacaagccaaaaaaagaatataaacatgacagcaacaacaatgacactttctgcaggaagcaaaggacatctctagaatactccaatattgttcagtatcactagacaagcatgctcgcaacagagtagaacagggatttaaaggactgacatttgtacagttattagagatcaaattctagaccaattctttgccaggagatatcaacatccagagctctagacctccctgccccatcccccaaaataacagacataagatcataatccctcagacatccacacataaaattctatatatccaaaaaacagccacatgtttttttttctttttgcaaaaagtgtatacgatatgtgaataaattccacaaaaacaacactacctttcacaaaactataaaaatcacacttctaagcaacaatttcagataactatgtgaacttactctctctctatatatataccattatagaggtatacgtccactctttgaccaaaattgacaacacaattcgaaataatctctggccaaatataaatggtctttaagttaatagtcacaatgcaagattttcacaacttctctgatcgcaatatattggcaacaacattatatcaatattagtttttttcgccgggaaggccgaaggaggccatctgaatatcaatattagttttacttttggatatattgacaaccctagttcaaaaggagtgaccacaaaatcccacagaaatattacttaaataacgggtctttttcaaatccaagtttgaggatcatgattcttattgtgaaagtagtagtaaaaaattctctttaaataataatgcactcatgtctagcaaaatgctttacaatacacgcttgctctcaaagcctcaacaccccattaactggaatttatataaagtattcctttcaactctaaaccataagtaattcatcttttttttaaaaaaaaaacgctacagtgatgtgtaggtaggaagctgattaacagaccaagactatattaacataatgttaacaaattgataaaatagcactgaagttgacaacaatacaacccaacaattaaacttactccatgaattcccaacaataagtagtcattaattttggatggtctatgaattaacagcattatgaaagtaaattgatgatggacacactaatattgcttttatgcagctgatttagatacatttgtcaaatttcaaaatgttgttaccgcaccacgcccaaaagatgttttggaacggatagagtggagagaagaatatttagattagcacactcaggtagacaacattaataggctgggcgacctgtatgttttagtttatacaataaaactagattaatttgtgggaatccatcaacaaagcattaaaaggttagcattttcatataaattattaacactatgtcgcctacaaagatattacctttgcgagtactgggggctacaacttgcggacaagtagttgctactgggacctcaaaagtttgaaggtcttgaccatggcataatacagcagaattattttcaacaattgttgtattctttgcaatgctagggcatgtatgtggttccttgatcagtaattgtgaagaaggcaactccaagtgggccctggtgactttcttcccattaacagttcgggcagacagtgtgcctcgtccctgctgtggtggagcttcaacaaactctctattgtcattgccatgcatcttggatgtaggattttgagaacgcttttttgtcttaagcttcttgttagattggtctgcatcaagatttgtctcattagcttgccttttctgtccttcctggtacatcaccaaaacttgaatcaaatcaaaatggcagattaatgaaataataagatatatggtgctcacataataaagaataaaactacactactgacttaaagaaccaaatatttaataatatgccagaacaaagcaaaaagattatactttgggatctgaatcacaaaatatagcatcagcaagagccagataattatcagcttctatatgcacccagttgtaatcgaataagtttagtagattattcaacacgggcgcagcagtttcctttaggataccaatatcagccatggctctgatagcagcatcaaatctatccttggaaatctttggaggagccatcctgcttgcagtggaacaaatcagcatggcacattaacacgtgatatcctttgagaaagcaagtgataagaaaaaccatatacacatactaagcatggtatcacaaacatcttacgaatgtacaatgaagttaagattgtgatacattacgagaagttgtggactaagcacactaggctacaggaccaaccacaagagtactccaggtacaagctaacttatttatccttggagaagggctgtgcttattgctgaattttcaatctattgtgcatgttaatattattctttcagtcagcatttgaaatagattactcaccggataattgccacataccatctacttgattataggaaaaaattaaatattttgaggaataaacttaacaaatagcactataaccagaatggttatatatgccaggggaagtgactagttttcatgacacagcagtgcaacaacaggaaaaacagaaaatgagtaattcatactacttgagcagctgacatccaatctgcattattatctctccatgtgcatgcaaagttagacaacttgagcagcattcagaaatgtataccttgttcagtgttacatgaggcagtaatgttctgtaagatgtgtctatggtttagtataagaattctgagtgtgcaagacatgtcatatattcgtgaattattttttttttgctgagtgagatagagtttggaatcggataatatcatcggatgcccataaaaacaattgtattaaaaaatgctgagtaaaagaataactcttacgacaatcccgtgtcacccgttttctctttgccattgggtttggccattccagtccttagctgagatgtggaaactgctgaccctgcaaatacaatagtgtccgtgaacagaagcagaatacatataacctttagctcaattgttcatgtttctctgccatcagaatgcagtagcaaaaacaaacatcataaggaaatcatgctataaaactgtgtcagaaattggcacttttaggttatttgaacagtactttctgttcagagaactgttcaagctacagtagtaataatctctttttgaattgcagtagtccataaataggtgtataatgatcatttactaaatatagttataatgtaagccatagtgtcgagttgataagactaataatatgggcaagtggtttaccttgttcacaatggacgaacaagttcaaaaacatataaatctggtttgtagaggataggatttcctcaaaaaagatataaattcccttcttaattaacatattgaatacaaacaaagtaaaatcaatttcagatcatattagtcactggaaacggggtcagtggcagcgaatcctagacccgggaacgccatccccgttaagggaacgcggggtcattttcgtgcccaccttgtaaaaacctctcacaagtagcataccacgtttctcgaccccgttcctcaatcccgtcgacccgggaactttgtgactaacaaacgcaggaaattgcagtactatccgatcggtattgaatattggttttgaaatccagtctaaaactttacatgggtgaatccacccatttgatactacaaatatcccattgcaattgtcatggaaggaagtcgcagtcctatctagatcactcacatcaccaagtctattgtggttctgaaacataagaatgccatttctgccctagctatattatatcctgctgcatttgactgagttaatccaaacagttgcttaaaaaggcttcagcaaaaaaaaagtgggaaaatcgtagctacaaacctatggaaatatatttcaatatttcccatgcaatcattttctttaataaaacatttgatatctggtcaaatttcccacccaaactatgcgcaactccattaaagcttatttgaatatataatttattatatatatatatatatatatatattctttcttctattttcaatctacatagctataatctagaccaaccatgactagtggcatatatctttctctttttttacctcattaacatggtaatttctaggccttgagagcaaatatgttggctccatttaaccttcactaacttatataatactccctctgtcaaaaaaaatataaacaggcgccccctcgctgtcgctacttcctttggttggtcacccttaaccgttgctggatagcggaccgcctcccgagtcgtggtttgtcacacccggatcgatgtgttctttgtgatcaatgcgaagagacgattgatcatctcttggtcgaatgcccggaatcgcggcaactatggtgggttgcattcaaagctatcgggcattcggagtgcttaccgctcattaacactctttcttttcatggttgtgtgactgtcataagaagatggtcaaggaacatcgccggggtttcgacaccatcgcaacattggttgcatggacgatctggaaggaaagaaacaatcgagtcttcaaccagaagagcagaacttgggtggaggttgcaagggttatgacgggtgaagcggagctgtggcggctagcaagagctgcaatccctgttttggtagcccatgttagtggagaagggtcgcaaaaatttagttggagattaggcttttagttttttgttctcctcctgtaccctgtccccttcgttttgtctttttggcccgctttatacatacatttattccttcttaatacaaagatacgctcctcgtgtattccaaaaaaaaaacacttttggagtttttcccggacattaagaagaggggttaaattacattagggatggttgtgattggttgagatgggaaagtagatgcagaaattaaatgagggatggttgagatgagggagtaagtggagaagtagctatattttctgacggaggaagtatatagaatctagccttttgaacaaatacccaaggctgcattctgatatattatgaccttttgaacaagtactcaatgttgcatgcatctaattcttcacatagaacgcctccaactcccgaacaggaagctcacaagtcggcacaatggtggatttgggggcaatagtgccaaaggcacgcccagatctcacaaattttcacacaagaaaactaagcaggagaagcagccttattgtgatcagagcaacaaacgagcaactcaaagcgactgaacaggcacccaaaatacaatacgagcaaagctcctcaacctcggagcgatcacattcgcacacccaagcaacgcgggaggacatcgaaacttcgcagaaataggccgaagaaaaaccctcatacgaggagccctcaccccgcatcacaacaggggcggacctaacgtggtgcatggtgcatgtcccacccggccaaaaccccaatttgcttcagagaaagaggtgcgtatagagagggatgaggaggatgaggatgtgcgcgtacgggagctcaccgcggcgagggtgcggcagaggaccgccggcaccgctgccgctcgcgggatggggatcgtcgcaggcggcggccggcgggcgaggagacgggaggggaaggcgaggggactagggcgcgaggaggaggaattagaggcgccacctgctgctgcgatgtttgggcggtacgcgcttcttgtaccctcggacctcggtcggtctccctgtaacctgtatgtgtgtgtgtggatccactgccatcggctgaaacaaacccggtgcttcgggttggtgacagcttcatacattccattttgcatccgtgttaatgtgttagtattacgtacatcaaccgggtgtgtctgtcaatataacttactttctttttttctcaccttataattaatgacgattgatcttcgttcgtggttgggaggatatcctgaataggagatgaccattttaatccctataaggctgtgttcgctctaacgtgcgcacagaaaacagaacggtccattagtatgtgattaattaagtattagctaattttttttcaaaaatagatcaatatgattttttaagcaactttcgtatagaaactttttttaaaaaaaatacaccgtttaacggtttgaaaaacgtgtgcgtggaaaacgagagagataagttaggaaacctgagtaagaacacagcctaagtgtttttgtttgttggcatgggtggatgagacgatcgaaagagaaaatattccacgtagatactggataaacatatccagccaaattgaccgagtgagagtatcatatttaaccttgaacatgaaccaaacgtgcactttattgtatccagccctacaacttccttaacttgtgattaatctccattcactgtattcttattccttccatagatacaacgttcactactagaaaaagcatttttgcatatggccaaaagcaattttttcagacggagaggaggatcgcctgcagaccaatgactgtgaaaatcatctattttcgcagttggggcaatggcccgcctgcgaaaatccaataaaaaaacaaaaaaaatcacctcgtcgccgtccatgcgcatgcctcgccgccaccgccctcccccggcctcctccggctggatctggaggggaggggatgggagccgccgccgctgcaacgggagccaccgaccacacgcgcgcctcgccgccgctgccgcaccgggagccatcatcgacgtcgccgaccacgcgcgcgcctcgccgccgccaccctcccccagcctccctccgtccggatcggggaggggaagggaggggaggggagccacccacgtcgccgtccacgccgccgctgccctcccccggcctccctccggccggatctgggaggggaggggaggggagctactgccgccgcaccgggagccaccgatgtcgccgtccacgccaccaccgcgtccgcgcactccgccgctgcgcgctctaccgccgccgcgtccgtgccgccggtggagggagggaggggaggggaggggagaagccggtggagggagagagagagttgagaagataagtttggggaaatgagtggtggggaggggttggaggagtagataagtatcatttttttttgaatgtacgatttttacaggcggaccacataaggtgcgtctgcgaaaatagattttcgcagacgccgcttaagtggtccgtctgtgaaaatacagcgaacttcaccctgatttattttttttaggcagttatttgactccaaggttcatgtctacctacgaaaaaaagaccccacgtcaggaaaaatgctttttctagtagtggttgtaagaaaaagtatgttttatctatattcccatgtacatcaacaatgtagtttaaatgaacttgtccatgtctgtttgtgcgcactgccaccggctgaaacaaacccgatactttgggttgtacgcagcttcttgtttcatatttacattcgtgttaccatgtatatcaacggtgtgtctgtcaatatgtcttactttcctattttcttaccatttaattaatgaagattaatctccgttcatggttgaaatgatatcgagatagtcatctaattgttgagcgtgtttagttagtggataagtatgtatgggacagtcagagagaggatattctacaagaattttgaatgagaatatccggccaaaatggctgaatgagaatatcctatctaaccatgaccatgaaccaaacgcatatttattgtatctagacatacgacgtatttcctttttcctcgacttctaattaatctctatcaatggctttcttgtttcttttcatatatatgttttatgggtgttcccgtgtacatcaatggtatagttttactgtgcttatcctacaacttactttttctttccttgagatataattaaggagtattgatatttgtccggcaacgcggctttcctgttttctatcatctttccatttgttctcctgtatgtagcaacggtttagtaatgttgtgtttggcctcacaactttgcttcctctttccttgatttaattaatactacatgtttgtgacttccctatttccatatccatgtttccatatatgctttcatgtgcgtctatgtttaagttttgttgtactagtcctcgcatcttattttctctttcctcaatttctaattaacaaatattgatctctatccagcaaccaacacaatttctcttatcccatgtccatgtgttacaatagtgatctccgtgtacatagttcaagtttgtgcttcatattttctcgacttctaattaacgagcatcaatccatttctagtaattgatacaccttctctctttccatatctatgtttccatctatatacatcaatggttcaattttagtgtgcctagcctcactttgatcttttgcaagcaacaatgatgtagcccccataaataacacatagcggcaagagcagccaggccatgcccattcactgacgtagcacaaatgcataacaatgttgcttctacacgattcatggttattgccttagtcctatattaggcttcattcggtttagaggatttttataggattattgtagaaattaaatccttaggattttttttctatatgcatcattcgtttcttataaatgtagcctaccaaattcctaaggattgtagtcttacaagctaattccataggatttttagcatgaggtaagacctcttgaaaaaaaatcctaaggaatggagtggatgtgaatcctaattaatcttttacttttcatattcttttgatttaaaaatcctatgaaccgaataagccctaagttctttgacgcggagcttgtgcgaaaaaaattaacagtatcgttgtgcaaataggggtgggtgtttgcttcacttggtcttatcatgaaagcactgtatcattcgttgtaattgctgatccatgctactattgcacttctcaacatcttcatataaggggaaggagaggagaacacaacaacataaaagactacaaaatcaatttaaatctctccttcaaatatgggactaatatttaattagttaccttttgtacttgagttaaaacaaacgcacgctataatgatcgttaatcaacctgtaattccatagattggctctagttgctagggagatggactatgaagatcgatgtggtttttgtataggttttattggcaaaacttatgagatgagcacatgggagaactctagattaatgtaagcacaaaacaagccgagtagttgagatgtaaacgcgactaattgagatcccccgtaaggtgacaccgataggttgtgaggcccacatgtcagtgagcagtactgcacaagcagtactgcaaatgacctgtatccaaacgcgacatgtggacaggggagcagtgtctagcatatgtatgtattatagatttttaaatgttgcacataatggtctttgatgttcaataagtatttttatgatgttttattatttcattttacaaattttgcaccgatgttatgtaaatgttttagtatgcactggtagagaaatgggctttactcccggttcgtaacccccctgtagtcctgattttctaaccgggactacgaatccgggactaaagatcgctatctttagtcccgggtgaaaaaatcggaagtaaaaatctatttttaagtcccggttggagttaccaaccgggactaaatatagagtatctttaccgggactaaagaggctagctcaggttgcaactttattctattcttttcttcattgtttttcatatatagattcattatatcccatcccaaaatcccaaatcaatcaaccccgaatagtctccaaattctcaaatcaatctctaaatacataacaaaatctttaaaaaattacatcacaacttctacaaaattcattacaaatacatcacatattcacatcacacacaaatcaaatacatcacatattcacatcacacacaaatcaaatacatcacatattcacatcacacacaaatcgtctcagatccgaatcacatatttaaaaaaagaaagaaataaaggaagaagatgaacggcctgcagccgc

SEQ ID NO: 8255 - DNA, 36767 bp, Oryza sativa
cacgatttggcgctgaaaaaagggtcacttttgaaataagttttggcggacggttcatttgtaaaattagtttttgcaaaggttcacattgtcaaaattaatggtcgcacttctttctttctctccgttgctcgccttctttctacatgaaaggttttcattttcctccggttgactcaggcagtcaccatgaaaaggcattttctttcataccttttcattttattttgagtaaatttcacaaaattagatatactttcatcaaactatcacaatactacaggtttaaggcaatatatctcaaaactataaattaacactaaaattaccacaaaactataaatttaaggccaagtatcacaaaactacagatttagtaacaaaattatcccaaaactaaaagtttagtaccaattcaatcgcaaaattgtaatgcttatacctccaacgtaatagtagtgctagagatctaaacttgtcgacgttttagcacgactacgatatttgcatggtatgaagatcgttggtacaaaggcatatgccagattgaggtaaaagaaacagtgacaaagatttttatacaggttcaggcctcttattcatcagaatcaggttatagctctactcatgttggccgaagccggtgttgctcttattcatcagaatcacaaaagtacaatatttgagataatctatctagctatcgtcgatatggcggcatgaacaccaacacatagtcgatgatagggtagtcttcctcctcaaatatgaactcagcgagatcagagatagcgctagatccctcttgtcggcctctacatgcactagattgggtatgtctaagctgatatctgatgtcgatgtttggcggcgtgtattagtgtctattctgactgttccgtggcccctctcctcctatggggtcttgtatttatacccatagatgtccccttttgtctaagtaaaactagggagacacgtatggatacaattagagtagtcattatagtttccatgtagaactctacttgttcttctttatccgaaactccttctgtatacaaggtatgattccgtataagatttggaatatggtgggccccgccgaacttaatcgattactattggatatgtgttatccataaccctgacaaaacttgataatttgcagttttgtgatacttagtttcaaatctgtagttttgtgatataacgccttgaatctgtagctttttgatagtttgattaaaattctgtagttttttaaaatttactcttttatttttataccatatttcaaattattaaaacttaacaaattcaagtaaagtttgacactaaatttgaaattttcaattcaaaacctgaaactttcaactcaaatttaaaacttccaactcaaaatttgaaaactttcgactcaaagtttgaaaactttaaagtcaaaataaaatatttcaactcattttttaaaactttcgacctaaagttaaaatatgaaagctttaaatgtcaagttgaaagttttcaaatttgatttgaaacttctaaatttttaattaaagtttcaaaaagtgggttgattttttttcaaaagttaagttgaaaagttttaaaatccatgttaaaattttcaaattctagtaaaaagtttactagattttttgaatttgaatttgttgatgaatattttaaaattaattttgttgatgaagttggcctacaatttgagcttgtggtcctagaggcccagtagatcagaggacgagagaagtgagcgcatgccacatgggagaaaattgaagatgcgtgaatgagaaaaatccatgtgggcctggaattatgcgccattttattctcctagcgcacctgcgctaattagacattccctcctcatctaaactaatcacaacatctcgcattttatttccccttctatttcatctaaactattttttgtttaatttttttgcgtatttctttatcttaatctagtcacaacctatactcattcaatttcacacctcatttttctaaaagtatttatgaagtgattattttgggacgtacaaagtactctctccgtccacgtcccataatataatttggagggatgtgacaaaatatagtacgacgagtttggacagattcgtctgttgacagaaaacacgaggcctgggagatctgtttaactccagtgcaggtccaaaactcgcattcggatgtgtgagcgtgccagttgatttgatcatgtaatcaacaagaaacaaagacaaagaaaccgtggttaaatccataaatgatagccgatcggctaagtgccgatgacatatcatttattttaggccgatgtcatatgtacatcgatcggtaagtattagtaagcaaatcagaactaaatctactcgatcggctgtagatattaatgatatataatcctcatatcgatatatacttaaatcaagtgattggaatagatcggtcaccttgccaagacagtataaatcacttagatcgaaacatatattaatagtgggattatatatattcatagcatagccgatcagatagatctagcatgtatcggctaatattccgataccactctatattaaaatattaaagcaagtaaaatataccaaacaaaagcctaatatacttaaatgcaacaagatcttaacataaagggcagatttaacatatcaatcaagcatataggataaaagtagttaaatcaggtaagatcggttgaaactccgatactaccctaatcggcaaccagaaagcaggctagagattgaagttctaagcacgacttaatagatcaaactgaactgatgcagcattaagtatgaagagaagaataatatctagacaatcaagccgctggatgtttcatagagtggtagatatatcacataatccaagttaacattgttatctaacctaatcggctgccttctattgacaggtgctagtcggttataggttagatgacgatattatcaaagattatgtgagatatatgataactcgacgaattatataaacaagattagagtatcataaagatggaagcactaatctcgagaacacaagtcgtcataacaagttttacctcttattgaagatcgaaaccgatgcagctcaacccgaaagcaagaactcgtcgaaataaaactaaatcaaaagggtggcgatgcgccgagattgtattgaacgtgtgttaataattacatagggttcggggtctatttatacccgagaattacaagatatgtccataccggacacgactattatctctaacaaactctaagataccgtaagtctttgcagcagacttttgtccacatttatctctaaggaatttacataaaatatcctaattaatagatacaattgcctttctcaggactctatccatgtacggcaatcatcttgaagcacatcaactcaatcccgattgtcggatacgagccatattgtcagaattggctgtatcacttaacccagtctgactcagacttagccgtagccgatccggactccagccgattcttactctgcctccgcgataacatcgtcgtactagattgtgtcacatccctctaaaatcccttatattatgggacggagggagtgcgatttttttttttgaaaatcttttcttcattagtaatctatataaagttttcaaaatcaacttaccaacttttgtcataatcaatttgtgttctagaataataatcagtttcagtttcatccgtcatccatcctaacaaagaattcatctaggagtacgacggagagagagtaggagttagcgtaagatatatctaggagtattttttatttcgaatatagaataacgatatacggtactataacagattagtatttgtttgatacgtaatgtagcatagttggcccgtaaaccaggactcggatctctttccgggcacccgaagaactccacgtccgatcaacttacgacgtgtttcgatccacggacatatagaccagccttccggccgctccgtccgttccccctcctctctctccgcccccacccccaaaaaaaaaaaaatccatctagtctctcaatctcgatcaccaaccatgggcgcgctcgtcgaggaagaacagccctttttgcccctcagccgcggcggcggcggcgcctctggtccgagagcagcaagggagcgcggacgctcacagacgagcgacccgtgcctggaatgctgcggcatgatcgtcgggattgccttatttggggtcctcttcggtgccttgggctggttggccatcaatcatcatgggggagtactacgtcccagcgatgccgcagtactccgtcgagatcgcctccgtctccggcctcgacccggcgacggacctccacgccggggcggcgctcgacccggtgttcaacctgaccgtcggcatcgcctcgaagggcgagtatcgcggggtgtgcatcgagccgcgcaccgccgtcaaggtgtcctactcgtacctcggcctcccgctggccgggggccgcgtgccggaggtgtgcgcggggccgaaggagccggccgagaagcggaccgtcgtcgcgcggggcgtcggggtgagcgtgccggggtacatgctggacagcctcgccgaggacatgaggagcggggaggcggtgttcgaggtcaagctgatcaagggagacggcgacaggtacagcaggacggtggcgacgtgctgggccagggtcggcggcggcttggacgataggtgcatctgaatacaaacttccaatcgcgaaaaatcatcacggcttcgtagtgtcagtttatctgaggttttttttcttccttggatggaaattcatggaattttgtcggtcagcatatatgcatttcttttctttgatggattctaccaattggtttatacgtacataatattgtttacaaaatatgcatatgttggaattttcaaatgttgactaaatattatcctaagtgtcaaatatttatgacttaaccaaagaaaggaaaatatttgcatggtatgatcggtctaaaacattgttgatcgatcgagatatataccaaatacaatcggatctatggaagcaaaaagggtgaatagcttatcgaaacccaagtctatttctaatatcaattgcatacaaattgcaaattgcatgtatgtaaacaaaaactaagagttgtggtatattaaatctatttctattttaaaatttaactccacgtaaaattatacggaatattattatttagggattatgaaaaccaccccaaatatcacattgagtttgagattcctccctataggatgatttcaaataccgcccccctataagatgatttcaaatactttcttatttaccagtttgatatttctccccaattgttgttcatgcttttattttttcatctttctgaatgtgttatataatttaaaacatggccctagacacatattctttctcagcgacacaatatcgtatcatatgctcatctttatcgtcctgtatgtaccgaagaaccgtgtactttcagacctcatgaggcaagcacaatagctcatcttttatcgatctcgatgttcaggagcaaagactcatgaccaacattgcccaacgacgtgctaagctccatgaggaaggttgccacggtcatgtcaatattcatataatcgcctgtggggtttgtggccacaagaattagtgagcaacgataatcggagaaatctcaaaacaaactgaatagaggggatatttgcaacaaatcttcttatgtttataggaggagttttaaactcaggtaggcatttagggtagccttttcaattcttttcttgttttaaggaaaattttaaaatccaaaaggaagagagatgatcatatctctaccatatagttcaacaaatagtttcactcatcactcattctttcatctccactatagtacgttcaacaaatggtttcactatcactcattctttcatctaccctatagttcaacaaatggtttcactcttcacccattctttcattcctcattgaacaaatggtttcacttatcactcattctttcattcctcatggaacgatctagatcatctctctaagatccaacgtccctatagttcaacaatggtttcgcttatcacccattctttcattcctcatggaacggttcaactgattcctctcatcttgcgcgtgcatgcccctcccacctgtgcgcataccgccgatctctcctaaaatcatgcactcatggtgatttcagaaaagaaaaaaaaatcatgcactgactatactgtgctaccccccctcaacccccaatctggtgttcatcaagcccgctgcctaagggagccatcgtttcgcttattcgtggaataagcgaaacaacatatttgcaaacgaaaagtaatttgtgaataaaacttttatatacgtgtttttagcgatctaaaagcaaaggttgaaaaataaacttggatgaaaaaaacctcaaaatcaactccaaatttaaggttgaaaattcaaattttggctgataagcataagcgaaaagatgagactgtacgtcagcgtgtcctatgcctaccaagaccccccgctggtcaccgggctggtgccggacttctgcatcgggccgcgggaatcgcggggcgagcttgccgtcgcacgggtgccaatgtgagcgcgctagggtactggctgccaagcctcgccgatagcatgagggcagtagcaatgcgtcacgcctcattgaggaaccaaaatgtccatgttggaaaaaaagcagtcgaagctcacctcagctcccctctccacattgcacttgagctttaggtaggtccaccaccttttcttttcaggccggccccaccaccttttcttctccttccccctctctctcttcctaaagctgacgacgctgacacaaagcggatgaagaacacgtgtctcagtttggtcacacgttcttggtttagtcacgtgaaatgcacacgtggctgagaatctcctatgtgtaagcttgaggctgaatgccacatcactacactgtgaaagcccttaggagcgctcaagtgatgtttgacgtcaatctgcagaagcggaacaggtgggatgagtgcaggacgagagtcggcgagaaggcttcatgccatttagattttgccgaatagttattaggagacattataattccttctgttaatatgtgatacatttattataagaaaatattatgttttcgtttcgttttttaagtgatgtttgacacatttattttgttcaaagattatgtacaaatgcataagatataaattatacataaaatatttttatgataaaacaactcataacaaaataaatgatagtttcgtaaattttttaaataagataaatggtcaaacgtgtatctaaaattcaaaaatgtcatctattaaaatacctaggtaacactaatggtattttctctcattaaatcacaacattctagttatttctaacatttggatgattcacctatatgatgcatatcatgttaatatttttaagagtggctatatttatgatgttatattttgcactaaaagacaatcaaattttcggatatcgaagtttaaactctcccgtatatccacggtggatagaacaaatcaatcgattcaggcgcataaatacataccagacacccgctctgtttggcaagataagattaaaactctaaagtagattccaaagcacaacgtgtgctgagaaagcgatgtccgccgtgatcgcgccgccggcagagcatgagctgcctgtccattgggccgtcgctgagccggacaacactcaacgccgaggtgtactaggaggtgtaagattgcgtatagacaccgtatgcctcgtcatggtttgcatgatcctcatagcagtagccttcttggctatgatgattgttgccatcgtcaaagactggacgcaaccggcctcctactccgtcgcgatcgattccgtcgccggcctcgacccggagacggacctgccccgcgacacgctcaacccggagttcaacctcacgctccgcctcgcgtcgcaacgtgccgacatgggggtctgcttcgaggccggcaccaccgtggcggtgtactacggaggagtcctgctcgccggcgccgccgtgccggcgctctgcgcggggccgcggccgtcggccgaggaggagagcgtcgtcgcgtgggggagaggggtgcccgtgccacgcctggctcgggaccgcctcgccggggacctgcggggcggcggcgcggcggagttcgacgtcacgctcacggtccaaaggtacacctacgccgagtcgtgggatgtcgtgttgtgcagcggtaaggtaggggatgccgccgcgttgataactccgtgcagcctgtacgacgaaaatgtgcaggagccgtcgctggaaccgggttacggcgggtattcttcgcagccggagtcaccaccagagaccggcgatgacggttaaggtgaaggttttgctttgtgatctgtgagccatctgaattttcagatgttgcaaatattgggtttttgttgttgcaatcggtgtgttgcattcaattgaaacatctttgataaagcggctaaatgttctttagtgaaagatgaaacatcaagaaacaatttatgttgaaatatttttttcgagcaatggaacattacgcgcaacattgtccggagacgtctgatgcataggtctatccaaaaagaagcagtcggatgcggacgtttagtcgtcaactcctaacaagaaccggtttcgaaaaaagtgccccaagcacgcacgtcgacatggccgatcaaactatattaatcggagtcgtgcactcccaatcccaactccacaccccatcgtccgtgaggccggcatccccctcccggccacgccacgccaccgtccaagccactaagccagttcatacatacgaaacaggtagcgccgcgtcgtcgacgacgacgatgcccgcggacttcggggcagaccaagatcggattcgacgtctcctccgctgtttcagtggcatcgcaatagcggtgttggtcgtagtggccgtgctcgtcttgtgcgcattggaggcctccaaggccccgcggctgtccgtcgcggtcgccatcgtctcgggcctcgacccggcgacggacctcgcccggccagcggtggacccgcagttcaacctcaccctccgcgtcgcctcgcggagcctcctgagccgcgcgtgcgtcggggtgagcagcacggccgtggccgtgtcgtaccacggcgtccggctcgccagcgcgcccgttgcgccgcgcgtctgcgcggcgcggaggaagtcggcggacgcggggccgttcgtggcgtggggctcctcggtgcgcctgccggggttcgcgcgggacagcctcgccgcggacatgaggaacggcgcggcggcgttcgacgtcgcgctcatggacgggcacctggtggtgtgcaggggcaggcgggtcggggacgcggacgccttgcaggctccgtgcgtcttgacccacgtggaaacgggtgcggcggtgccgcacacgggaacgtaaagaggctcgccgtaagagtatatctttgctcggccggccgtgatcatcttggcacagttttttcttagcccagatcttagcgcaattgtcttagtatttcgaactgatgcgatttttgggttacttttgtatttcctgcaagattattagtccaaattcaggttattttcttattctttaataatgtaaaatcctaaaccaaaatttctatacacacatcctttacttgtaagaaactcaaatggttatgaacaaattatacattttgactaacctagcctatgatgatttaagtcaatatataaatgtgtggtttcttcatctatatataccgttaaatttaaattttgacgtacatgcttatgaaagaatccttatattatcataatctaccgtagcaacttctattaaatgttcccctcaaaaatatttctattaaatttatctataacacgagcacgtacgtatgtgtgcaacatactctctccatctaacaaaactagcctagtattaggatgggacacatcctagctagtaaatctggacttatattttatattagtgaggttgtctttagttccacgcctaaattggaagtttaattaaaattggaagtttgaagaaaaaagttagaagtttatgtgtgtaggaaaattttgatgtgatgaaaaaattggaagtttgaagaaaaagttgggaactaaactcagcctgatacttactcctcctgtcaaaaaaaataacctagtacattttctattgtaaatttgatacctcttaatacttagatattatatagtattaaattttacattaaattaaatttaatacctcattatacctcaataataacagtaaaattgctcattatataaacaacagtttcttaaccactccctccatccggtcttaggaaacgtaacgtcggtgcgacaccagttactataccttcgttgaaaccaaacgctatattaggtaaaaaagaatacattaacatatataatttccgggatatggaaggctcaaactacgggaactatccgtgtgtattcgatttcagactgcaacatataccatttttaaggcttcagaagctaccaatatgtcagatcaacgtgtataaaaacccaggccgccgtacccctgctttatccatcaaaaacgcgaggacgaagcgaatcgaatacaaacagaggctaaaaatcaacgtacaacaatgctgcgcgcggcgccgatccaagtgcagccggcagagccagggccacctcctcgtcgctgcagcgcctgcgtggctgtctttatcacattcgtcatattgtccgggttgttgttcgtgttagtgctctcagccgctctatttggtgagcagaagtactacgtcgccatagacaccgcctccggcctcgacccggcgacggatcttccctggccagtgctgacccctgagttcaacctcaccctccgcgtcacgtcgtggagcgtcgttggagccgcgtgcctggatcccgccatggacgtggcggtggcctaccggggcctcgccctcgcgcgcgcgtcgccgccgccgcgtgtctgcgcgcgggggtggggccggacggagcaggtgccggtcgtcgcctcgtcggggaacggagtgcgcctgcccggtttcgcgctgcacggcctcgaggcggacgcgtggggcggggctgtggcgttcgacgtcgcgctgactatgccgccgaagggcagagacaaccggcatcagctgtggtgcagagctgtgccggtcggcgatgacggcggcttggggatcccgtgcaatgcaaattcggagtactaaaggtattagcggtgcgaattaacttgtgtcaacagtgatgtgcgtgcatgcacgcgtgtgtctgtgcgaacataatactatgtgtctttgtgtttttctcccgtgatatagacttgattatcttggatggtgaaatactgtaacgttactacagggtataactatttatagatacatgtgccataatttaaaatagggtctaaacctcggacttgctggtgatccgggtctagcaaaacaacggcgtttgtctactatatcggcacacagatgaaacctctcgttgcttgttcatagactgcagatacacaaggaaaagctaagacaccattgccaactagatagcctataaccccatcaaaccaacaaactgggtgcatgtgacccagtctatgattggtgggagtcacttgcaacacgtcagagcgcacccaagcgtagtacttgatccataattctcctagtctcatgggaaatatgaaaggaacggaatcactgaattttccgaaataaggagttatccacggcggccctcattgtgaacataaaggaagagtcaaaatctcgggctttggcgggagccaaacacctaacggagatgttgccatagttccccaatcttttttttttgtaaatattaccttactccttacttaaatattacttccttctacataatgagtgagacatggggaaaaggctagcttctcctctctttctcaatcggttttgtgattaaaagtaattaataattaaaaatagttttattactctgattggtattcgggctaaaattctagaaccaaatctggctcgggtaaggtaacaggcttagtcgaaattaatactacaatattgtgatgtccgattgacgaatttgttttttttcttataactcaaggttaccgagattaggatccatccaaacctgcgacgcgtagtgatcatcaatgaactcgccggaagaacgaggcatgtcagcggcagcggctacggaggtggaagcgcacgcagcagacagccctcctcgccgtcgcctgtcgggtcgcaaccatggcgataactgcctgacggttttgttggtagtgctcctcttgctcatcgtcggcggggtagttttcttcgtagtcgattccaacacgagaccgcggtactccgtcgcgatcgacgccgtctccggcctcgacccggccgcgacgggtgatgacgggcggggtcccacgctggacccggtgttcgacctcaccgtcagcatctcgccgcggagccgggtaagaggcacggactgctacgagcccggcaccaccgtggaggtgaactaccacggcgtcctcctcgccagcgggcccgtcgagcagctgtgcgcccgggcgacgaagacggggcgggggcgcgccgtcgcgtggggcaccggcgtgcgcttgccggggttcgtcctggacgcgctcgtgtccgacgtgcggcgcggcggggtggaggccacagggttcgacgtcacggtgaagatcccgtccaccggcggtggcgaccgctccagcccggccgggatgctcgtgtcgtgcagggcgaggcgggccggggacgacgccgccgctgtgttgaggactccgtgcgacgcgctgagcgcgaacatcgtcgtgccattgccgaacacggggaggacgcagacgggcggtgccagttaacattgtgtgaataacggcgacgtcgtcgtagcacgctgcagcctgcacgcagccatcgctacaagtctacaactcacaggtcgcgagtcgcgaccagttaattcgacggaaagtctgtaccgtaccgtccggcaacgaagcagaggattcaagaaaagcgactaaacagactttcactgtatactatttatatgtttttttttgcttcacttttgttgaagctattgatcaatgaacatagtgttcattgcaggattatatttgtaaattttttaaacagaattactaaaacaaggccggaaagtattccttcttctacgggaacatgcatctatatgtgggcatgttcacttcttttgttgctgaatagtaaaatatgaattgtaataatcattcgagggcataaacgaatttaattaaatattataaagttaaaaaggatttaaaacagcattgtaacatattcatatgtagaatttttttttgccaaaatctcttcatttagaagctcgggaagcatgcacaattatccaacattctactgcacagagagaaagtactccaggtagttaggtacctcgagttaccaaaacctttgatacttaccgtaaaatttctccttttctaatttgtgttttcttttgatattgtatgttaaaatgttcttagaattttaactggcaaacttttaagggcttattcagttaataggttttcaaaatcgaaggaatacgaaaagcaaaagattagcaagttatacgtactccactccttaggatttttatcaaaagttctcaccccatgataagaatcgtatgaaatagggttataagattacaattcttagaaatttgataggatccaatcctataaaacaaatgatgcatatagaaaaaaaaaactaagattttaattactacaataatcttacgaaaattctttaaactaaatgagcccttaaggcgtggatctttcggtgcttgataatcaattttgctagctgatcctggctcagctcgtagctatgtctcataccggtggttcatgctagcagagttataatcttgatggataattttatcatccatgagaaggtatcaggaggtaccatattttgtaatgtaaaaaaaataaggacaattttaccatacttaaaaagctatctagtgttaaacttggtacttctaggtactaagtatctcaatatatcaaaaattttattgcaaaatttagatacctcaaggtacattctcaaatactataaaattcctcaaaacttaatactttcagataataggtactttgagatataaagtttttattgtaaaattttgatactatagatactttctcaaaaactctagaattcctaatgtcaattggccgatgagtttcaagccgcggcgagatgtcgatttttcgttagtttcatctcttttggtaaatttctaactagtaaaattcaacgagttttgagccggctcgatatgctcgaaattcactaaattcatcgattgtgaatccgggcaccaatttgctccagcgggaagaaggaaagagaggagaagaaagaggagggaagtagggaacggaggaatacatattcggatccgacttgtactgggagacctagctagcttcggagtctccagttgtttccaaacaagagtcgacggaactccaaaaaaaactggcccgccttgctgatcgtgaacacaaaaatccctcgacatcgcccctggtcttcaagccaaaagcagcgacgcgatttgaagttatcgacgaagtccgctctagaaggaagagatgccaagggagcgagcgatgcagatggaagcgtcgccggaagaacttccctggggctgctgcgtctgcgcgtgcgtactcatccccgccgtcgtgctgttcgctggcttgatcttcttcgcaatcgacgacaatgacgcgctgtactccgccgctgtcgacgccgtctccggcctcgaccccgtttcggagcttggccgggatcccacgctggacccgactttcgacctcaccgtccgcatcaggtcgcggagctggttgcgcggggacgagtgcctcgagcctggcactgccgtggaggtgacctaccgcggcgtcctgctcgccagcgggcccgtcgagaagttctgctcgggagggaagaaggcgaaggaccagcacgtcgtggcgtggggcaccggggtgcgcttgccggggttcgctctggacgcgctggtggcggacgcgcggcgcggggcggaggcgttcgacgtcgcggtgaagatgccgtccaaacacaggggtcacgtgacggtcgacgggacgctgatatcgtgcaaggcgaggcgggtcggggacgccgccgcgctggggacgccgtgcgacgtgtccagtatggacatccccgtgccatccccgaacacggggaggacgcagaagactggcggtgccaattagcacgtgtatgaataacgtcgctctcggcttgtggtagtagctacagtacacatccgtctgctgtgcggagtttcatgttaagtttagagttggggctcttttttctttgtttaatctgtttcttttggaagagattggcagttgatcaattgatggcctcaatgtgtttttccgatatagaagatgcatacgtgcccacgccaatatacacataaacttatcacatatgcaacagcaaataagtcccttgcgcacgttataggggcaaagactagcggaaaattccagtcttaataaaatcctactcacccgttccatattactttttcctattaactcaaattttaccaaaattatttaaaaaaaatactcactccgttttaatacatgtcgcccttggctttttaatatacgtttaaccatttattttatttaaaaaattatgtagttattactccatccgttccaaaatataaaggattttggacggatggacactagtactacgaatctagactgtccaaaatctcatatattttgggatggagggagtatttatgttgttgtagcttgatttatcatttaagattcttgaagcacaacttatttttatgtttgtacaaacatcttcaacccaaaatataaatactaacaaaatgtagttaattgtagatttaataaagctattttaatattgtagatattgttacctttcttctaaaagggagtattaataaatatccgtatatgtgtaatatttgcagacatcgaaattttgatagaatcatgtactagctacttcacgaagatatgattccaagaaacaaaggaagtccaaattataacagtaagaaaaacaatcccgtacgggcctgggaatttttttagaaaaaaaaaagaaagagatcgaccaactaagatgtctgttgaagcctctaagaattgcaatagttctataaggtgacaattttagaattgtttctctacaaatccaaaagatcatgcatacccttatttgttccatcctattaaccgacggtccttattcagaaagtagtagccggccgccgactcaattttatcatatattttctggacgtgactacacagctagtggtagctggtttgtctaaaccaactaccactctatatatgaaagacactatccacctataattttaatacaattttctcttaaactactcatccgatctacgatccgattataccgttgtgttcgtaacaattaaatctttataacaagatcccacatgattatattttgatgaaaaattataaattaattttataatatatataaattacttttagatttcactaaattacttcttagacatatgaaagtaaattcaataaagcctaaaagtaatttacatactccctctggttctatattaattgatgttttggacaagattgaggttaaacttttataactttgaccatcaataactttaaaaatatttagtttaaagaaactagaaaaacatatatatatatttgtctttcaaaacactataataaaagtaaacatgcatttatttattgtatatattataatagaaaaataaggtcaaagatatatcttgtagagcgtgtcattgtccaaagcgtcaattaaaatgaaaccggagggagtatattatagaaataacttataacaaaaagaaagtaactttattgaatgccttttttctcattggacatgactacacagctaaaaatgaaaggaaaaaaaacaatcgatgattaaacagatttatagagagttacttttgaaccatgcaaaagttacttccaattaacattgaagttaggtggtgtttggatccagggactaaactttagtccctaacatatcggatgaatttggagtattaaacatagactacttataaaactaattacataaatgagagttaaatcgtgtgacaaaatttttaagcctaattaatccataattagcgcatgtttactgtagcatcacataggctaatcatagattaattaggctcaatagattcgtcttgcgaattagtccaagattatggatgggttttattaatagtctacgtttaatatttataattagtgtccaaacatccgatgtgatagggatttaaaagttttagtgccatctaaacatggtcttacttttaaaaattgttaaacttacgtgtgttgatctgtgttgattaaattttatttctagataaagtcatatttttatccctacaacgaatttacttctaatgtcgtgacaaagttacttccgttttgttttaagttacttttataatatatgtaacttacttttagactctattaaatttacttttatatgactaagaagtaatttagtcaaatataaaagtaacttatatatatgataaaagtaacttacatatatagtaaaagtaatttataaatataaatattttttcatcgtaatataatcatgtgaaatcttgttgtgaagatttaattgtaacgaacacaatggtgtaatctgattgtagatcggataaataatttaagagaaaactttgtttggagaggaaaaggacatacatgtgctgtagtagacttctcaaaaaaaaaaaatgcatgcatgcagtacgctatagtagacttctccacacgttgaggcgtcgctggttaaggcaaaaacgagaggcctctccaaatagattttacgatattttctctaagccaaaataaaatgaattttagtagatgtgacacattttaatattatacgaatctagatagaaaactagtactagatggatcataaccaaccaaaatctcttatatttcaaacaaagaggatatatttgcaatgcgtgcgactacagaaataaattctaatccttcgagagtcatgtccctcgatcttacatattatctaaatggttataaaaaaatgtaagaaaacttggtaagatagccacacaaacatgcaagttctgccgaatgttattccattattaaaaaaaggtacagtgtaaatttgatctacataagttgtaacaaaaatagaaaatttaactcttaactactctacgtgtgttcatagtattcctttttttacaatttgtataagtcaattttacgtatagtgacatattacatactgtattaatttatcttatcaaattttatcactatttatatactcccttcatttcatattataagttgttttgaatgttttttattaaacatttttaagttcgactatatttataaaaagtataacaaaattactatcacaaaacaacaatttttttttaaaaaatatattcaatgcttcttttaatgaagctaatttggtattatagatgttgctaaatatttcaataaactttgtcaaatataaaagagttttactagaaaaaaaatcaaaatctctatctcttctctactattataaaattttaagatgattttaccggtactttggtaagtcattcgtgtatgagtcgggttttaatttcctttgcttttgcaaatacgtatccgtatttgatattacatattaaattatcttatcaaattttatcactatttatatactcccttcatttcatattataagttgttttgaatgttttttattaaactttttttaagtttgactatatttataaaaagtataacaaaatttctatcacaaaacaacaattttttttaaaaaatatattcaatgcttcttttaatgaagctaatttggtattatagatgttgctaaatatttcaataaactttgtcaaatataaaagagtttttgtcacgccccgaactagtcccgaccggaactagcccgtgacgctccaaattaacctgttaatcgataccagtcccaggaaacagtcctggtatcacaggaagacagaatatcacagcaacagaggtctctttattatagagtagaggtacagtcatgttaggctgcggacagatcccgagctcacaactgcattacaaaagggaagcggaagccaagactcggaccaaacaacacaggcgcgacttgggaactaggccgaaaccctaaaactcatcgtagccggcttgctcctagaagaactcgtcatcagagggatccgcttcatcttcttcagcaactgggggggattatttatatagaggaagggtgagtacgggagtactcagcaagccatgggaaataagtgtttaatgcagacttcaaggaaaggctgttgtttttgcaattgattttatttgatatcttttctgaaaacaactaagtgagtgcttgtcgcgtcccaaaacgactctaaaatacatcctcgaatttatgcctagaataattaaaatccgtgtgaaagcctccacaattaaaatgtgcaaagttaaaagtcaaataaggcttggaggatttttgtatatttcctaaaagcctaaaatgcgtaaataaattttagtggaattttcacagcacaaataataattattaagaaataaacaaagttaaaatgattttataaaaagaaaaaccctaaaaagttccctttccctccccctctctctcttgggccggtccggcccagctctctatccctccctctcctctccccgcggcccattcggcctcctccccgcgcgcgcgccgctgacgggcgggcccgcccgccactctcgctgacgggtggggcccacccgtcatccccttcctcccgccgctcccgccgccgccgcgaatcccgccgcccccgtctgccccgcgtgcaatcaagaggggggaaatattccccgtgattccctccctctttccccccatttttccctccctctctccctcggattcgtttggaaatctctcccctaacctcgccggcgccatcaatggcagccggatcttccgcgcccgtttcctcctcgtccggccgctctctctcactcccgaccctatataaacactccccgtgcctccctccaccgtttccgccactcgccgccctctctccccgtcggaatcgagctcgcgccatcgctctctctctctgccgtcaccgccgagctccggtccgccgccgtcgtcgccccggaccacctcccgcctcggcgtcgccaccttcggcttcaccgcatccccggcgacctcgtccacccctccgtttcattcgccgaccgccggaacgccgtcgaccccgtccacccgagccgcgccgccgtcttcctccgctccggtcgccgtttccgtcgtcgccgtcgacccggggtgagccgtggaccgccgcttcttttccccctccccttcccctctctcggccgccgctccgccgtgcctatggccgccgccggcgaccataggggcgcgggcgcgccgcctcccgccgctgcgccggcgtggccgccttcgggcgcaccgtgcggctgccgcgtggggcccggctgtcagccgcccgcgccctcgggtgcggctgacgcgtggggcccacggcgccgcccggtgcgagcccgggtgcgcccggtccaccgtggaccgtgaggctgccgcgtgggccccactcccgtggacccggtccgcgcgcccctcccctcggctgacgcaataaatccatttttaaattaaattttaaatgaagaaattcgcaaatattcatttaaagagcatataaacttcaaatggccataacttggccatttgaactcggaattggaccgttcaagtctctaatttttccttaagaagtcaagaacctatttttgtgctttgttcctgcttgttatatggagtttattagagtgaaagccttttcttttccgttggtcgtgtagacgctgcagcttcggaagatccgctcttcgtggaagttgaagccggcgtttgggaaagcgagcaaggcaagtcacatcatccttgaacatattgaatcccagtttataaaattatgttgatttaaattattgcattatcgctttatttaaattcccgcgtaatcactgttttatttagccatgcctatttacctttgttatgaccttattattgttattgttattatttccttgttcaccctagaataaacaaaaccccaactagtggacactctactcatggtaccactagtatgattttaggtagatgcttcgctatttaattaggtaacattaggcggttttacaactctagactttgggatattcatatcacctggacactttggaattgttggagtattgtggaattggattcacacctccccctctattcaaaatccccaaaatggttttaggctgggctcggggtgcatggttttgatagtagcacctcggccatataaggaccggtcttcgggcctctgttgcaaagcactaccgtacttccacatgtctagtgggtaaggcttagtttgtggctcagtctggttataaacaaaagtacacggatggagatggacgaagtcgggggtcgatggacatctctagggcaaatgaaggctacacgagctgcggcccggtagtcgagatgtcatggcacagggccggtgtcctgctgctaggggctcagtcctgcctacctgtcccggagattccggccgtaggtgggattgggtcggtactcttgtctatggctaggatgggttggaaactatgtcacgtcttccgtctgtataccgtggtggtatgtggcacgtggttgcacgtgaggaagatgtgtcttgtgggtaaagatgtacacctctgatcagagtataacctattcgaatagccgcgccctcggttatgggcaagccgagcaatgtacccaagttagtgttttaattcttaaaacctgcttaacaactaaaatgtggaatggttggcctggattggcttgggacgagctgggacccagggtcgggttgccagttcggtctgaatcatcgtaggccttgggttaagacaggttcgtgtgggttcgccgccttgataaataataatgtatagttctagaatcgtgtctacaaaatagctttgagcaactaaatatctttaaatgccgtttactgcaaccctaaccctttatattctaattcccttgtactcccttgcatttattctgcacttgtgggtgtgtcttgttgagtacggtggttgtactcagtcttgctcaatttttcccaaacccagaagaggagcctctggaagatgaaggctttagtgtctagctcgtgcctgccgtcaagcgcctgtggtcgtcgccctagtcttccgctgtttcccgtttgtctttgtgtgtgctgggccttcgtcgcccatgtaataaattaactatttacgcttccgcttgatatactctgaaatgtatcaactcttggtgtaccttgcctcctgggacaaggaataatacacgcacgtaaggaacgcccgttgggttaattccggtcgtgacaagttggtatcagagccacccttgaccctaggacgagccgtagatcccaagccttagcaatattttcaaaaataaaaatcctgtcttatttgtgaaaatcctctagtctctctctgtcttgccgcttcatttatcgccaaaatctgatctttaaaatgttgcttttctttttgtttttgtttgtagatggccggcagcatcaaccgtcgtggtctggacctgactggctttgttttggagctgcggggcatgtgtgttgtcctggggtatccgcatggagtggactaccagggcaggcagctcccggagcaggagggtgacgatgcagagccccacgctgcttgggaggttactgcagtgatcctcactggctctcccgagaggacttcgttggcagtcaccgcgggtggagattctttctccgccgcttgccagaacgccgctctcctcgccatcggcactcttcaccagcgctacccggacgagttgcagcactcgccctaccgctaccaccctcgccgcggaggagcccgcgaccacgccacctttcgggatgctagctcggaggatgacgctaccatcatgcatctggcgcgcatggtggaggcgtacgacgcggcccgtatcgacttccatcagatggtgcgccgtgggatggtcgagaacagcatgaagatcctggagctgcgtcaggagaatctgcagctgaagaaggacctagacgcagtggaggcgcagctgcatcagctcaagatcgcccagggagaggtctgtcgccccaagcgtcgccgcgtctgccgcagccagaagatcaccgcccgcaagagtacctccaggcccgagcttgttcgccagtccttggcatggacctgcttcgtcgagacccctcgtgccgagcccgcgcccgtggttcctcaggagggggaagcctcaggcgttggtagcacggaggatgcgctgttgctcaccttccgtcctggcccgtcgcagcggtagacgagcagttagtaggcttgcgcgtgtgttctttctcgtttgtcttcttgttggagccgtgtggggcatggttatgccggtgtgtggtataactgtgtcagagcctgtctttattttatttgcctaagcaacttgaactttaatgaaccaatttaatagcagtaataaattcaagaattatggtagtcgtgggtggttagctttaattgtcagctctctctgtttgctggatctgtgtggggttgtcagatggtgacgaccaggagaagtgctaacaccggtgatggcaaccaacctgaaggcagcaaccacaacaaccatggcagcccacctccacctcctcctccgcctccaccaccaccactagacaccaatgccatcctcacccaaatcctagcccagcaggccaacatgatggctgctttcctccaccacatccaaaatccgccacaacataatgctccaccaccacccccacaacactctaaactcgccgagttcctccgcatccgtccacctaccttctctagctccaataaccccgtggatgcattggattggttgcatgccgtggggaaaaagttagacaccgtgcagtgcagcgatgaggagaaagtcgtcttcgccgcccaccagctgcaggggcccgcatctctatggtgggaccatttccaggctacgcagccagaggggcagcctattacttgggcccgcttcaccgccgccttccggaggacccatgtgcccgccggagtcatggcccttaagaaaagggaattccgagagttgaagcaaggcaaccgctccgtgatggagtatttgcatgagtttaacaacctggcccggtacgccccggaggatgtacgggaagatgaggaaaagcaggagaagttcttggcaggaatggaccctgagctgtccgtgcgtctagtctccggtgactatccggatttccaacgtctggtggacaagagcatccgcttggaagccaagcacaaggaactggagtcgcacaagcgccgcttggcgaatttccgcaatcaacagggagctaactaaaggatccgctacaccaatccctatccagggggatcgtcctcgcagcagcaacagcagcaacaacctcgctccgcgccccgacctcaattcgtggtgcgcatcccacagccgcaacaacagcagagtcagcaagggacccgtgcgccccgtcctcctacgacagccgcgcagtctggtcaaggccgcagggacgttcaaggtccgcagcgtctgtgcttcaattgcttcgagcctgggcactttgcggataaatgcccaaagccgaggcgccagcaaggccaagcgcctccccgctccaacaacggtggtaaggatgtcattcggggtcgtgtgaaccacgtgacggccgaggacgtgctgacaactccagacgtcatcgttggtacgttcctcattcattccatccctgctaccattttgttcgactctggagcttcccactcgtttatatctgtgccattcgtggggagaaatcagttgggggtagaaaggcttaggaaccctccgctcatcaccacccctggaggggttatgacagcaaagtattatagccctgctgttcctatagaaattcagggaattccttttccttcggatctgattcttctagacaccaagaacttggatgtgatccttgggatgaattggttggctcaattccaaggagtagtggattgcgcgagacgcactgtcactctgtaccgagggccggaacaaccggttgttttctttgcacccccaacctctgtcagtagtttagaacttcatcagataggactgtcagaaatccccatcgtcaaagagttcggagacgtgtttccggaagaactacccggtatgccgcccaagcgagagattgagttccggatagatcttgctccaggaaccactcctctgtacaagcgaccctaccgtatggcagcaaatgaactggccgaagttaagaaacagttggaagagttgaaagaaaaggggtatatacgtccgagtacttccccctggggtgctcctgtgatttttgtggagaagaaagacaagacgaagaggatgtgcgttgactacagagctctcaatgaagtcaccatcaaaaacaagtaccctcttccccggatcgatgatctgttcaatcagcttaaaggtgccacggtattctccaagattgatcttcgttccggatatcaccagttgcgcatccgtgaagaagatattccgaagaccgcattcaccacgcgatacggactgtatgaattcacggtgatgtcgttcggtttaaccaatgctcctgccttcttcatgaacttaatgaacaaagtgttcatggaatacttggataagtttgttgtagttttcattgatgacattatggtatactcacaatcagaggaagaccatcagcaccatctccgtctggtgttgggaaagttgcgggaacatcaattgtatgccaaacttagcaagtgcgagttctggttgtccgaagtcaaattcttagggcacgtgatatctgctaaaggagttgctgtggaccccgaaacagtgaccgccgtcaccgattggaagcaacccaagacagtcactcaaattcgcagtttcttaggtttggctggatactaccggaggttcatcgagaacttctccaaaatcgctcgacccatgacacagttgttgaagaaagaagagaaatttgtgtggagcccgcaatgcgagaaggcgttccaaactctcaaagaaaagctggtttcctcgccagtgttagtcttaaccggatactcgcaaggacttcatggtgtattgtgacgcttcgcgccaaggattggggtgcgtgctcatgcaggaaggtcatgtggtggcctatgcctcacgccagctacggccccatgaaggcaattaccctacccatgatttggagttagccgctgtggttcatgctctaaagatctggcggcactacctcattgggaatcgctgtgaaatatatactgatcataagagtttgaaatacatcttcacccagtcggatctgaatcttcggcagaggagatggttagaactcatcaaggattatgatgtgggaattcactatcatcctggtaaggccaacgtggtagccgacgctctaagtcgaaaaagccattgcaacactcttgtcgtccgtggcattccacccgaacttaatcaacagatggaagccctgaatctaagcatagttagtcgtggattcttggctacgctggaagccaagccttccttgctcgatcaaatccgcgaggctcagaagaacgatccggacatgcgtggactcctcaagaatatgaaacagggtaaagccgctggtttcacagaggatgaacacggaaccctatggaacggaaatcgggtatgcgttccagatgtcagagaacttaaacagctgatacttcaggaagctcacgagagtccttattccatccaccctggcagcacgaagatgtacttagacttgaaagagaaatactggtgggttagtatgaagcgggaaattgcagagttcgtggccctttgtgacgtgtgccagcgtgtcaaggcagagcaccaacgaccggccggacttctccaacctctccaagtaccagaatggaaatgggatgaaattgggatggatttcatcaccggacttccaaaaacccaaggtggatatgattctatatgggtagttgtggaccgattaaccaaggtagctcggtttattcctgtgaaaaccacctatggagggaacaaactagccgagctctacttcgctaggatcgtgagtctccatggcgttcctaagaaaattgtatctgataggggaagccaattcacctctcacttttggaagaagctccaagaagagctgggtacccgattaaatttcagcaccgcgtatcacccgcagacagatggacagaccgagcgtctaaatcagatcctagaagatatgcttcgcgcatgtgtcctagatttcgggaagacctgggataagagtctcacctatgccgagttctcctacaataacagctatcaagccagcatacaaatggcaccctatgaagcgttgtatggacgcaaatgccggacaccgctattgtgggaccaagttggggaaagccaagtgttcgggactgatatcctgagagaagctgaagctaaagtcagaaccattcgggataatctaaaggtggcccagtctcggcagaagagttatgcagacaaccgacgccgtgacctggaattcgcagtggatgactttgtgtatcttcgggtcacgccattgcgaggtgtacacaggtttcagacgaaagggaagctcgcacctcggttcgtgggtcctttccgcatcattgctcgacgcggagaagttgcttaccagttggagctgcccgcctccttgggcaacgtgcatgatgtgttccatgtgtcgcaactcaagaaatgtcttcgagtgccatccgagcaggccgactcagagtaaattgaagttcgccaagacttgacctacgtggagaggccagtgaaaatcctggacaccatggagcgcaggaccaggaaccgggtaatccgtttttgcaaggtccaatggagcaaccacgccgaggaagaagctacctgggagcgtgaagacgagctgaaggcagcccatccggatctcttcgccagttcttccgaatctcggggtcgagattccgtttaaggggggtaggtttgtcgcgtcccaaaacgactctaaaatacatcctcgaatttatgcctagaataattaaaatccatgtgaaagcctccacaattaaaatgtgcaaagttaaaagtcaaataaggcttggaggatttttgtatatttcctaatagcctaaaatgcgtaaataaattttagtggaattttcagagcacaaataataattattaagaaataaacaaagttaaaatgattttataaaaggaaaaaccctaaaaagttccctttccctccccctctccctcttcggccggtccggcccagctctctatccctccctctcctctccccgcggcccattcggcctcctccccgcgcgcgcgccgctgacgggcgggcccgcccgccaccctcgctgacgggtggggcccacccgtcatccccttcctcccgccgctcccgccgccccgcccgcgccctagcgccgccgccgccgccgcgaatcccgccgcccccgtccaccccgcgtgcaatcaagaggggggaaatattccccgttattccctccctctttccccctatttttccctccctctctccctcggattcgtttggaaatctctcccctaacctcgccggcgccatcaatggcggccggatcttccgcgcccgtttcctcctcgtccggccgctctctctcactcccgaccctatataaacactccccgtgcctccctccaccgtttccgccactcgccgccctctctccccgtcggaatcgagctcgcgccatcgctctctctctccgccgtcaccgccgagcaccggtccgccgccgtcgtcgccccggaccacctcccgcctcggcgtcgccaccttcggcttcaccgcatccccggcgacctcgtccacccctccgtttcattcgccgaccgccggaacgccgtcgaccccgtccacccgagccgcgccgccgtcttcctccgctccggtcgccgtttccgtcgtcgccgtcgacccggggtgagccgtggaccgccgcttcttttccccctccccttcccctctctcggccgccgctccgccgtgcctatggccgccgccggcgaccataggggcgcgggcgcgccgcctcccgccgctgcgccggcgtggccgccttcgggcgcaccgtgcggctgccgcgtggggcccggctgtcagccgcccgcgccctcgggtgcggctgacgcgtggggcccacggcgccgcccggtgcgagcccgggtgcgcccggtccaccgtggaccgtgaggctgccgcgtgggccccactcccgtggacccggtccgcgcgcccctcccctcggctgacgcaataaatccatttttaaattaaattttaaatgaagaaattcgcaaatattcatttaaagagcatataaacttcaaatggccataacttggccatttgaactcggaattggaccattcaagtctctaatttttccttaagaagtcaagaacctatttttgtgctttgttcctgcttgttatatggagtttattagagtgaaagccttttcttttccgttggtcgtgtagacgctgcagcttcggaagatccgctcttcgtggaagttgaagccggcgtttgggaaagcgagcaaggcaagtcacaccatccttgaacatattgaatcccagtttataaaaatatgttgatttaaattattgcattatcgctttatttaaattcccgcgtaatcactgttttatttagccatgcctatttacctttgttatgaccttattattgttattgttattatttccttgttcaccctagaataaacaaaaccccaactagtggacattctactcatggtaccactagtatgattttaggtagatgcttcgctatttaattaggtaacattaggcggttttacaactctagactttgggatattcatatcacctggacactttggaattgttggagtattgtggaattggattcacacctccccctctattcaaaatccccaaaatggttttaggctgggctcggggtgcatggttttgatagtagcacctcggccatataaggaccggtcttcgggcctctgttgcaaagcactaccgtacttccacatgtctagtgggtaaggcttagtttgtggctcagtctggttataaacaaaagtacacggatggagatggacgaagtcgggggtcgatggacatctctagggcaaatgaaggctacacgagctgcggcccggtagtcgagatgtcatggcacagggccggtgtcctgctgctaggggctcagtcctgcctacctgtcccggagattccggccgtaggtgggattgggtcggtactcttgtctatggctaggatgggttggaaactatgtcacgtcttccgtctgtataccgtggtggtatgtggcacgtggttgcacgtgaggaagatgtgtcttgtgggtaaagatgtacacctctgatcagagtataacctattcgaatagccgcaccctcggttatgggcaagccgagcaatgtacccaagttagtgttttaattcttaaaacctgcttaacaactaaaatgtggaatggttggcctggattggcttgggacgagctgggacccagggtcgggttgccagttcggtctgaatcatcgtaggccttgggttaagacaggttcgtgtgggttcacggccttgataaataataatgtatagttctagaatcgtgtctacaaaatagctttgagcaactaaatgtctttaaatgccgtttactgcaaccctaaccctttatattataattcccttgtactcccttgcatttattctgcacttgtgggtgtgtcttgttgagtacgatggttgtactcagtcttgctcaatttttcccaaacccagaagaggagcctctggaagatgaaggctttggtgtctagctcgtgcctgccgtcaagcgcctgtggtcgtcgccctagtcttccgctgtttcccgtttgtctttgtgtgtgctgggccttcgtcgcccatgtaataaattaactatttacgcttccgcttgatatactctgaaatgtatcaactcttggtgtaccttgcctcctgggacaaggaataatacacgcacgtaaggaacgcccgttgggttaattccggtcgtgacaagttggtatcagagccacccttgaccctaggacgagccgtagatcccaagccttagcaatattttcaaaaataaaaatcctgtcttatttgtgaaaatcctctagtctctctctgtcttgccgcttcatttatcgccaaaatctgatctttaaaatgttgcttttctttttgtttttgtttgtagatggccggcagcatcaaccgtcgtggtctggacctgactggctttgttttggagctgcggggcatgtgtgttgtcctggggtatccgcatggagtggactaccagggcaggcagctcccggagcaggagggtgacgatgcagagccccacgctgcttgggaggttactgcagtgatcctcactggctctcccgagaggacttcgttggcagtcaccgcgggtggagattctttctccgccgcttgccagaacgccgctctcctcgccatcggcactcttcaccagcgctacccggacgagttgcagcactcgccctaccgctaccaccctcgccgcggaggagcccgcgaccacgccacctttcgggatgctagctcggaggatgacgctaccatcatgcatctggcgcgcatggtggaggcgtacgacgcggcccgtatcgacttccatcagatggtgcgccgtgggatggtcgagaacagcatgaagatcctggagctgcgtcaggagaatctgcagctgaagaaggacctagacgcagtggaggcgcagctgcatcagctcaagatcgcccagggagaggtctgtcgccccaagcgtcgccgcgtctgccgcagccagaagatcaccgcccgcaagagtacctccaggcccgagcttgttcgccagtccttggcatggacctgcttcgtcgagacccctcgtgccgagcccgcgcccgtggttcctcaggagggggaagcctcaggcgttggtagcacggaggatgcgctgttgctcaccttccgtcctggcccgtcgcagcggtagacgagcagttagtaggcttgcgcgtgtgttctttctcgtttgtcttcttgttggagccgtgtggggcatggttatgccggtgtgtggtataactgtgtcagagcctgtctttattttatttgcctaagcaacttgaactttaatgaaccaatttaatagcagtaataaattcaagaattatggtagtcgtgggtggttagctttaattgtcagctctctctgtttgctggatctgtgtggggttgtcagatggtgacgaccaggagaagtgctaacaccggtgatggcaaccaacctgaaggcagcaaccacaacaaccatggcagcccacctccacctcctcctccgcctccaccaccaccactagacaccaatgccatcctcacccaaatcctagcccagcaggccaacatgatggctgctttcctccaccacatccaaaatccgccacaacataatgctccaccaccacccccacaacactctaaactcgccgagttcctccgcatccgtccacctaccttctctagctccaataaccccgtggatgcattggattggttgcatgccgtggggaaaaagttagacaccgtgcagtgcagcgatgaggagaaagtcgtcttcgccgcccaccagctgcaggggcccgcatctctatggtgggaccatttccaggctacgcagccagaggggcagcctattacttgggcccgcttcaccgccgccttccggaggacccatgtgcccgccggagtcatggcccttaagaaaagggaattccgagagttgaagcaaggcaaccgctccgtgatggagtatttgcatgagtttaacaacctggcccggtacgccccggaggatgtacgggaagatgaggaaaagcaggagaagttcttggcaggaatggaccctgagctgtccgtgcgtctagtctccggtgactatccggatttccaacgtctggtggacaagagcatccgcttggaagccaagcacaaggaactggagtcgcacaagcgccgcttggcgaatttccgcaatcaacagggagctaactaaaggatccgctacaccaatccctatccagggggatcgtcctcgcagcagcaacagcagcaacaacctcgctccgcgccccgacctcaattcgtggtgcgcatcccacagccgcaacaacagcagagtcagcaagggacccgtgcgccccgtcctcctacgacagccgcgcagtctggtcaaggccgcagggacgttcaaggtccgcagcgtctgtgcttcaattgcttcgagcctgggcactttgcggataaatgcccaaagccgaggcgccagcaaggccaagcgcctccccgctccaacaacggtggtaaggatgtcattcggggtcgtgtgaaccacgtgacggccgaggacgtgctgacaactccagacgtcatcgttggtacgttcctcattcattccatccctgctaccattttgttcgactctggagcttcccactcgtttatatctgtgccattcgtggggagaaatcagttgggggtagaaaggcttaggaaccctccgctcatcaccacccctggaggggttatgacagcaaagtattatagccctgctgttcctatagaaattcagggaattccttttccttcggatctgattcttctagacaccaagaacttggatgtgatccttgggatgaattggttggctcaattccaaggagtagtggattgcgcgagacgcactgtcactctgtaccgagggccggaacaaccggttgttttctttgcacccccaacctctgtcagtagtttagaacttcatcagataggactgtcagaaatccccatcgtcaaagagttcggagacgtgtttccggaagaactacccggtatgccgcccaagcgagagattgagttccggatagatcttgctccaggaaccactcctctgtacaagcgaccctaccgtatggcagcaaatgaactggccgaagttaagaaacagttggaagagttgaaagaaaaggggtatatacgtccgagtacttccccctggggtgctcctgtgatttttgtggagaagaaagacaagacgaagaggatgtgcgttgactacagagctctcaatgaagtcaccatcaaaaacaagtaccctcttccccggatcgatgatctgttcaatcagcttaaaggtgccacggtattctccaagattgatcttcgttccggatatcaccagttgcgcatccgtgaagaagatattccgaagaccgcattcaccacgcgatacggactgtatgaattcacggtgatgtcgttcggtttaaccaatgctcctgccttcttcatgaacttaatgaacaaagtgttcatggaatacttggataagtttgttgtagttttcattgatgacattatggtatactcacaatcagaggaagaccatcagcaccatctccgtctggtgttgggaaagttgcgggaacatcaattgtatgccaaacttagcaagtgcgagttctggttgtccgaagtcaaattcttagggcacgtgatatctgctaaaggagttgctgtggaccccgaaacagtgaccgccgtcaccgattggaagcaacccaagacagtcactcaaattcgcagtttcttaggtttggctggatactaccggaggttcatcgagaacttctccaaaatcgctcgacccatgacacagttgttgaagaaagaagagaaatttgtgtggagcccgcaatgcgagaaggcgttccaaactctcaaagaaaagctggtttcctcgccagtgttagtcttaaccggatactcgcaaggacttcatggtgtattgtgacgcttcgcgccaaggattggggtgcgtgctcatgcaggaaggtcatgtggtggcctatgcctcacgccagctacggccccatgaaggcaattaccctacccatgatttggagttagccgctgtggttcatgctctaaagatctggcggcactacctcattgggaatcgctgtgaaatatatactgatcataagagtttgaaatacatcttcacccagtcggatctgaatcttcggcagaggagatggttagaactcatcaaggattatgatgtgggaattcactatcatcctggtaaggccaacgtggtagccgacgctctaagtcgaaaaagccattgcaacactcttgtcgtccgtggcattccacccgaacttaatcaacagatggaagccctgaatctaagcatagttagtcgtggattcttggctacgctggaagccaagccttccttgctcgatcaaatccgcgaggctcagaagaacgatccggacatgcgtggactcctcaagaatatgaaacagggtaaagccgctggtttcacagaggatgaacacggaaccctatggaacggaaatcgggtatgcgttccagatgtcagagaacttaaacagctgatacttcaggaagctcacgagagtccttattccatccaccctggcagcacgaagatgtacttagacttgaaagagaaatactggtgggttagtatgaagcgggaaattgcagagttcgtggccctttgtgacgtgtgccagcgtgtcaaggcagagcaccaacgaccggccggacttctccaacctctccaagtaccagaatggaaatgggatgaaattgggatggatttcatcaccggacttccaaaaacccaaggtggatatgattctatatgggtagttgtggaccgattaaccaaggtagctcggtttattcctgtgaaaaccacctatggagggaacaaactag

SEQ ID NO: 8256 - DNA, 34512 bp, Oryza sativa
gatcgatcgatgatcggtgcacatatctatctattatactagaggcgcggttcctcgtcgtcgacgccgagaatggtgctaaggttcatggggtgcatgtattcggtgaaccggtgcatgaactggccgacgacgatgcggttggctttctccgttgggtgaacgcgtcccagaacgcgaacgcctccctgtcgtcgcacacgttcgacgccgccgtgcacagtccgatcccgttgtacggcccctgcccgcagcacgccacctgcacgttcgtaaaacctgccaaagcaatcaacgggttcagatcagtcaagttcggcgttcggcttcgatcgatcaaacggtcgccgccgtcgcgggagcacgtatataccgtagttctgggggttggagatgtagtcgaagttcatgcggttggtgttggcggtgacgaagacttcggcgccgatggcgcggttgaggccgcgcaccatgttcaccagctgcgggttgtacaggtccacggcgcgcgtcagctccgccgcgcactcgccgcggcggctgtgcagcgccagctccgccggcacgcaccccagcggccccgtccccgtcacgatcacgcgccgcgcccccagctcgtacagcctctgcacgcacacgcgcaagcagccggtgtgtcagcgcgtgcgtgagcgtgacaaccaccaattgagttgacagttgcgcggtggtaggtcgtgaactagtacactactctactactgctactgccacaaggcgatctcgtgcactttaattaccgagaggattttcctgtactcggagatgatgaacgggacgtagtcctggatggcgtactggcgcgaccgcacggacatgggcacgaggtagtagttgttcacgaagtcgttgcctcccagcgtgatgagcaccagagcaccattcacgatccgcttcgcctgctcctcgccgaccagagcccttagcttgcgctggtactcccggaagtactgcagctgatcgccgatcctgattatgttcacctgtgttcacgcacaaacacccacatggttgcacatgaaaatcttgagaagaaacacggaaacacaatgacggccgtgaattgaagtgaaatgaattgagcattttttatcgtacgaattgcaccccggtgtcattcaggatcccgacgccggccgacgcgaagttcgcgccgacgagcagcttgtcccctcggagctcagggctcaggtacggcaatgcaggctcggccccaagatgctcgcctgaagaaaacgcccatggtcgtcagctcttcggcaaaacgtgtcgacacactgtttctgaaatatgcaggagttaaagtactacgcactgataatgtcggggatgttgagcccgttggagaaccggcccgtggcctggtgcgtcgggtagtcgatgccgtacggcggcgcgtcggcgcgcgccgtggtgatcaggtagttgttgttgccgttgtcgacgagggagtcgccgaacacgaagaaggcccgctccgcggacgccggcgccggtgcagcagccacagccaataggccgacgaggagaggaacgacgagagcagcgaccattctcgctcgcggacgtgagaagcactgctgactctctacctgtccttactgtgatcaagatgcacgctctactagtccactagtgccagtggctcgagtagtagctgggtagatcgatccctctttttatagaggccttggctagctctggctcgatcgacacacgaacaacttgttttgcagcaaaggtaaaaaaaattgccaggtgagatactggcaaatgcggtgaatgatgcgaggtggttggttgatttggagccgcatttacgtgccccggccgggaggtagctaggccggcttgccgccttggatcgtgttcatgcgcgcgcctgcaggaagagtgtgaccacaggggcggtttcggtggtggtctggtggattgcacgtccggccgttgcccgcagcgggttacagaattcagatgcatatgagagctgttaaataatggggcggtcctcgatctgctgtcttgtttggtgtttggggagagatttgggattgttcgttgaacagtattaatttactcaagtacggtgtgcattcattgtagatttgtattatgtagtccgagttttgtgtggtaaagaagtgattaccttattcactggttgatctggttgttttgcatcatctatttagctggtgtttagcagtgaatctagaataaaaattatggagtgtcctatatgcatatttggcatgtataatacttcctccgttcagtaaaaagttaatctagtactggatatgacacatcctattactacaaatataaatataaatatgtgcagatacatagtactagaatatgttacaatcacatccgatattaaattctttttttaagggacgaagggaagtggcactaattgttgtgcggagaaaatttgcgtgatgagcaagcttaacaccctgtgtcctgtacatagggaaggcccacgtggcttcgcctctgtatctatattgttgagaaaatcctttctatatataccttttaaaatttagctttctatactcttgaattttgcttatttctttatatatctccaaaatttgattttgatcccttccatacttctcccgtcagttaaccgttagttgactgtctaattttaataaaaatgactattttaccttttggatgaacatagaaattcatgaattacattgttaaaaatgcagtagaattttgtcgcataagactactagagttatgagtttgttgtgtgatgcattatttatcacaaaatttatttttagataaataaataaaaaaatatgtatttattttttaaaagaaagtcataaaaaatgagaagcattcatacaaagataggactaccaatgttcacaataatttttttatgaatgttttgatgcgaaaaacacacactggcctggaagatctgcttaactcctgtgcaggtccaaaatcttgcttttaggttcgtaagcgtgctagtcaatttgatcttgcaatcaccaagaaacaaaagacaagaaaaaccgcggttaaatccataaacgatagccgatcggctagttgtcgatgacatatcatttatctttaagccgatgtcatatgtgaatcgatcggctgttataaataagcaagataagactaaatctactcgatcggctgtagatattaacgctatataatcattctgtcaatgtatatttagactaggtgattgggatagatcggtcgctatgccgagacagtataaatcacttagatcgaagtatacattaatacaaagattataaatgtttatagcatagacgatcagatagatctagcacgtatcggctagtactccgataccatttactagaacaaatagaatatatcaaacagaaagcctaatatactttattgcaataagatcttaatataaagggcagacttagcatatcaattaagcatataagatataaaatagctaaattaggtaagatcggctgaaaccccgatactatctctcttgataatcataaaagaagccagatatcataattatagatattacttaatagatcgaacctaaccgatgcaacattaagcataaagacaagtataagatctagacaagatgatgaaaacctacaaaagatggtatatacacgatacaatctagatcaataacaaaacataactctaccgattgcttcctaacaataagaaccaactgataacaagttatatagcgcaactaacatagattgcaaagtatatatgataactcgacagattacataatcaagattagagtgtcatagagatggaagcactaatcccgacaatgcaagctgccataacaagttttacctctagttgaagatcaaaacgatgtagctcaacccgaaagcaagaactcgtcgaaatagaacgaaagtaaaaagggtggcgatgcaccaagattgtattgaactattgttaattgattacatgggttcgggttctatttatacccgagattacaaaatatgtccttgccggacacgacacttatctctaacaaactctaagataccataagtctttgcggtaaacttttgcccaaatatatctctaaggaaattacatgaaatatcctaattaataaatacaattgcctatccgagagctttatctccatcatggcaatcctcgtgaaacacgttgatcgattctagaaacatctttgaaaccattatcatcggaatcggctacatcacctctatcggctgtgtcggatgttatctgtccgatccatctcagtcgatgcagactccagccgatgccttcgtagccaatgcatgctctgttcttcgaatccatctctctaccgaatccgcctcgatttcaatatcgaatctggttcatatattaccaaatttggtcgtcaacagaatgcttccgatcaaaaatatccattgtcctattaaaatttaaaatgaaaattttaatttattacatttgttttatttttaaaatttatgttaaatttttctacactaattatttagtctcattagtttcataaaatgcatatactgtgcactcaaacaaaattttcaatcttttttcaagtttatattcaaaactaaagcatcaaggataaaaaaggacacttacaaccaaacgtaatagtgaaatgaagaaaaatgtaatggtaagggcatgtaagggatcaagctgaaatttcaggggtatagaagggatcggtaaatttcagagagtatgaaagagattgagtgagttttcaggggtacacaggaaatttattctatattgttttgcatcatatttgtaattttttttattgatagaactatgtttcttcataaatataatatttttatacttatctatatagttagtgaaaaattcttatatttatagtcggaggtagtagttctgaacatcattgttttttttttgaaaagcaaggtaagaaggttgtcttatatattcactggccgtgggagttaggattatccctgaccaaagaaagaaaggaattattcttgcaacagatatagctctgctagattcttcactcccttccgtaaaaaaaaaatcatttttccgtcaaaaaaaagattcttcactcccgcccacgccattacccacaaatgtgcttcctccttaattcttgccatgagcccgtgatggatcttgaagtgttagtgagatttctgaaaactcttgagtttctctccttcacaactctcgggagactatgataatcatcgacttgagagtactttctagggcatgttttgtgccgagatggttttccctcaccactcttgcacagttgcatggttcatccattctgttggtttgatgtgtagttgcaactaggagatcctcttagaaagacggtggtgagctagtaaatggactacaacgaggacaaaagacctcattttgctgaaaatcattgtgagcttctccgctcctatcctattaaatacgtagagctcttgctgttttagatggaattagtgttttctaatattgatagctttcttatgtagtactatcacatgtcattttttttagtaatggaataacgtacattttggcctttgctcagcaagctacattcaattattacaaagttcatacatgaataaactcagcacacactgatatagcataaaataaatataaactaataaatatcaacacaagataaaagaacccacaattactaaattctatttgagaatctccactcccaagcacatagcaatgctaactggttcttagtgtacgagtatataatactatgaatttttttaccctttgcacttctcattcatggatgaactgacaaagattgaacataagttattctctacaattttctacttttactactactcccttacatacacatctgaaagttgaaaatagatatactgactgataatctgcataaaggccccactcacacagtatatcaaccacaagaagttagcttcatagttcggtcattaaaatccatggccatactaaacatgataacctgttttccgacttcagtaaaaccaatgcagtactccaagccttcaacgaacacctaatttccaaaacttacaaaaagatacaccttccagtcttttgacactgttgatcccgccttccatttattacaatgcagaagcattccatcagtaaagtagcatgccatgtgaaattcataaaacagtggggtagaattttgaagttgaactgaccaccaacaaacagtatgcaattacagattacttgttttagctacaaggaccacagtaaattaatttccacactggcactgaagtgagattggtattaacttggtgatcgatgaacggaaatgagaagaactgatgattcttatttccctcctcacgcattaatgaaaaaaccatagtaataaaatgtcatgttcactagattcctatgggattttaaaattcatgaagttttgaaacttccgtttgattgacacacaaaaaaaacacaggaaaccaaaggaagaaaacatgagatgagatctcataattttttttcttcaaatttactctagaaaaatttgtgggaatcaattctttgtttcaaatgtcagtactttcataatatataaatcctgtagaaaatcccctctgtctaggccaccacctcatttgatcttgatctctctttcttttctcaattttttttccttttcttttcacgaataagctaaacgataggaccgttatatatacacttatttcatttaaatattccgtagtaacgtacaggtacaataataataaatatataggtaccccaaaagctgaaagagagtaagatggcgtcgtgatcgtcgttaagtgtacccggaccggacggcatcctggcggagatcctctggggctccgagcctccgaggccttgacctgcgccaactacggcctttgtgaatcaagatccggtgcagttattatagtgactgcaagttaggcagtcccgtccattcataaccgttggatcaagctgatgaacgacagatagctgtgccacgtcacaaccaagcagccaatgctacaataacatgctatagtgcgctacagtgttctggtcgaatctgatatgttcttttttgatctaacgatcacgcgaggactgctaaagttgcagtccacgttgcaaccgcaggtgatctcgatccggcctttgcttgcctctggtgactggtgggtggcgctgcccgccggtccgcgtgccaccgatcgcccatgcccctcctcggcatctgcctgctgggatgatctagcctaccgcgcgtacggcgcatcgtacgccgccggcgtccagcaagcccgtccacgccaaggcgacgcgcgtggtgacgaatcgatcggaagttcggaacagctgtagcctgtagcccgtggacgcatatggttcctgtgtgaccatccgaccacgggctcatgggttttccgtcaccacgatggacgcaaggtagagtttgatgcttgaatacttgtattttgtatagttgtatgcgctcttgtattttgtatatatagttatatgcgcttattgcgtgtgtatgaatctaagcaagaagaccttagtataatcttgtactgtataatctaagcattttctggatcgtacaaagctttatatattaggctctgttttgattccctgataaaaatttttaccctattatattgaatgtttagacacatgtatgaagtataaaatataaacgaaaaaataactaattatacagattgcgtgtaaattgagagatgaatcttttaaccctaattgctccatgatctgacaatgtggtgttacagtaaatatttgctaatgacggattaattaggcttaataaattcatctcacagtttacaggcggattctgtaatttgttttgttattagtctacgtttaatactttaaatgtatatccgtatattctatttgacacaacaaaactttacacccctagatctaaacacagtcttaatgtatcccatttccgttctgcaaataggtcgaacagaacatggcttttgtattgctgcaggctcttgaagttgagaccttcttgttgccttatgccgttgagtggaatgatccaaagaatcgcgagtgcatttactgaacactgctgcagtagtacccaagatgaagccatcatccgtgccttgctactgctagtctggctcttcgcgtcggagaaacgagaaaggtggagtttttcaccgtcggagaaagagcacatttgcctgtgctttgcctgcctgctgagctagtccattgtcaccgtgatttggctgtgtttagctcacgctaaaattgaaagtttggttgaaattcgaacgatgtaacgaaaaaatttaaagtttatgtgtgtaggaaagttttgatgtgatgaaaaagttagaagttttaagaaaaatttagatctaaacacggtgtttgttgaactggacacaagaaattcttccagaattagtgattcttcgtagtaccagtatcatcgtcttcatgccgtcctaaaagtgagaaaaggcttcccgatctggtgatacacgagttgaacaatcaacctgtactctttcgccgatcgattgctcctgacatgttttgggtagcagtacaataatactgcggtgatcaatgcagatctgtagctggcacagcgtcggggagattgtcgcgacgaacgcgcgatgttcgtgacggtgagttagctgcgagccacggcgctacgcaggagaaaatggtggctgcgccgtcgcgcggtgcgacccggaccgtgaaaaccgtatgtttatcatgaggattatcaaaaactaagaagattacggtacgcgataatcatgataactcacgctgttttgtaaaccactagccaatttgcacttagcattattatccaggagggcatacggatcggacgaccgatcatgacattagcgtccgatttacgtgcaaaactactttaaattgatttttctcttaaattacttatccaaatcatgatccgattgcaccattaaattcgttgcaattaaatcttcaaaacaagattacacatggatatattccgacgaaaaaagattagcttattattgaattttttataaatgttgcacgatgttccaccagctatatcggaattgtctcactaggtgattgaaaatgtttcactcgtttaaatcgggtgttgtttcaccttatataaaaacaatgtttcagcaaatagcgaaaaaatatttcagttcactgcaacattatatctatatatagtgaaacattgtgattacattaggtgaaacatttttcggtgaaacaaaaaataaaccaaattctcttaatagggggtttccaaaatatgtgggtttttttgttgcaatagaatatttcgttcactgcaacattagatctatacatagtaaaacattgtgagtacactaggtaaaatattttttatggaaaaaaataaaccaaatttccttaatagagagtttccaaaatatgtgcgttttttgttgcaaaagagtattttaattcactgcaacattagatctataaatagtgaaccattataaatacactaggtgaaacatctattgtggaaaaaggaaggaagaagtgtgtgggacaacaggtagcacgtgggggagaggcgcgcgtggggggagtgcttgatccggctccccccgcgccggtcgcccggcgacaagcattatcgttattacccaggtgttttaaccgaatgggtcgtgatgggctagatcgttacaggcccaagttggctgagaattaaaatcattcggcccgtcctcttttcttttttttttttgtctcgtgggccaaccggccgtcagaactcagaactgtgcgttccgtgaagaaattagacggggaaacagtaaaaagaagtagccattgattatttcatcgatctagatcttgccaatgttcatatcgatctcgatccgaagaagaacggcattgattggtgtgtcctgcatcgcctttttctttttctttctttctgaagactctgcatcagacatcagttctgtggaggtgaaaacagccaagaagaggcgagcatttggcttgttgtactgtaccaatgtaccgtttcatgtgctcttcgctggcgctgtgatgaaccaattgatgatcagctctaccgccttcaagttacatggagtttggtagtatacgttggtattccatggcgtgacagtgcctgtgcttttacaggagtatctcacattcagtcattcagacatattctcacccaaatgagaagctatgggagatgggaatgtgctttttacctagagaacatatttactccctccgtattaaatataaacatttctaacattcaaaatttatactgcaatataatcatttatgaggtactaattttaatacacgaaaatccatacattttcagccattcacgtacttgaggagatcatactataaaagagaatcttttttccttaacctcaatatatggtatttttcacgaacgcgcaaaatgattgcatgtcatatattagaataaaagagttatagttacatgatgcaatcagtcagaccggcttatgcaaagggaaggggaaaaaaagcaaaataagaagctggagcttaaaaaactacagcggctaaatacaaactccaagcagtaggaaggggctgagccacgctacactcccaacaggaccccaaaagcggcaacgccagctaaagactatagatagccctctgagtggatggactccagaaccactgagactaaagagagcgcagagtcgaaaaccctagagttccgtttcttccacagctgctaagagaccaggagcaccagggagtcgaagccagcacagagatgctcaagtaagcaggccctagaggacagccaccagtcctgtaaccagctgccacgggggagagagggcagcccagccaggaggtgacagcacacggagccaaacctgccgagcaaacacacagtcaaggaggatgtggttcgccgtctcaagatcctaagcacaaaaaaggtaggccaagtgactatcgatgctacacttatggaggagatcagccgtccagcagcgctgctagaatgcataccaaaggaagaacgtgtatttagcaggaccctttgcgtgccatagaagatcagcacaggcaaaggaatgctgaccatggaagaatgcctggtatgccgaacgcgcagagtagcgctggtcagacgtccaacgccaaacgagatgatactagtagaaatacttatattttagaacataaaaagtacaacacacagtagaaatattgttcacatgccctcgagagatattactcgagcatgttttatactgttttgcaaaagagagaaggagagcaatttttttactgaaaccgtgagtaccagattgatatatctacaacaaagcgataaaaataattttagaatatgattttatatttctgttcttagtggtataaaagctaagcctgaaaagataaataaaaaaactccgaaatcagctctaacataaatttctaaaatcaaattatggttacgacctaaatctgcaaccttattactacctccgtttcaggttataagactttctagtattgtccacattcacatatatatatatatatatatatatatatatatatatatatgggttacgctagaaagtcttataatataaaacgaggaagtagttcaatatgttatttgaaacgaacagcttggcttcaatacgaccgagagtcttgaaagaactactactattaagttctaaactcgtaatgctcgctacaagtacaatacaaaacctggcagaagtggtccgtatatgtacgtacaaatgctggtggttagcacgattaatggcgacggttcacctgctggcaggctaaccacaccgtcgtgtgatatgtgatgaagagtcttaactgtagttctcatcgatctgttgagtgttgactggtgaagtggtgattagggatgaaaacggtcggaaatagtcggaaatagtcggaaacggtattattattttattaactttttaaagacaaatagaaacagtcgtaaaattttcatatttatgaattcatcaacttcaatgccacgctgacagaaattaaaaaaactaaattttgaaaatagtaaccatcggtaaaaatattattattatattaattttacggaaacgatatcggtatggtcagaaaatttccataccgttttcattggtgattgcgtcaaaaaaaaagagtgttgacttgtggtggtggtggtgcttgaccacaatcagcttccttttcgggtctgttcactttgatgccattttcaatcttactaaattttggtaaagttgtcaacaaaaaatggctacgggccagtttggtttgcgacctaaattggccttaccaatttttggcaatgccaaattttggtaagttttggcatgacaaattttgggaaggtaaagttgtgtttggattgaagccaaaatagcctaagttaattattgaaatggcctattttcttaggcatgccaaaatttggcttcaaaccaaatagacactaaacactattaaaattgccaaatattggtaagccaaatttaggcctcaaaccaaaccagccctacatttagtttgctgccaaattttggtaactctataagaaatcatgtcaaaattttagtaagttgccaaaattttggcagctattccaaaattttggtaataccaaaatttggtaaggttttttttggcattaaagtgaacccttcttttttacaaaaaggctgcattgtcacaaaggccacgaatcagaaggcccggtctccgttgtgcggtctcccggcccaatatgcatgcggcgtaccaaacggatactactttactactctgaattttctctgaattttctgaagaaataagggtctcaaacgctcaaatggacgcagaggctgaggctctatttatggcgtcagccaacctgcaattgcgatcttttggtggtggcatactatgatcattcggtattttgatgactgatggatatgtgctaagacgtggagaaaagcaagataagataaagaaagcaagcaatgctagctgccacacacacacaaacagagcaaacagacagagagagcaaaacagaccaaacaaacagagagatcgaaagtgattagtgggtgtccggctgctcttcccctcagcctgcgctgcatgctgcagatgcgtcgtcgcgtcagcaggatggagatcgtcttcgtttgcttctgcaggagccgagcggaaatccctttctcctcctgctgctgctggtagcccgacctcatcaatcatcacaactcacaagcatcagagcaagccaggatggaattgtgaattttttgaggttttggaggttcagcttgagcacaatccaatcagctgctgatcgatgcgtcgtcattctctacggctgccactccagctaccagtcctgactttgcactgagtacctaccaagtaccaactgtttgatgtcagggctctgctccacgctcatcagctcatgcagtatgggcctcttcttcacaccaggctgctagccgcacaacataactaatcaatggcttaattgatcatcattgttgtttaaaggagaagattactcggattagctcacttgctatcaggcccgagaatattgattattggactttggagcaggcaggttactctgtcatgtaccagatgtcgctccgctttgtaagctattaacaacactggacggctcaccagacatgcatgattatcggtttagatggtaagtatactttatgctaataattatatgctcttgtccagataagatatgtctccagtaccaaacgggatttttgctaacgacaataagaagctaattaaatcagggcatcaggcataatttaggcttgaacttgggcagctatgtatggctgtgaaaataatcattttcattctctgatgaacaggtgtaatactcttcttacggtagtgattttcaggagacggtatgtacggataccgttaggctgtagacatcaacgatatctcgagacgactggcggcatctcgatcgatttgtgatgaggagaaaacaagctttcccatactgatccaacggaacagatgaacaaacacactttgccatcatctcgtttgattaatttctgatccattttcccctcataaataagccagcgcgacaattcgctgcatcagaactttccatcatctcgtctgattaatttctgatcgatttttccctcataaacaagccagcgcgacaattcgctgcatcagaacatagttaggtatggtgtatgtagcagtactatatagctttttatcacaacttgtaggagtaggactccaaggattggaagctttatccaacttggtacttattaaacacaacaactttatccaaagccgaatcgaggtcttagtacgctcgtattacagtaccatctcaaatcgagttttttttttgaacgaaatcctcatcgagatttatttgtttttgttctgcggaggaccacctatcatcatgtcaatcataagatgcacttgcaccaactatgatgacattacgcttcaactaatcctagctttatcaccccggctctcctctgttttcccccaaaaatagccctatgcttttgcaaaattacaagcataattggggtgttcatctcactatctcaggtatatatctactcccataattctgaaggccgcctaatttcagcatctgcttggtaggttgatttagcttataaacattgagcagacaaatttaagaaagggctttctttattagactgaaacatttctaaaattgaagtgaacaatcacgtgcggtggcttgtaagccggagctcaacgaatcaggtttacatgctacatccaatagatatccaactaacttgaaaagattgtggcaatgtagagaccaaatttgttagatttcacttactgaagggatatgttgttagatgacagtgccatcccagcttggttaggtgacttcatgcatgatagattgaaagcttgactgcttaacttagaaagctcaacaaactaagatgcgagttcaaatccagcaaagattagggatcgaaatttcggttgctaacggcatgggactgatggatggtattgaaacaaatcggcacatacgattcaaacttttaattaccaagatttcacatttgaatgatttgtgatattatttgaggttacaagcggatgaattaaatgctataaagttgaaaaatggattcaaacaaatttataagaattttatatattgaatgtttttaataactgaatgtctagaagctcggaaaacatgtgtatttgtccatcattccattccatgaaaaagaacagggcctcacatacgcttgttaaccctttctttcacgtgatgactttttggttggactttccaccctactactatctcattatgctacgctcgttccatccttttcatgaagaatggagttctagtggtacaaacaataattgctgtaagtcacaaactcataaatttgctaattcaccaattgcacgacaaactacactaaagttgaaaaataaactaaaacttgtatacttattattagcagattaaaaagcctaggtcgaaaaaagaagaaaacgaaaaacaacccaaaattaactctaaacttaagtttcaaaatctaaattaagctgcagtagtacatacgagtcaaacggtagtcaaatatacggcggtagtacggtggacttctccgggggtgctacatgcgacattacgaaatgacagggaccaacgtgcacaaaattctctgaaactactctgctcgctgctgtctcacactctctctctcccctcccttttcgtctctctcagatccgcgaccactcccatttcccccaaaaatcatcgcgagcgcgcgacccaaccaccgcctactggtcgccgccgccgccgccgccggtgaggagtaggaggaggaggaagcttcggtcggttggttgtcgggtgggggtggggcggagatggaggcggcgctggaggcggcgcgcgccaaggacacgaagcagcggctggccggggtggagcggctccacgaggcgctggaggccgcggcgaggcgagggctgacgtcgccgaggtgacgtcgctggtcgacgcctgcatggatctgaccaaggacggcaacttccgcgtcgcccagggcggcctgcaggcgctctccgccgccgcggtgctcgccggcgaccacttcaagatccacctcaacgccctcgtgcccgccgccgtcgagcggctgggcgacggcaagcagcccgtccgagacgccgccaggcagctgcttgtcaccctcatggaggtctggttctcttcgctgtgtcgccttctgctagcgacatcgtttgctcttaccggtttaggtttggggaaaatgcgggttcgattatgtgtatatttagttatgataaattactcttcgagcggaaaatctcaattcgtctgtgctttgatactgcatggacgccacttgcgggttaaatggcgtgggttaagtggatgatgagtggagctttggggttggcggccttgctcatttcgagctagattattagctgtaaatatattagttggccgtgatctaatggattatcgttaaatttaggtaaaaaaatgtgccatttggatttaagtgcagctgtgaaattgaatccttgaaatcattagcttgaactttctacaatatctgctttgtaaatgcatgcagtacataatttgagtttaaggaggtagttacttatttaggccaaatccattggctggttctgtaaattgaaaatgtcccttgcccttttaagattatggcttcaagccttgattgcaaactagtttagttgtgcactttgatcattcactgtagtttgaggatggcgatattggagtataatttattttggtaagtaagccgttgagcaaaattgcaatcacataactttcagggatatctttggatgcctttcagatggtcacattattggtgtgcgtagtcatgtttggtactatgttataccaacaattgttggtctccttgtaaggttatgcatttttttttgttcttaacaaaagagaccattgctatccactctttcccgcaatcaatattccaagggaatagtgatacttagttgaagcaggtgatagttactagttaaatgaacagactcgtgaactggactaaggctaaatattgtgacctgaacaaggctaaattcccaagttttcaggtgaatggaggcactagtttggagctcgttatattcctatgtgctattaatcaacaaatgctttcatgagtggatgaagatagaaatttggaggagaatatgtgcatatagatatacctaatttgttactgtattttgctttccagtggaaggatgttttagtctgctactctgcttcatgatatatgttttaaggtgcccagtgtagattttggagaagcagagacaacatttttactcctttaaaagatgacagtagtggtggttgtcgatctgccaccacatcttctctatactggattttcccttaaatttcttcaatattacacaatagtacttccacatgttaattctccttgtttgccattaagaaaaatcaaatttaatatggaacagcccaaaacgactgaattgtcatgtctataacacacacgcacacacaaaaggtgaaaatacatgtttgttcgaaaatcatattcacttattttggatatagaacatgtttgattatttttttccatagccaattaccaacacacagaatttagctagttgaacctatatttctccttttctgcatgctgcttcttttttactccctttgtctcaaaatatagctacctttagctatgaatttggacagagcccttcaaaatcaatgttttagttgcatttgaaacatggcattgcctgttgctaatttgctacaccattgaaaataaatacttatttgtactttgaatttaaaaaatgtccttggtggcttgagcttattttccaggctgtatattctcttgtatgcatggagatttctcatcttttgttggactgttgcttttccaatgttaatattcatttatattcttatggacctttatggttctgatattattttgcggggtatactaagctgtttttactctctacattctcaggtttcatcaccgacaatcattgttgaaagagctggaagttatgcatggactcacaagagctggagggtgcgggaagaatttgtacgcactgttgcaacagctgttggcctctttgcttctacagagctccctctacagcgagtgttgctttcacctgtatgtcaagataatttttatatttcaatctgttctgcttacaattattttgtttgcatgattgctaatggtagctgctacacttgtttggctttacaggtcctgcaattgctgaacgatttgaatcaaagtgttagagacgctgcaatctcatgtattgaggtgatccctttgcaaaatgttgtgcaactcacacttttgctatttgttcaaacttttcattgcatttttcaggggttttacccgcatgcaatgttcacactttgcacccttcatatgctaagtagattgtatagtaggtttactttcttctgttaccaagataatatatgcaatggatgcaaattattttgcacattttcttctgtgaactttccatttccaatatgcagtctctgctgtttaatccattcttcctttgaacaatgtttgaactagttaatataacagtggagtattacttctttattacttggatgctctctgggtaacaacattcactttagcctgggaccacttatctggatgcaaaaataagcaatactgattttgtgtggtcatgtgatttgcctatactcaaattctaggaagtggaatatgactgaagaaaagaatgtagaggtagccttcactttccattggtttggtacacggtagaccggataatcttgatgagtgaacctatgaataaaacgagaggaatgttagaatcatctgtattctgtagaatgaatgtgctacaagtttgataaaatgtgctacattatattttacttttgttcttttgaccaaactatattttgcttcatttattttttgccaatgtagaacctgttgactattcttcatctgtctttgcctgatgcagtgatgctctgacatatattttgttgaagtgctttctgtagcttaataatttacattatctattctcactgcaggagatgtatagaaacatgggatctcaattccatgaagagttgcagcgccataatctgccttcttacatggtaatccatgtggccaatctgatctccatcattattggttgctttcctgtcaaagttggattagtagtaaactgcgtgagcttgtcttatccttgcatgtgcaaatttaaggtaggcatcctgtcatatgctgattaatctttctttgcctttttttagctgaaggacataaattcaagattggataaaatagaaccaaaggctcgctcatctgatggtgctagaatgcaatataaggttattgaaagatctgtaagtgctaatgcaaaaagaggcagtccaaggaaaaaaagttcaacaagggaaagcacattatttggaggcaagttttacttttgaatttcctggaagctttgtttctattttgattaaaagtacaaatatgaaaaaaagtgttattggtttgtatcgacaaaattttaagtaatggctaagcataactggagattccatgctcttcgctgtaaattcctattcatctgagtggacttttttggagttccagatgattgttactagagcatgcaatcattactatgactttactctaaacaaatgttaggcccttcactatcttctcactgcggtcagctgccttattgtagctcctcttatactgggagtttacactattagctcttcttgattgtatggtcaatgattttaaactttttggaagaagtatgtgttaacacatataagtgttgatatagctctttcaaattgccaaatctattgccacaatttggtgctgatctaacaacgcaatattagcatcttttccatgcacagtgagtcagtgcttttttccacatgtcatttttcttatataatcatgcaactgtgatttagttggttcatgattttaaaattcttgcagagatcattggcagatgccacatgtagatcaagggaaacacatgtagtagatatacatgtttgttctatatgcatgctgatccttcacaaaattatactgatataggccttgaaagattttgcgtattaattgttggcaaatactgtacattcctgtttttgtgaaattcattttgatgtgttaaaatgcacctctttttaccaggtactcaaggtaaaaggcatgcactatagaaacaacatctttactttgcttagtttatacattagaggctttggattccaccattttagtaggagcttttgtagcaatttaggaaatttattagttattggtcagaagacagttcttttctggcaacattgggtctagacaaaacttatcatatgtgaagctttttatcattagcgacatcagcatattgatcatataccactggattttgtgccatttacaggtgactcagatattaccgaaaaaccagtggaacccataagagtacattcagagaaagaattacttagggagatggagaagattgcatctgcccttgatccagaaaaggactggtctatacgtattgccgcaatgcaaaggattgaagccttggtatatggaggttagatatttgtcactgctgtatctttttattgaacattggatagtgttgataagtagctttctttagaaagtatatgtcacaggcttgaagttcttccagcatgtaaaagttgaaaagggaactccagagatagatcatgttagtaacaaaaacagtgaaatagaactgaggtaaccaatcccctttttcaaagtcaaggggggaatgtggcattgctttgttacttaacttggtaacccaccaaccaaccatgattttgaatgccatattgataagttcatatcagatttaccaataatgatgcatatagctggtagaaattcattcaagaaagacaagctaagtgatgaaaataaatatattggaacagtgaaattaaatttctttacgtttataattttacagggatgttttaggtctcactgttgactgtacaaacatactgttacataattatgtattattccctttcttgttaacattgttttgcatgtttttgtttgaaataaactcttccttttatcaggtgcaattgattatccatcatttcttacgctcctgaagcagctagttcctcccttatctgctcagctgtctgaccgacggtctagcatagtaaaacaggtatttgatttaacaccaattcttgaggggctgtcaaattagttcatccaaaaatatttcattttagaagtacatgtgtgttatggaattctgttagaaaaaaaagaattcttattgaatttgcaatgactgaacaaaccttggtgagaaaaaattgctgaccaagtttttttccaggcatgccatctacttaatatgctatcaaaagaactccttggtgattttgaagcatgtgctgaaatatttattccggtaaccatagaagctgtttcagtgttttgcaacagtaagtcagtactcttatacttcctcagtagggctaacatactgatcaaattatcaggtacttttcaagcttgttgtgataactgtgcttgttattgctgaatccgccgacaactgcataaaaactgtgagatacctatattcttgtatgtaactgtggcacaacctctcagtactcatttttctttttgacaattattgtctttcagatcctgcggaactgcaaggtttcacgtattcttccacttatagctgacacggcaaagaatgatcgcagcgctatccttcgtgctaggtacttgtgtttagcattgtcttttttctcagtacctgtgatccttgtttattaaagccactcatgcctatttcctgctatgtcagatgtagtgagtatgccatcctaatattggaatattgggcagatgctcctgaaatacagcgtgcatctgatatatacgaagatctaataaaatgctgtgtggctgatgcaatgagtgaggtagggctaacaccatccatttttcctgacttaagtcaccataatgttcagtattaattattaaatgcctgaaaatttgttttgatgttattcttgtgccgtgttgcaaatgcaggtccgtgcaactgcaagatcttgctataggatgttcaccaagacatggcctgagcgctcacgtcggctttttatgtcatttgatcctgcagtacaaagggtatacgattatacttttctgcatgtttttccttgtaaagaactaaagatcaatcaaacattcaaagcattcctcataaagtttaggttgacatcttaaagtgctatggaggttgacttacatgtgctattgccttgtgttgccagtttaggaaaataagaggaaacattagctctgtgtaccatgtacctatcatcatatacctaagtcaataactttttatacctttctttggatcttactgaaggaaagctccagatatccttttgtaatatcttctgctagtttatttaagaatatatgccaaattatcatattcttaatttgcaaatacaattctgtatttggctattgctgtaagctcttgtaaagcagtgttcagtgtatatcaattacccatcccatgcatctgcatgtagcaaataggatgtttcaagcttactagttcaaggcagaggagtattctctcaagatgagttgcacacaccaacgagttcacccgaaagcttaaccttatagaggaggttgggcaatgtacttatatttcaatactccccctcacgtggaggccccctcaggcctcgcttgtggaaccaaagtgggctgcaacagttcattgcgctctaatactacattgagtttcatgcaccatacattcacctagaaccttaagcttatggagaagggcgagcaattcattcatatttcaggttttcaacaagttgcttgtactagttagttgtgctaggtatcctgtgtaaattctttcaagcctaaccttgcagcatacgcatttgaaagaaatgatttttgtataatgaaaatcgaccaaattatgaatgaaaaattatattttgttacagaaaaatgatattctgaactaaaatagtatggttatttgactctgctattacacagtataactgtttgtttgatctgataaatgcaagcacttgcagataataaatgatgaagacgggggcctgcagaaacggtatccttctccatcattgcgtgagaagggtgtccaactttctcatgcttcatctcatgcaagtggtacacatttagccggatacagcacttcagctattgttgcgatggacaagagtgcagctatttcttctgaatcatctctttcgtcaagaagtcttctgtcgcagtcaaagaaaataggtagaactgctgaaagaagcatagagagcgttctcagttcaagtaaacaaaaggtttctgccattgaaagtttattgaagggtgtaagcggccggcaaaatttctcagctatgcgctcaacaagcttggatcttggtattctttaagctgcttaattggagtttgctctttcattatgtagtttaaaattcttagctattgctttccgacttatattataaatacttaagaaatctcaatttcttttttcttttcctcctagtgcaggagttgatcctccatcctctcgtgatcctcctatcccacttgctgcaactgcttcggaccatctgtctttgcagaattccatattgctggattcatccctgccaagcattaataacacaagaaatggtggttcacgcttggtagatacagtgaaccctcatgtggccaataaagagaggtcaaggtcaccatatttgagtagtctgtcgtctgaatcaatatcaggatcgtcactgccttatgcgagaagctcttctgggaggtctccatatggtagcactatggaagagagtaatgatacatggtcaaccaggcggatgccacaaatgcagatggacagacactatcttgatatgacctatagggatgccagccacagaaatttacacaatcaccaagttccacacttccagaggcctcttaggaagcaagtggcatcaaggacatctgcaagttcgagacacagttttgatgatggccatatctcatctaatgacatgtcgcgatacacagatggtccaacttctataagcgatgcactctctgggggtcttagtgcaagttcagactgggtagctagagttacagcctttaattttattcagacactactgcaacaaggacagaaaggcattcaagaagttatgcagaattttgaaaaggtcatgaagttatttttccgttatttggatgatcctcatcacaaagttgcacaggcagctttctctacacttgcagatattattccagcttgcaagaagcaatttgagagctatgttgaaagaattttaccgtatgtattttcaagacttattgatccaaaggaattagttaggcaaccatgttcatcaaccttggaagttgttggccgcacatatcccattgacacattgctacctgctctagtacgttcactggatgaacaaaggtctccaaaagcaaaactggctgttcttgagtttgctaataagtcattcagcaggtacaaagtagactcagaaggttatagtaacagtggctttcttaagctatggctttcaaagctagcacctttaatacatgaaaagaatgcaaagttgaaggaaacttccatttctggaatcatagcagtttattctcattttgactcaacagcggttctaaattttattttaaatttgtctattgaagaacaaaaccttgtgaggcgagcactgaagcaatatactcctcgtatcgaggtcgatctggtaaattacttgcagagcaaaaaagaacgttcacgtcccaaatcttatgaccaagttgattttggaaattcttctgaagatggttatgcactgacaccaaagagtagttatgcatttgggcggttttctgctagttcccttgataatgcatcagggaagaagatgaatatggttcatggatcaatattccttgatatttctactggccgaacatcctctgatgtcagcattgataatgttaagcaatgtttcaaacctgaagctgaagttcttgcaacaagtagggaatcaaagaacattgctcgcacagttgtagaagctgcacgttcatggacagactatcctggaaaatcagatgctaccattgatgatgaaaattctactggtactcctcgtctggagtttggtcgtcttgctgtttctgatggacgtggtgctgttatttcaacttctgtggaagacgctcaagagggaaatccacttgtggagcttagttctgtgaagattaccccacacaccagtaatggccctagcatcccacaacttattcatcaggtacgcctgaaatatctcctttttccatcaactttgttagtaatactggtatgtgttaattttaccttttatcatcgtatacataaatgctacttttttttttatgtttctagataagcaatgtcagtgaagttactagtctagacaagcgggaggcattacaacagttggttacagcttccaccaataatgacaactctatatggactaaggtttgcaaccttacctttataatttcactttaattttataagaaaaaaaagtttcaatactatagctttgtttcatatgttcttttgttcatgtgaacttttctctttaattgggttaaacagctgcagtaaatgttttaggccattcaattatatagttctgcatctcatgctgcattccttttgtgactactagtatgagaataaatgagagtttctggagagagagagcatagttctgtgaagggatggagggaaaaagaatagcaggataatgttacgtgttatgtgagggaactcaaactgtttccattatcccattgattatgaaatactgttatactactatagcttaaaacatcaccattctagaacaatttgcctgatttatcttgatgcagtggttgctgaaaatgatgaatgcttcaccgtttcagtaacagtgaaaagaacctttttgattgtcattgttctatgaactgttcattgtgagtgttgttctccagaatgcatagctacagtctgttactcttgcagcttagttgacaggttttcatcattttatgctgcctttgtattgatagtatctttatcctgatatgggtcctctgtctcaatagtatttcaatcaaattttaacaaccatccttgaggtgttggatgactcggattcttctatcagggagctttctctatcgttagttgctgagatgctccacaaccaggtacgctgtccgcaaactgcatgcatgttgggtaatctagctggtagcttattgattaataatgtattttatcattctcagaaagatcctatggaagaatccattgagattgtccttgaaaagctcctacatgtgaccaaggatgtcgtggcgaaggtaaactttcctcatttaggaagccctcttgcttctgggctaatccctttttaatgccggtgcaggtttcaaatgaagcaaaccagtgcttaaatgtcgtgttggcaaaatatgatccttttagatgccttgctgtatgtacagagctcccttttttgtataaaagagtatatattaatgcaacactacttgtttacacttcttgttactagcagcttatacttttctttatctttgtgcttgcactgcaggttattgtacctttgttggttagtgatgatgaaaagatgcttgtcgtgtgtaccaactgtttgacaaaggtatcttagttacacgctttaattatcattgatgcaacaccaactccaaagataattgaataaaaacatcagacaatgaggagaagtaattgacctacatttaatttgtaataactttatatgtctatattcgtaaattcaaattcaaaataatctcaaaattctagattcctgaagtgttactagtacaatgaggcagtcattaatggtatttttatctctaataaggcctgtcacaacttgaatatcttggcaactaccaactaccgagttgattactggtgtaccttatacaactatttcattgaagcttcgttgctggtttacttgtgaatgagattaagtaaatattttttatattacaagaaacatgttagcttgtagagctgttccatctcatactggaattttattgttcatacataccatactaaccttatttggttgctggttttctcctggtaattttgcagcttgttggacgcctatcagaggaggaattaatgactcaactgccttcatttttaccagcactttttgatgctttcaataaccagagtccagatgttcgcaaggtgctttgcttgttctttgacactagtaatatgcccgtgcattgcaatgggcccatactactgagaatgggttgtggattagcctaaagcatgcaatttttttaaccaattgtttttttttgtttttgtccggggaattttctatttttatgtgggagcacgcgctgcgtgcgaggggaggacggatgactccacttttatgtagtagagagttttcatagggatatgctagtaaagaaggcaatagactgatagttaacatgatagaaacatggtaggcatgtaaagaaggcaatagactgatagttaacatgatagaaacatgtaaagaaggcaatagactgatagttaacatgatagaaacatggtaggcatgtgatagactgatagtaaagaaataagtacggaatccatttatacaacaaaagtttacttcatacacaggaacagtatggcccatttgtagtcattcctaaaattatttaaactgatttatcatgattgtttaaattggatatatgaaaatgatatgtttgggtttgttcgaatattatttccattatattataatttaccatgctctatgttagtgccatagtgcattctctattttgagtttctaataatatgtccatgtttggtcactgtcaattgcactttaatcacaagtgaccatctgcctgctgtctaccattgttatctggattatgtatcaatatgttttagataattaaattcattccagcctttgcttcacagaagctacgtgtaataatatatgactatgtgcacgtttaatacatatcacctttaaaaaaatgaatgttttgtgtttggaatctgatatcgtattcactttcttccagactgttgtattctgcttggtggatatctacattatgcttgggaaagcatttgtaccatatctagaggggcttaatagcacgcagctgcgcctagtaacaatctatgcaaacaggatatcacaggcaaggtctggtgcaccgattgatgctaaccactagatcatattgttttgtgtatcatatgggtatctctttggatgagctggtttcattcattcgatctgtatataacagacagatgccgttcatgtattgagcagttggcttttcgtgtgtgtatgtattccttttatttttgtttccttttccccttgtgtgcagaggcattgagttatgcgttaacttgtactaccatcacactgtacaaagataacaggatgtagctgactgttttcccttgtttacctgaggggtttgttggtgggcatatccttgtgctgtaaacattgggtgtgccggaaacagagaatttgctcaacagatccttgaatggttttgcttactactccttccttccatgaatgtttgacgctgtttgacttttttaaataatgtttgacgccgttggcttttttaaacatgtttgaccgttcgtcttattaaaaaacttttgtgaaatatgtaaagctatatgtatacataaaagtatatttaacaatgaatcaaatggtagaaaaagaatcaataattgctgaaattttttgaataagacaaacagttatacatgtttaaaaaagtcaacaacatttagggaaggagggagtacatgtgaaattatcgttggagattagacctcgagattgtttgcaactgaaatgtatgcattccaagtgccaatccagatgctccaggtgacccggtcgagtctcctctacaatatttgtcatctaaagttggttactgatatgtggtgggtctgccggatatggggcttttatatgtggcagtactcccaaggtctcttgtgtttgctagatggtattggtagatatacaatgtcacgttctttgtcaatgctagtgctacatgcttacattcttcaaccgtattgatatcgttatgtaaaaaaaaagtttttgattgtttatgaatgtaaaatttagtttttctaatttttgcgggtatggtattgaagttgtcattaaatatactatatgaatataaaaaattcccaatcatacctgtactgttttcttaaaaaataataagagtaaattttacaaaactacacgttttttttatccaagttacagaaaaccacacactgacacttagcgtttaagtacatatattttggtagtgtagttttacaaaaccacactatcaatgaattgattcacctgtgatatggcgtggctgttccacttatgatgaggacatggcatcctattaccagccatcgcacaaaattaataggatgccatattctcgtcctaggtgtaacaaccacgtcatctcacaggtgaatccatttatttactaaaaaatatatatacttaagtgccaagtatcaaagtgtgtgtggttttttgcaacttgatcataaaacgtgcagttttgtgaaatttactcaaataataatgatgatttcgttttgacgttgtgaaatccctgggccctggcaccggacaagctaattctgtctccggtcgtcgtccctggaccgtgcacgtctgatcggacggctgagatgcgatcgacgtttttttaataaggctcgtggacgaatccgtaaggctgatactaacgcgaggaccaaacgagaaaattgccaaagggcgaaggcttttcctcgggttttggcgcgcaccgaccgaggcggcggcggaggcggtggcgatggatcgcctccggcgtcggaaccctaaaagtgtcccttccggctcctcttctatgaagcccccacggcccccgcgtggcccgtccttccaggccccagcggtgccgaggccccttccagagccctcctccccaggtatcgcccagctccatcggtggcgcttcttgtttctttctttcttggctttagggatctttttattgccggtgcatgatgcgagctaggttcgtggatcgaggtagaagtttctagtttctgggctggttgagttgggattgcgtgggattgggggttcgtgaatgaagtcgccgagttcaattaatccgcggttcaattctaaacaactcgcaatgcgattccttgcctcttgctgaatacaaaagagaggcgttcatggcttttatgtgtagatttgggatcatttcattggcaatttggtacgatttggtgttggtttaagatcgtgagccgctgatctccacttttaagtttttttaaaaaaaattaatctgccctttcaagaaaaatatttatttgttattagctatactgtttcggaattgatgagctttgatttctctataagtttctaataagcattttttttggggtgcctttgcttatagtcctcttgtagtctttgttaatttccagctaatttatccctaagtactatcatgttggttattgcaacctttattcaatgagattttctccagaaaattagtccgcatttctaatttgattaaatagttgagtatctaatgacaggtgggaggccaaggaaaagggttcgatttgctagtgaagccagcagtcatcagatatgcgtgagacaggatgctaacacaggcaaaagaccccaaggtacatttccatatggccctggcctcactgtaattcctttcttaacagtctggattttgataatcccctttaggtttcatgacgtatgaaaattctatcagaaggctacccatttccgtatcttcatgttgcgtgcttcggcttgcagggggattggtttgtctttcaaaatatattgtgggctccatgccattgtagtcttctcaatgttacagggtccttattttctcatccatattcccagttgtaataaccaaacagatctttctttgaggtgtggtgagttgcgcaatttccaagcatgaatcaatggtggatgaatgctacatatccctttgaagttcttttagtattttctgcaatgccatcagagggatgaagcatggaagcaccactctgtaaatattgctgttaaattgttgaggccatttgcttgttgttccttacgatagtgattttaatttacatttacatggttttctttgtgtttctatgtctttattctatttcacaatcattctccatgcaggttgtgatgcgaaaactactgaatacaaattctttaagaaattgtgggagcagtcaggctgtagacctcattctttctccaaacaaaacgaagaaaaacagatgggtttgtaactctgtatacatttccatagggtgtactatactcctgttctctttggcgctcttactaaatgacttgaaacagatcattcatatgtatcttatgtgatttttctgtgccttgtagaatcgcataatgtaatgccaggcagaaagctccctgcccagaagagcactttctcttctgaggagacccccgctacaccttgtaagaatgaagaaatctaccatgagcaagtcaatgcgaaagcttcccattctggttgaattcgttttctctgatctcctttagccatgaatgatgcagttttagactcttctaactattaattgtcttctctgcagaacatggcaataatgatacacctcagttgaacccacatgattacttgactgttcatgttcacacacccataactcaggtttcgtttgaagccgtaggaatttcaagaaacactggtgagacattttcatctttcaataagaaatacatagcatagtgactgactactatactgctgttgccggaaattgtcactatgatatatagacatttcctgtgtatggatgttaacttgttttagaaatgcactattttgtagggttatcattccatcataaataatggcgcccatggtagttgaggtttttcttatatacatatactctttgaatgaaaataacagaaattactatcaggcaaggcagtaatcctaggctctttgtattatttatgtttgttttcctcatgctgcctacgacacatcttttctgaagtgtgttggttgctgatatttggtctgcaaccgttggctgatacaagaacatgttactgattcaccatgcataaattagtattgcgagatacatatgattagaagtgttctcacagcaatttacgtctgctatatttatctaatgtgctaagctcatattcttttcacttttgatgatagacatagaaccttggagtggacggatcttttcagaaaagagaggaaaattattaaagctagctgcaaaaactatgtcaatggaaagttctgagtttttgcagagaaggttgacattacatattgaagaactcctttactttatattttcatgttgtccgataatggttggcctgatgacataaatttctcagatcagaattttttgctgacatcctgcaaaggctaggcgccaacagcatgataaaaaaggtatcctttgctgaacctatgtaatgcactatcacccactcaaaaatgtttgtctattatttacaagttccatgatttgatttgattttttttttttgctgtaatgtagcaccgtaaggagtccatgagaatgatgaaggtctgtggccatactcctactggcaccggatgccattttgaaaatatgcttgattacaggattagtgactttgatttgcgaactaaactgagaacagaaaaagagtcatcctcttatgcaacccaggaatcccgtcaattcatggctttgccatggggatacaatcagggcccttcaggttctcttgattggaaaattgatttacctcacaggggcaatgaagcacgtgagagcatggcattaccatgggtgcacactgtgggtcttccaaattctggttggaaaagagacactgctcacaaccaggtttctaatttgttgctagaggatgtccaaccacactccgaaggcaaactggcttcagctactgagttgaactgtaatgttgaaccaaggccatgcacttatcatggatgggtgcctatgttgtcacaaggattctctggatccattccaaatagatttttcaccccctgtcagattgaggagacacatgtggtaccatatgaaatatcaaacacttaccggcgacctgacccttgtaaccccttggaacaatgttttcctccagttggattggataggcaaggccaaaagcaggcaagattctctcataattatggtgctgaacttctagagcaatttacttctagttcagttggactggaaaggcaagaccaacatgggtcagaattagttaattttgacactggacttctatctagctttgatcagttatatgcaaaatgttctgcttcaagctttttggacactagaaatggaattctcaatcacagtgattttagctatatctccaacttagctgcaagtgagagcaacgatattgtgtcgaatgcaagcatgagttgtctgaattccatattttcaacttcagagcatccttttcaattgggctcaaagaggttgcatgaaacttctttggctggactggaggagaaatattcgaaggaggcagagatttttgataattctgatattgggcctatacaggaattggatcagttacctgcgaaatta

SEQ ID NO: 8257 - DNA, 31615 bp, Oryza sativa
agattcggcccatcgaacccgagggaggcaaaatagacttttgcggagggattgatttgggaaagatttggattcgggattgaactcgatgatagatcggggatttgagatctgagatggcacgaacactagacaacaagcaaagaaacagatttcgcaaatagggtttttaagagataatttttcccgctaggcgccacgacggaacgggcgctacagaccaacccccctaacaagaatctcgaccccgagattcagcacctaagggagcagctccgggaactcggcgcggagaagatcttcttgctcccaggttgcctcatcttcagaatggttgctccattggactttgtagaacttgatggtcttccttcgagtctgacgttctgcctcttcaaaaatcttgatcagtctttccttgtaggtcagattcttttccagctcgatattacccagggggacttgctcttctggaactcgaagacatttctttaactgggatacgtggaacacgttgtgcacatatgcgagaccttcaggtaactcaagctgataagccacttcgccacgtctggcggttatgaggtaggggccgatgtagcggggtgctaacttgccggacatcccaaacctccttataccacggagaggcgatacccgcaggtacacatgatctcctttttcgaactcaaggtcacgccttcgattgtccgcgtaattcttctgacggttctgcgctgtctttaaacgttctcggatcagtttaacttgttcttctgctgccttgagtacgtcaggaccgaataccagtgcttcgcccacctcattccagcacaagggagtgcggcactttcttccgaacattgcctcattcggcgacatctgaatgctggcctgataactgttgttgtatgagaactcagcatacggcaaacaacgatcccaagtgccttcgaaatccagggcacacgcacgtagcatgtcctctaggacttggtttaccctttctgtctgaccatcggtctgcggatggtaggctgtaataaatttagatcggttccgagggcttcatgcaactgcttccagaactttgaggtgaactgagtgcctcggtctgacacaattttcttgggacagccaaatctacacacgacatgggtcatgtagagttctgctagtttctttccatcaaaggtggttttcactagcacgaaatgagctgatttcgtgagtcggtccacgattacccagatggagttgtacccgctaggggttcttggcaaaccggtgatgaaatccattccgatctcttcccatttccactcgggaatcggtaggggttgcagcagaccagctggcctctgatgttctgccttgactctttggcaaatgtcacacaaggctacgcattctgcgacatctcgcttcattccagcccaccagaagtatgccttgatatcttggtacatcttcgtacttcctggatgaatggagtaggcggactcatgagcttcctttaggatgagatctcttaactccttcttggccggtacacagatgcgtggaccgcaccaaactgtgccttgatcgtctatggagaaattggtgtcattcttctcctgtattctttttattaattcttttatcccttcgtcatctttctgagcctcccggatttgcgattctagggtaggctgcactgtcaagctggcagggacacctgactgtaccacggtcagccttaacttctccaattctctgcacaggcgatcttggtaagaccgtatttgagctacattgcaataggccttgcgacttagcgcatcagtgaccacgttagctttactggggtggtaatgaattccaagatcgtaatccttgattagttccaaccattttctctgcctcatatttaactcggtctgagtgaagatgtacttgagacttttgtgattggtgtatacttcacatctgttcccgattaaatagtgcctccagatcttaagagcatgaaccacggctgccaactcgaggtcatgggtgggatagttgacttcatgaggcctgagctgcctggatgcataggccacaacctttcgttcttgcattaggacacatcctaagccttgtcttgttgcatcatagaagatctcgaaatctcttcggatatctggcaaggtgagaactggggcagtggtaaaccttttcttcatttcttgaaagctgtcttcacaggctgtagaccattgaaatttcttttccttctttaacagctcggtcataggtctggctagcttagagaatccttcaatgaatcttcgataatatccagctaagccaaggaagctgcgaatctctgacacattcgtgggcgggttccaagcaagtacagcttcaaccttgctgggatctacttcgacaccattgggggagatcacgtgtccaagaaatgctactcggtctaaccaaaattcgcatttcgagaatttagcgaatagttgatgatccctgagcttttccattatcagcctcaggtgttcagcatgttcttcctcattcttggagtatatcaggatgtcatcgatgaacaccacgacaaactggtccaggtattccatgaagattttgttcattatgttcatgaagaatgctggagcattggtgagtccgaaggacatcactgtgaactcatatagaccataacgcgttgagaaagcggtcttcgggatatcttcagatctgattttcaattggtggtaacctgatctcaagtcaattttagagaaaactcttgctcctttaagttgatcgaacaaatcgtcaatccgtggcaacgggtacttgttctttatagttacttcatttagggctctatagtcgattaccattctctcacagccatcctttttcttgaccaggagcactggggctccccaaggggatgagctaggtcgcacataacctttactctccaattcttcgatttgtcttttaacttctgctaactcattagctgccattcggtagggtctttttgcaattggtgcggtgcctggtgccagttctatggcgaactcaatctctcggtctggtggcatacttgttaattcttctggaaatacgtcgggatattcacagactatgggcaccgactccaaggaggtgacttgtaaacaggttaggatagaccgactcgcggtaggggtgttagaggtaaagcggacttgctttcctccaggtccttgcaaggtgatggacttttcggcacaatctatctgccctttgtgcttagccaaccaatccatccctaggatgatgtccaagctttgcgagtctaggactatcggtttggctaggaagtcaacttcctcaattctaaggttaacttccgggcatatttgagttgcccttatattcctcccaggggaatgtactatcattggtacacgtaaattttgggttttccaaccatttcttttcacaaaagcttgtgatatgaaagaatgggaagcttctgaatcaaacagaactattgcgggtacggagttgacagagaacatacccatcacaacgtctggagcatcctgagcggtctcagcttgaatgtggttcacccggcctcgaccaaagttgttggaagcacgagagccttgtccacttgcctgagagctaggacgagactgagctgccgctggagtaggagttctggcagtgctgccattagcatgccctgagttggtgttggtaggattctgagggcactgtcgggcatagtgacccatctggttgcaccggaaacactgaactgctgacggtcctagcggtgacttgaaagaggtaacactgtttggtgcagtattgccactaggggcacgctgctgtggctgaggtgccggacggttcatctgaggacgaggggcgtagcctggctggcggttagcctgagtgaccgactggtggtattgcatgggttgaccatagcgagggcgaggtgcgcctcgggaagaatttccctgatggttagacttgcgtttcttgtattcttcggtagcctcttttctggcatcctcaagtagaagtgccttgttgatcatatgttgaaaagtggggaagtcatgagcaagcaactggagtctcattcctactgcgattcccttcaagaacttcctgatcttcttcttgtctgtgtccacttcctcaggggcgtaccgagccaacttgttgaacatacttaggtactcattgacactgttgttgccttgcttaagtctgttgaattcctctttcttcatatcaatggtgctttcaggcacatgagctgcacggaaagccgtagcaaactcatcccaagcaatgttagtgggttcagggtgtgcattgcagtaattctcccaccaatctgcagcaggtccttttagctggtgagaggcgtagagcgtcttctcaacaggagtacactgcactaagttgagttttctatcaacatctttcagccaatcgtcagcctcgacgggctcgacggtctgagagaactctggcggacgagacctcagaaagtctgttagattggatctattgttgcccatgtgagggtggccatttccatgcgcattgtgctgataaccggctacggctgcggctaatccttgcaagatttgtgtctgaactgccattaagtgttgcatgttgttttccacatgaggtggggaagggaggcgttcttctccagaattgtgactggcagtgcggtgagagcggtgagactgttccatctctgcattacgggaagctgtgtgatgcgagcggttgctgcggcggggttgctcaacttctgcgttgcgggaagtagtacggtgcgaacggttgctgtggtgagactgctcattagctgactcatgatttgcttctggctcaactctaccttcctcaaaaccaaagcgggctggtgcacgagcagcacggcgggggcggctagccatctaaactcccagatgagggcgaggtaagaatcagataagcacttaggagggcaaggagcaaagtaaatagcaactcagatagcacacactaggcataaactggatttttcaaatcataaaaacacctaatacaacgggtgtggacaagtcacagagctacgccgagcttgactgtgcgcacaccacctaggagaaccggactaccaaacaacacccacatcaaacacacgcacgcactacctcgccacgactccaaaagagttggcggcggaacaaaagggcctaacacacggacggctgctgaagactgcctcctctactcctcgtctgcctggctgcctcctgtagtcggctcctcagtcgaagaaacgtcgatcggctgacgcgaagggaccggcggaacctgtcgagggccgacagcagcacgggccgctggcggtgtgggagctgggtagtcgaaacggaacacggtggaagaaccaacaacacgcttccgcgcagtgcggataaagcgtgggccacggtgggaggaagcaactggggtgtgtccaggggtgtaggaggggctaactgggtgagggtagggggagtacactggtgagtacggcgcacgcgagctgggggagcgcaggccactgggagtgcgagcagagccgcgggagctgtgggaggacaggtggctggcgtggtagaggcgacctgagtcccaagagacagtgtcaactgaggtgacaccctcctcggccagacgggcctccagagcggcgtagcggcgggcaagggagcggtaagcctcaaggagtaggtcgtgctgagtggcctgagcctccgaaagctcaaccatgcgagtcagcactggctgaaactcactgtaaggacaagggtacctggcgtttgcgtggccagaaggaaggcgtggaagctgccggaaggcagagcccccgagacggtggctgtagtcgtaggccaagcgacgaagcgcagtccaggagaggtcctggcacgcgatctggagagtgggcctggccacagtgaagtggtgtgggcgaaggccagctccgtgtatacctccacgagggtaaaggtacacagagagctcacagcgagggggaacacggtccacggagtaccccgtgtactcgggacacgagaagccaaggaagcgggcgaggtctcgaagctgagcgacatggtgaccctcaccaaaaccgtgggaactgaagctggcgttcactgccatctacaattttgaaagagggagaaaagatcagtaaccattttagaaacaaactattgaaaataaggaaaccaaaaaaagccttagcttttcgcaagtagttttgaacttagtacccttagggtcgtcctaaacgtcgggtttcgccctaggggcaagcctgtgctctgataccatctcttgtcacgcccctaactagtcccgaccggaactagcccgtgacgctccaaattaacctgttaatctataccagtcctaggaaacagtgctggtatcacaggaagacagaatatcacagcaacagaggtctctttattatagagtagaggtacagtcatgttgggctgcggacagatcccgagctcacaactgcatttcaaaagggaagcggaagccaagactcggaccaaacaacacaggcgcgacttgggaactaggccgaaaccctaaaactcatcgtagcgggatccgcttcatcttcttcagcaactgggggggattatttatatagagcaagggtgagtacgggagtactcagcaagccataggaaataagtgtttaatgcaagcttcaaggaaaggctgttgtttttgcaattgattttatttgatctcttttctgaaaacaactaagtgagtgcttctcaaacgacacggatgagacagtgcgtctcgtccggtcggagtatgtgcaatgtatcagtcttttgaattgatcaagattggcacccggccaacaattttcaaacggccacccgggccaacaactttcaaacggcctcccgggcctagctgatcccatcagctgcagattttccaaacatcgatcccctttccacaacagcaatttcacaagcagtagtcaaacaaaactatgctaggaatcacctcacatccgcccatgaccgtgggcacggctgttcgaacagtttgttaacctctgcagagggggtacactttacccacacgacattactaacccggatcacccagcccgtggggatcagccacgtcgggagacctccaagctttcatgacaaggcatttccaaagccgacacaggtttaccatatgccgacgagaggggtcccagaccaacaacaggttaggtcccataccatactgtgccaggaagcccaggggtcctccccgacactaccccggcgaatccacatgtctctcggcatcaaggctcccctgataagctagttactcagccaggggtgtcccattccacccatgtggtcgtacttgtcttatgttcggatgaaattccaaggaaacggtccttaggtgcaagagcgggaaaccgtacacccggtacgttccccggtccgcggttttggaaaattcatttagttcgcaagcaccgacccaggtgtcgggttttccaagtcttttgtaaaacccaagttttacccaagatgtttatcatattttaagtttgaaggcgaccgtcgatactcgtgcagagtgcacgatttccgaggcgcaactgggtggttacaagggaacatggtataacaattaacgaaggaaggatcaaatgcaacaaattaggtaggctgccattctgccttgcagacgggacaaacagattaagtgcgatcctattaatgcataatatttttcaagcaacataattaagttcaaatataggctcaagatgttcaaaggtggcttgccttgctcgagatcttgagcttgatcctcgaaatccttggactgcgggtcttcgggtgtataggaatcaggagatcaggaattctggaccgtatagaaatcgtacgacgtcgcccgttcccgagtgatcaaacgttcacgaaactccgcataaaactgaccaagtcgtatcgatcttccagggcgcgcggaaaacgaattaagcatgccagctgcgacgacgattcagatggaagcgtcgccggcagaccattggtctccccgtcatcgccggcggtgcggttgccatggtgtaaactggtgccgtgtcgtgagcactgccatcgtactcctgttcgttggcctcgctgtcggcgggttgttttacctcatagctgtgtccaccagggatctggtttactccgcctcgatcgacgccgtctccggcctcgatctcgaccacccgacgctggacccggtgttcaacctcacagtccgcctctcctcgcagaaccaggtgaccaactacccaaactgcatctggcctggtacaaccgtggaggtcacctaccgcggcgtccagctcgccatcgggtccgtggagcagctctgcgtcggggcgcgggagacgaaggagcagcacgtcgtcgcgtggggcgccggcgtgcgcttgccgggctccgcgctggacgcgctcgcggcggacgcgcggcgcggggcggaggcgttcgacgtcgcggtgaagatcccgaccgtcatccacagtggctaccacagctacgacccccgccacgtccacctggggacgcttgtgtcgtgcatgtcgaggcgggtcggggacgaccccgtcgccgcgctgaggactccgtgccatgcgtccagtacggacatcgctgcgtcatacccaaacaaggggaggacgcagcctgggggtgccagttaacgtgcgtgaatatgcaatccgcccgtcatgtggtagtgagcgagaccagtttctacgttactagaatataatagagttcagtttttttttgggtcaatatatattttgtggtgcatgaattatacatatatagccgaggaatcaataatagatcatgatataaaacaacagtccataatgtccattgctgtacactctattatgcaattttgttgctaatttcccgatccgttgagcatgccttcttgtacaaaagggagagacacaccagtcgtcacatcatcaccgtttcaggcacacgccaatccgcgagcctgacgctccgatcgagcacgaaacatatagtcgtacacaattaacgcagctagccaactaatgaaacgcataaaacttggggggaaaaatcatatggacgatccacgagggcgctcaaaatcgaccttcgtcgtccatctcacgctcgaccgccgcgtcctccaccgtgtcgccaatgtacaagtacgggttcttcgccaccggctggaagttgtagaaaacgaacaggtagaaggcgaggctggcggcctcgatggccacgttgacgccccactggtacttgtagctgagcaaggcgaggaacgccgacgcgatgatccgggtgaagtagaggtagccgacgacgacgaggtagaagcgcttgaacagcgtgagcttctggaggttgagcgccgccttgccatcggtcttggatgcctcgcgcatgctgcggatcgaccagatgatcgggaagaacacggcgcagcagcagatgacgtccaccagcaggaacacctggttccacacgacccagtcctgccccgtcggccccgtctccccgatcaccaccagcaacaggttctcgaccacttgcagcgggatcacgatcataagcatgttcttctccctctcctggaacgagtaattcgcaataattctgtaaaaatggaaaattctatagcctggaattctaggttcgttaatggcgagagagagtaattaagatcaatggtgatcacctggaggtagggcttgaggatggaccagccggtgccgatgaggatgatgacggtgaagagcaggacgcccttgaagaagccgaagacgtagaacgccacgtcccagccgtgcggcgtgccggtgcgctccacgtaccacgagtcctccgccgcgcacgccatcttgagcgccttgaacagcagcagcgcgcccatgacggcgtggatccgctccaccgtcgcgcggtgccgcacgcacacgcacgcccacagcgccaggaacgcgaagtacacctccgacacgaccgtgtagatggtcggcagcggccgcaggcccacgggtaggtagtccctgggcccgtcggagatgccgtcccgcacgttgtacatctcggtgtacacgtcgacggtgacctccacgccgtcctggcagttgctgaacacgacggcgtactggtctgggtcgtcgatgctcacggtggtggtgacgccgccgggcgggacgtcgccgagccggagcaccgggagggcgtactcgctcgtcagcacgcagtaactgcccccgccgtcgtcgccgttgtcccccgggtcggcggccgcgtacgcggacgcgttgttgatcttcgggaactgggttccggagatgaggacgaaccccatgaggctggggtcaaccgcggtgcgccgtgacccccgccggagattccaaaacgagcggcgtatggagatggtcgccttcccgccacgctcgaagccaaactgctcgaacagaatgagaggccgagcgtccgacacgatgagcgtcgtcctgatctcggcatcggcgccccgcacgaggagcagcagcacgacggcggcggctgcgacggcgatggagagggaggtgtccatggaccttgccggcgatcgtacgtgcatgtcgtccaacgctgcggattagccgttctgcttgttgcatcgatcttaatctgcccttcccgatgcagaaatcgcaccatgcatcgatcttaatctaccgtgcaggaggaggaggaggaggaggaggggcggcaatggaaatggacaggcggttcgtcgatgaccatggcgtgttttagggatggccatgagaggagagcgaacggagaagggcgacgtgttgtttctctcccgtttttgcaatgccacggcggccatggtgggcacatttggtacggtgctcccgcgtgcatggtaaatgggcctcatgtgatttgggctgggcgcctgggcagtatatgggcttgatgggctgggtgtaatatttcttcagcgcacaccttctaatttcaattgccttattcaaaattttccacttatcgggaacacctttgcatattttctacttactccattattaaatcgctgtaacatatgcattattccccaccatccataggcacatcgtcgtttttaaacttctctgtacccatgacggggcatacgatctgtctgctttacgattctagcttctctttaagctaaattactttatatttacaactttcttttagagaatttttctatttactttcatgttccctagctggaatcctattttgtgctgttttccactgcattccgtcctactatatgtaaagcggaatatgtctgtctagagctctagggttcttttttatgtcttgggccaccaatgaattgtttacgcatatatgtatgtgtagattcttgagtacatccagaagagtgtagagatgctcagaaatgtaatggattccttttggctttggctctaagattgtagtaaaagagaatccattatattacatgcgggatagagattaattaactcgatcatcaacataggataaagaggcgcaaatataccgttttatattaaagccaaaacataacctaccaaaattttggtgacttaagtagtaaaataaaggaaaaactaaggagttatttagtatggaaatcctacaaggaaaaaaaaactagaaattgctactccctccgtactaaaatataagtgtttttggatggatgagatacatcatagtactacgaatctagatagtctcttgtccaaattcgtagtaatatgatgtgtcacatctactcaaaagccctttgtgtctcgaaattcctatgtttttcatatagtgctatcaaaaaacattttcacaatcttgtggatttactttctatagtatttaatgaggtgtggcatcctattttacaaatttgtgtatttactttccatattattcactgaggtgtggcatcatgttcttgtattttctaaatcctgattttcaaatacctgaatgtatactcttggagcttaatttgctctaaggcccccgcgtcgcctcccgctcgggcgactcgggcggcgacccaagccaccgccgccgccgttcttcccccctcccctctgcctcgccgccgcctgagcaaacggccggcaaagccatcagcttgctaggatggtggcggcggggctcgtggcggcggccaccctagatccggcgcgggcgaatctgagggtggaggccggccggagcggcgctgtcgtcgaggccggaggcgtgcagggcgcgcgggcgacggcggcaggtggtcgtggtggcgacaggcggcgcaggggcgcggggttggcggcggtaggtggaggcagagactggcggtgggatgtgggccacggtggtgaaggcggcggcaggcggaggcggcggggtgtgggccgcggtggtgaaggcagcggtggcggagtctacgacctcgggcatcaccggatccgcgtcgaccattgccggatctggagctaggtgcgggaggggaggcgggtggcagcggggatgcggtggcagcggggatgcaggcggcagcgggagcataggaggcgtggctctggtggtggtggcgcgtggaggagcgtggaggcgaggccggtggtgtggaggccggcgcggcccgtggagatgcggccggcggcgtggcgtggaggccggctcggcagcgtggagtcgggtgcgtcacgtggagtgtggaggccggctcggcagcgtggagacgcgactggcagcgggaggccggtgcggcatgtagaggcgcggccggcggcgtggaggctggcgacggcgcgtggttgtgcggccggcgatggcagaggccggtgcagcacgtggaagcgcggccggcggcatggatggctagccgagcttcgacgaccggtcccttggccgccttggctggttctagtcggtgcagcaggggaatgtgggcgacgataggttgagtcgagggttgaatgcttgtgagacgtcgtggactatcgtgtggccgtcgatgtggggggcttgtgtgggtaatgtgtagacgccggtgaaagccttgccgtgcctttggccggttcgatgacgacgacgccgttggcgccgtttcccttcttgaaggcgttgtcatggcgctctgccatttgccccacaaatctccaggtgaaaaccttgctccggcctcggacgagcggtgacgacgttacgcgtcgtgtccttcttgggggcatcgcttcgggaaagttccttacatcgatgactattgatggtcccttcggctcaaaagctttctttccttggcattcggcgaggcctaagcctcttgggtctgcttcgttctatgatggacgacacactcttcggttgcttctgcggatgaagttggagctgctcgctgttggggtgcggcgacgcttggcaacgatgacgtgttgtagtctcttccaaagagttggtgctggccatgtggaggaagtggctctttggtggcttggctgatgtccattgtggatgtcggagctgctttcgctttggcgacttttgtggcttcagtgtcgctgcagtggtgaagtcggcgctgctgggtcgcttgggcggctagctcggcaacgataatacctcttctgtgatgtcggagctgttgtgccgcttttgtgtttagcttggcaacgatgtcctgtatttgggctccgctgttgttgttagttgtgtgttaggtcccatgctttcttctgtccgttgggttttagccggttccccataattaaccgtgcagctgtatggttttcgggcctgatttcccttataaattgggtcgttgtctcttgtctgtacagtttctccctctcttaatataaaaccagcaatgctggcttaggtttcaaaaaaaaaaattgctctataagtaagaccggttcggaaaagctggttgttgcaacgctgctgagcagtatctacagtgctacagcagccagccaacagcggtcgtaggagcttttcagccagtacaaaacaactagctgcattcaaaatagtccagaccgctgcagccgaacggttaggatgtgcatcacagctgagattgacgtggaaacaggatactaaacatgccttaattcgaagttgttccatgttctaccaaacaaaatgtcttatcatccatcacattcatatatatgagcaaagttcttgatcatgtcctttgggacgaacagaaaagattttgcctacaactcaaggtcgtaggcaaagaactgtttctcatgcatcgtgacgcaagcatattagcactgtcttttcgctgggccggcttggagccctgcatgatgcatcaatatttttcttcctctgaaccagcagcagctcgcttgcagcacgggcaaatcatacgtacagatcacgttcagttcgccgaataataaccaaaactagaatactaatgagatcgacccttctagtagtagaaatgcaaagtgcaaaagcgccagggagaataccatccgaccagaaagacgcttgagaatcgacgtgccatcgcaagaaaacaaaagcagagaacatatataaaccgggcgatctcgatctcgatcatctgcaaatgcttaacaaataataacagtagtagcaatccaaagccaacgccctgcaattatatgtgcgcatatgtggatcgcccttccctttccggtcgctgggctttatccgccctcgcccatttaacaatccggcgcgcgggacacctgtcgccggctcgccgcgcgactagcgcgccgtggccgcgggcgacagcgacgccgcgcgtaaactaatcggccgcgggagcttgcccgaaatggcagccattgaacgccggaatagtttagtctccccgcgagcgcgcctcgccagaaagcaacgagccgtacgtcgacgtagcagcggacagcgcgcgcggatggtgggtgtgggtgtgggtcgtggcgtggtgtgcgacggcgaacgtcctggcagggccgtgtggcgtgtggcgagagagagggaccgaatgcgtgagccaggtgggcgcgcgggctggagcagcgcgtcgcatcgatcccactcgccgtgacagctacgccggagataaaataaaccggctgaatcgatcgcccggccgtggctaagctagccgtgtaggaccaagctacttacgggctaggctacagggctctacgtggaggcgagggggctctccggtcttgccggccagccggccaggacggcatcgtgaggctgtgacaaagatgccctttgctcggtccccggttaatttagtgaggtctaaagagaagagtaaaagaacatcccattgcaacattctggtgcctcgactgctctcccgccctgatgtgatttattgattaattatacggagtagtaagagtgctgagtctttttaatcagtgcaggaattaaattctactgcaaggttatatgcaacgtgttcccctgttgctcgtaaaagagatacgaccgacagggagaatgactgaatatgcaggaagtagagtgaaattggttctgcttgcctaccttgggctaactactcgtagtcgtagcaaaacgaacaccattacaccaatattcatgcaaaagttttcaaatcaacgcctatttgcagagatcaacacacgtgttaattaattcgttggtcttccactgcaaatctgcaagtcgacggctgtggtctctcctatgtcctatctaggctagttagctttcacgggtttccacaaaagcaatgtgtagccaagcgagttggcagttaacgaaacatctacttcgatctgatccctagtttaacaaactgttcaaacttcaaagcgtgtaaaaggattagatttgacaaaggtgcattaaccagtgatcagtataccattgtacatgctgcggcggcgccgtgcgtgatcacgctccgagatagcgttactggtttggcggcctgcaacgacgacacgtcaatatataccagtaaccgcgtttccccgcctgacaaaacggagttttatacaattctagtgcactaatcaaaggttagcgtgttcaagtgcaagatgttagcacgtaactatatagttttctatggcaggagagctttgctctggtccttctaaagtccagctaaagtgcccgtctttttatctcagctttttttcccatcttacaagctgatgagactaggggtctttctctgatctgccgagagattaggaagttccggtcggttctgagatgtcaactggtggattggcctttctttgctctgccccatcacgcatgctctttatcttcagatcaacagggtaaatgatgagtgctgaactgctgactgggaggatcgactgtgtatggctccgtagtataccatgaattaattcttttgttattttgaacgaaccgcaactgattgtgcaattcttttgttatgaattaattatgaatatactccctccattatatatttataagccgttacaaattatttttattaaatattatgtaaatatattttgataatatgtttgttttatgttaaaatatggctatattttttgaaaaaacttggttaaacttaaacgtgtttgactagataaatattaaaactacttataatataaaacggagtgagtagatattaggatgtgtgacacagcacaaacacgaatggaagtggttttcattttttactccaaatctttgtgtcatgataaagtgaacgcacgtcactactaagcgattagtttttgttctcttgaactagcgcaacttcattgttatatatccacttgcttctttatatattacattttccttggcaagaagtattgctaagttccggatgcaattatgcagaaaacgacttatcgccttaagttcacaactaaaacatggagcatatggccaacttaaatttcatgcacgaataatatagaataaatagcatgatattcttctacatgtgtggttactattacaacatatgtccacacatgttctcattcaggtaataataacctaacttaaaaggctgtaaaagttatactgttggacaaagcctgacaaccattcaaatgaaaaataacttaaaagaccactaatctacacgataagaatatattggtatacgcttgattgctagtagtgcttacctaagtggtgtgtttatttaagagtttgaacaattgaacagaaaacaagtatatgcagcatgtttttattgaaaattgcctgattttgcaccaaaaaaaaggcatagcctaacggcaaatctttaaggtcattaaatttctaactaaaacaaacccacatgcgtttactattagcgtgcaccaagatttaatctcaggtgagtgtagtcatacacttcaccatttccacataattcacattataaattagaaaaggacattactttattctttcgacgccacaaattactgtagctacggtgtaaagaaccatacagtttccatgctatactcccgtcaaagctagaaatactgttttaaacattgacaagttcttcaaaatacatttctgttgtaaaacattttaaaaacctaatgatattataatttcataaaatatttttaaaagcaaatgttctacacacatgatttttatacacccatctagtagtaattaaatattgggaaaattgcaaaaccaccccaaatatcactctaagtttgagataccctccctgtaagaaaatttgttgcaaattcccaccttctaatttaccttggttttgatttaggcaccttggtttggaatatatagtgagtttaccatgaaaaacacaatgaaatgaccatgataacacaacgaaatgatcgtcttatacagaacaaacaacataatctcttgctcccgccgagtgggactcggctgattttgccacaagattcttcatgaatcacgtacgtgtggagagaatgtgtctaaatcaaaccaaggtgaattaggaggtggggatttgcaacaaattttcttatggggaggcatctcaaactcagagtgacatttggggtggtttttgtaattttcccttaaatatttaaaaggatgcatgctaattaattagttttgtatagtttgacttaaacaaatttgaaatgatatgatatgtcgtatgtaaaaaagaaaatgatatgaaggaaacgctagtggttttgtgtggatacatgacttaatccactaccactagagtataaaattcttatacccataaaatattcgcatacgcacttgcgctatcaattcagtgatattagtgattttctgctagcctttatctgtttagcactttctccgttttataatgtaagattttttaacattgtctgtatgaatatagatattaatgaatctagacatataaacggaggaagtatgtattagagtacatatattttttatcggaaactagagtacatgcatcagcgtgtacgtgtgtgatggtggtgtacgtgcgcgcatctatctcccgtgtaatctaaaaacacaacacctgcatatgtcatatctgctacctacttttctcgcgaacgaaatcggacggcacgcactgtacgcaccacgtgcaacacgtaccaagtaccatgttctcaacctaataaaaatcagctaattacctgtgatgatcggtctttccacgcgataataccattgtcacgaacccatcatgcgcaactaacgaaccccgcgccgcgcgaggatgacggatcgctctcatgaaccctacctatccatgaatccatccatccatccagcgaaattcgcttccggcatcatgccatccacgatcccagcggcacaacgcgccacacaccacgggccgctcgtacaagtccgttgtgctgcgtgcagagtgcagcgtgctcctcgacaaggaatctctatctctctcgtcaattctcctctgctctcttttttttgttttttttgtcccatgttaatccctactagtactaagctaaagcgcgctctgatgggggtgatattatcacatcccgatcccgcgatatcatcagcgcccactcactcacgccgcgcacagccgcgcgcactcgcgagcacgcgcgctttacgctttttcttacggcctaaaccgtgtgagcgagcgcgcgggggtgagcgagcggtggattccacagtgtcgcgcgcgcttgaccccgagtcagcgtgcggtcccgactccgactccgcgggcgcggttgcgcgctgttggttggagtacgccgcggcgaacgacggggagagtggtggactggactggtagcgtgacggtggtggggttaggccccggggctcccgtgttgacgacgcggcgacccggccgaccgtataaagggagacgtactccctccgtactcgtaaagaaaatcatttagaacaatatttaagttaaatcttagaaatataaatcatgaataatcacaagttgttgagtttaaaaatacaaaaattatataaatagatttatcttaaaattaatttcataaaagtataaatatattatttttcaataaatatttttataaaaataagaagttaaaattgtgttttggagatcgtgccgtttaaaaaacgatatcctttacgagtacggagagagtataacacgagtacacgaggcgcggcgcgcgggcgcggagcggcaccggaggtgaattcgccaaaacgtggtgtggtcaaagagaccgccccggccttttggcggacggcgacgggtagctatattaatcgatcggatcaaggcgctgctacgctttttacgctgctaagcgcgtcgcggctggcgaagccttgaagcgaccgtgatgccccccgcgacggccaggtgtttaacgagttaggctagcgttgcgcgcggtcgccgtcaggttgtgcttgactgtccggtgaataccatggagaggtagccaaagggaaattaccagcaaggacccctgatcgttgccagtggtcggcctcacacacgtgccaatcgagaagagatgttgtgaccaagttgaagcctgtgctgctgtgcccaagtagcctgtccgtccatgtgttattgtgttgtactactaccatggtgtgtactgctactagttgggcacagtcagatacatcggaccaggagattcggagatcgcttcgagctggatggactgctagcatggtgtacaggaaaagcgacgtgaaggagcatgtccgtttgacttgagcagcagaaactatatatatatatgcgattcggcgaaggcctacaggctacaacttgacggaggcctacaggctacaacttgaccgacttgaatgcatggtaggccatgcgcacgtttcggcgcaagtcaactgcacatatggcaacgcacgagtacgacactcttaagacaggtcaactgtcctaggccagggcttgtcccaatgggcacctgagctggggccatatgtgtatcttgtatctcatcctaaaattttaagccatgtgacatcgaatgtttaaacacctgcataaaatattaaatatagtctaaaaaaataactaattgtacagattgcgactactttgcgagacgaatattttaagcctaaatgctccaatgtggtgctacggtaaacatgtgctaatgacaaattaattaggcttaataaattcgtcttgtggtttgctcatagatactttaattagttttttattagtgcccgaacactaggggtgggcattcggtctgactgaaaatttcggtctcggtcttcggtctttgaaaagtgaagaccgaatttcaacgcaaaaatgtcaggaccgaaaaattcggtctcggtctcggtctcggtcctgaccgaaattcaacaatattttcatacatgcaaagaaataatgaaaatttttaacacaaaaatcacaaaaaaaaattataagcacttatgagttaagactgttattaggttgcatgcctagaagaagtagggatgtaaaaattatagtttaatcctatttaatatagtggattgtaagttgcatttacacttttttgataaatcgatcttttcgatctattcggttaaccgaggagactaactaaattcaccgaacaaaattcggtctttcactgcctaggatcgacttgatgaccgaatttctcggtctcggtcttttcggttcggtccttttctgcccacccttaccaaacaccctatataatacccaatgtgacatgccaaaactttacacccctaaatctaaacaccacctatatagcagtattgtgtagtatcctactgtagtatggatccatatccttttccattactgcacagtgcatagcagtaacaagctaacagcagctggcatgtgggtttatgatgtgtgaggtctacctgtcagctgtaactgttgtatagcaataaatgcgtacaattcatgtcatgctagtatactactctgttaaaaaaaacacattcatcccaacatgtttgtccagattaggattggtttttttttatggaggggtatgtgttttgcatggatgtaaatgcactgtattgttctaaaatctaaaatcttaagtgtacaaaaatattgcatacattcttagatagatagaaatattgcataccacttacatctcttgaaaggaagatatatattggttcaacctaaaaggccacgcatagatcgaacaatcatcacaacatagctatatttttaggaaattttattttgtgaaagttagaaataagtcataatcaacctgggactcaatccaccaattcttgtatgtggctcatattaatcacatactcaagcaagtatattcatgctaaagtttccacatattcacacttcatgttttagggaaaaaaataatcacctttcttttactaaaaaaaaatcacccataacctttgtcaagtcgatgtactagcacgtctacatatgccatattgtacttctcttccaacacatggacactcagctcaacaataggatttaacaagcatgttctcattttaattttgtttggtaaatcggccaagttaaaaaaaagggtaagttgaagtacctattggacctactgttgcagttaggggtgataatgggcctaatattattttctacgaaatttgagggttagatttgaagtggagtggactgaatttctatatattttctttactcaaaaatatattgagattgagttcttttcttctctttttcaactcacctctctcgttttccacgtgcacacttttcaaactactaaacggtgtattttttaaaaaaaaatatacgaaagttattttaaaaaattatattaattcattttcaagttattcttatctaatacttaattaatgatacattaataaaccaccacgtttttcatgcagggaggtccacctcacgaacacagcctgagtaggattgtgaaaggacccattacaaccctgtagtacatgccacaccgtttgacacctatttaccggaaacaacacatttgtagtgatatggatctaattaaccttaccatatttagtttcaaagtgcaaaccttaaaaattagagttatttaagtttcaaaattcatacccttaaataaaagtgattttaaggccttaaggaggaggcacctcatcttaattgtattatttatttattttgtaggagcactgctacacgtactaaatttcttactaaatttgtgtagtatatatttatacatcaacactagattagagaaataccgagagatgcaatactctgttcgtactaaaaagtgtggtaccccggtccatcctaccgtaagaaaaatttgtaactactatcacatatatacttggttgattgagtttttgagtgtgattaaaaggaatcattttgcaaattgtagcgatctggccctccaggagaaatagctgcctagctacaaagtaggaaacatggttggttttgtccttgtcgtggctactccaagcaacaccaaaaaaaacgcatgcagctaagctaggcagaggcagcgctttcggcaggaaatcctacggtaagtcggtaatccatcatcatatcagcggagacaaagtgcggaaaaaaggtttatcaaaattacccgcgacaccgatcgaatcaccgcgggggcatttccggcaaccccgtgctcctccgaaagcagtagtggcagtgggatgcccctgacagcgacatggcctgggccgtggtgatgagtgatgacccggagaatgagagaggcgactgtgcggatatatatgcagcgatagctcactcggttgttgcatcgatcgcttcatcactcgctagctcatcactgcgagcggagacagctcaggagggaggaagcaaaagaagagagagagagatcaagagatagacgaagagatttgtctgtgtaaatcaatggaagggcagcagttcgcttggggaagggaggagggagggtggaggaaagggccatggacagcgcaggaagacaagctgctggttgagtacgtgaggcagcacggcgaagggaggtggaattctgtcgccaagatcacaggtaggtgctatagctactgattgagtggtgttcttgcatgttcgtgaccatttcgatgttctctcgcacgttgtcccaaatcaagaagctcgatatatatagccttttaggaagaaattatagctagtagcatcagtttgcatttggtttgttaaattgcacgttggggcagtcaaacatgcaattagtacatgtttaaggttgcatatgtcgcccatgattgtcaagttgcatgatttgattccaattgcggcatttggtacgatcgtgttttcggagaataggcatttggtgcttgctctagcacatgcattaattaattaaaccgcgtatgaactgcatgcacgcgcgtgtaaattcgtcagaaccttttcctagctgtaaccgtggaaatccttttcctagctgagagttagcttcagatgattagcattaaccaagctttactttcttagttaagtacaaatgggagtggtaggtgtgtcatgtacatgttactttttctgcatatgtacgtcagctaattctgtctgatgctatgtatcttacagtactgagcctgtgtatgtcgtgctttgcaggtctgaagagaagtggcaagagctgcaggcttcgttgggtgaactacctgagacctgacctcaagcgaggcaagatcacgccacaggaggagagcgtcatactcgagcttcatgccttgtggggaaacaggtaacaacccatttgcaaatcctttcgtgatcgagctcgatcgcgtttaattttgccatgaatgtgtaactgattcgatcgatcgcattattctctgtggcggtgtaggtggtcgacgatcgcgcgtagcctgcctggcaggacggacaacgagatcaagaactactggaggacgcacttcaagaagggcaagccgtccaagaacatcgagcgcgcgagggctcggttcctgaagcagcgccgcgagatgcagcagcagagccagctgatgcaaaccggccagcagcagcagctcggccaagacgacgacgccaccagcgcggtggtggacgacaaccttgcggaggtcgcgccaccagccgccacctcgctgacccacgacggcgagctccagataatgcaggagatggcgccggacatggacgacctgctgtactaccacccgggagacatgtcgccctattcctacgacgacctcctcggcagcggcggcggcgagtgcggcgccgtggcggccagcgctggcgctgccgcctcgacgagcgagggctcaagcgaggagctcgacggcggcgccgccacgtggggcagcctgtggaacctcgacgacgtggtgcacgacatgatgatcgactgcgccgccggcgccggctgctgctggggtagcttccctccgctacaggataaaggcctcgctttctactagctatagcttaacgattactaaattgctagctagctatagctacaagcctacacactctacaagtagatgttccttttggtcttgtgcatcgatccaaactgatagcacacagcagcctgtgcgtgtggaggaggtcacacgtagtgactatgcaggtgagagcgagaggccattttgtgtacacgaagtgttggtggataaggatgcaacaccaactatactccactttgagtagctagctcgcctcgatggcatgtttggctcatttgagagcgctttttctaggagaaaaaggaagggaagagtttttttctttgttttgcttttggagaaagaatataggaggactgcaggggggaaaatcaggtgttaaaagtgcatctgagctcttgaaatttgacagttgtccattcgaggccatgtacttccaggcaaattattctatacatcatggtgagaattcattcatagagacgctagtaaggaccttcttatagtacttgtggtaataggatattactcttagggtttgctaaggggcgagcactcgttggcagcgaatgtattccaacaaactccacgtttgtcggggtgttcacgagagccacagacacggactctactacccaaaccccatcggatcagagtttcagggtgaggaacggggggagggggttcggaagtggatgatggctgacactggtgggatgggaaaggatggtggggaagatgggtgccaaccagttaagttgcacggagttgtggattgcggcaggaaagggcatggtgcgagggtttggtagtggtgttgtcgactaaaggaggtggtgaaggggtagaggttggcgcaaagaattgacatggtaaataggacaagctcaatagagggaaacctatcgtggggctcgttggcgtcgagtttcccggtgttaattttgctaagaagaggaaaaatggggcgggtgctagagggtgagggaggaaggtcgccttagtctcttgtgattggaggaggtcgtctcaaggaagaggataaggcgggggaggtttggggtaatcattgattctaagacaaaattaaaatatatttttatatttgtgaatgtacctttgatgttgtctagagggagtgaatagacacacttcctaaaattcactttgcaacaatcagtataggccgaaacttccagtgcgcgcatgaggacctacaaaacaagccaagcaaccttaccttaaaactttcggtttctataatagaacttatagtcaactagtccttggcaacaaagagcactcaatcgaaacttctagtctatatatgtactagaactttcgggaccaacaaaaagctagaacccagtgctcatgttgcgtaagatgactctcatctgtagatcaagcgatcgatttgagcacttgagtgacaattaaaccattctcgtgcatcctcttcatgtacagcatacctggaccctaattcaaaatcaaaattaaagttaacttaaatcgctttgacacatttacaaattctttctcttgtttttaagggtcaccattcgtcaatgaatttcttgaataaaactaatgtctacttatttgttaaatacaccaatccattaatcatttttgacatcaattagtcaaaatcctcttagaggacctagatgcacttcaaatttaaaccaacgtaatttccactattaattcatctatctatcatagcggcctccatcagtaccctcctaaccaccggtccatccccttgattttgcctaagtaagtgggataagtacttttattttttttctttatttaagaggacatccctcatatcttttcatgccatttaaatagttatatttcttaaaaaaaatgagagcatagataaatatgtgatatgattctataaacatacaagtttaaataaaaggaacaaattaaactctgcgtgtactattcacaatcacatttttttaacttgtatatgttgaatttaaacttgtatatgagtaaagtaatatatcacatattgatatatgatattaaaattattactattttgcatggttgacatgtacaacaacaaacgggaggcgacctcctcgagggaaataaaggttatctcctaactcgcgtacatttccatttttttagaaatcacctatgtacgaggagaagtgaaggaaaagcactaaagcagcatggtgttccaatgagtggtccttaaattaaaatcttcttttttaaaacgggcaaaagacttacacaccaatatattagtggaaaagagagagatttgacgactatgatctaccgacaggggcgggcccaaggggtagtccaggtaggcccaagactatcctaaaatttggtccagagacccctaggtattcatttttttggcccatgaaaaaagcttggcccatcaaacaaagaaaaccctaactcctcttcaggatggccgtctcccccgtgcgcggcgtgcgctctctcccctcccactcgacggcgtcacggcgacagcgctcccgcgacgcgagccggcaggccggccgccggcgcgactccggcgctcctgcccccgccactcctcccggctggccggctcctgcggtcccgccaggtgcacgcgcccagccgtggcggcggcgccgcgccggcgcccgcacggacacgtcctctctccgtcccgccgcgccttccggccatcgcctggtggcctcccgcaggccacagtcctgctcccgtcgtcccggcgtcccgctcccggctcccgccccgcccgagcccgacggtcgacgctgccagcggctagcacagcagcgcccagtcggcagccgcccaggccggccggcggccggcgccactccatctccggctcttcgcctctccggactccggtgagcaattccacagtccctctcccccttctagaatctagagactagagttctagtagtaaaccaacaggcagcactagtgtactacccctttatataacaattttgcattttttgatggttcatggttgttaggagtccaggagattgaggcatggagaagtcaagcattgcgttgctttttcaaaagcatgaagcaaaaaaaatgcttgtgaacttcttgcaaaaaaaaatttacattttgatttaggtaatatttaaacttatttgttattttctacttgtattgaaccatttagagttatatactgtatcgtttaccacattatatatcgaatcatattgtattgcattcgaattttttttggctaggcctaccctgggttcaaatcctgggtccgccactgtctactaacacatatcatggaggttacatgggagagggagggcacactaaattaactagggaaaaataatcgaactcctgagaacaacgaggaaaggagaaaaaggagaaagagtaagttactaagtgccaagaagatctcctagggattgggcaacaccgcaacccaaagcttctcttattgcacgatgcgatcaaccaccatctccgtcgtggaaataatcccctctaagacatgagcattttttctagccacaggtgccaaggaggacgagggagttgaacccctttcttgtgtgatcctacagttgctggcaagaagactcccaccaaactggaagcagagcctgttgacagggtgatagcctcttgacagggtgatagggaggctaacctggcccggttgaacagcaacttgtgctaaacttgtggtgcgaagacacactgcaccaagatatggtcacctagatatctattgattatctctatacaaacaaatcattagtgtttattattccgatgatcagacgggctagaacaatcagcaaaagataggatatgtgcattcttctggtgcatatatatgctttcgggcctgtaagatcactagcactctatataccatgtgcatttaaacttatatactctgcggcaaaattaattatactactctactttaggggtgtttgccttatcaatatatattaaagcagaaaagtagtgagaatatagggagatgagcttctttttcatatggacaaactgaatggaagaactttcttttcctagagacaactgaatagaagaaacttcaagtgcaccgtttgcactctccactaataagaatctaatcattaaaaaagaacaaaaacgacaatatgcacttggtagtgctgttttttttatcgcacatcagtttgcatgttaatttcgtgaccatatttttacttcctccgttctcaaataaaagacgtttcaaaatgcatacattcgaatcttgaatcttaaatcactactatatatgtacaagcgctaagatttaatgtcgtaaaaatgacattaatagatttgtcataaataatatttttacggagtctttttttttgtttttttataagcttgtgattagaaaaatagttatcagacatgtgctggagaatgtgctgaggtagttcttgatatgttcccattgctttgttatgtagttgggtaattttactatccttaataaggtatgaggtaccatattttttagtgtgaaacttgatatctccatatactagacatcttgatatatcaaatttttagtgtaaaatattggtattacatgtactttcttaactattataaaatttctctatatagttatgtgctatgagcatatgatatacattgtcaaatgcatatatagcacacaagtgacaaatatgtttatagtgatacatacactctccatctcataaaaaaacaaatctaatactggatacagattcataataacatgatgtatcacatattcacattttgtactaggcttgttggtttgttttttaaatagagggagtaagtagagtgagctatatgatcatttagttggtcgtacatacatactgcattatatttcattaacgtgatgcgggctacgattatcatgtatgaatgtcaaaactccattatatttctacgattgtttgtcccttttttatttagatgctttaataatcgtctgtacataggatagcttataagttatttctaagatctcgtttagcatcgtttatattttgttacatatatttttcttgctttacttaaacggtatgaaccaaacctgcactatttggtgtataactacgagtgtcgggatcagctatatgttaagttaatatcaaattatgattgttcaattgaaaaacaaaaacatattcgatttatgtagtcgtacatttaaatcacaaaagaatgatatactaaattatgaaatatataaaatatttacaaacattaaattttcgtgtagttccgattaatcgctgaacctccttccaataaccatatttcgggccaagcccatgtgtgagcaggccgaacactggtttcaagcccatcaacaccgcctccacgccgacgcccgcaaccagcccaacccagccaaaccgccaacttagaaaaacggagcaaagccggctaacttacctcttctttagggtttgtgccttccccccaatccctcacaacgcagccgccacaaaacccttctccccgcgcgcgcgccctccgctccttcctccgcccagctgcccgccgctcgttcgccaccgccaccgccgccgccgccggttggtcccatacttctcttcttctgatctttccggcatagtcgtagccgcgtggtggtctcagaagtaaatctcacccctgtttcgacgaatttctcacggttttgtcctgcagctgcgtcgatcgaagatgtatctccagtactacatcaacgagaagggggacaaggtgtacaccaccaaggttcgtataggctttccccttgcgcttacttgtttgattagtgattattactgtatggtttgcgatgttagtccatgcctgagaggtgtgtctcctcgttgcgttgcagaaggaatctcctctcggtgttcccacgcagtctgctcacccaggtacggtcacttcctctgatttctttatctgctcttgggtcataaaccaatctatgtgctgtttgttttagtgtaaataagaacttaacattcggtttgtatgtcaatctcattgttggcctaactataaacccgcaaacagtttgaagcatgaaaggtggtatactttttgttgagattttatagtctcgttttgtcatgcataccttgagctatcaaagggtgcttagaataggactggctaattagtgctggtctgctgggaattttgctgagcacgaaggcattgcctaaccagagttttgaatctgctggtgtgccttatactagtattttgggtttttggaactgattctcagatgatgtacggacattttttactaagtagaacagtttttttattgttcttgacttaggctgtgtttagttccacaccaaaattggaagtttgaagaaattggaacaatgtgatggaaaagttggaagtttgtg

SEQ ID NO: 8258 - DNA, 55972 bp, Oryza sativa
  unsure (1)..(55972): unsure at all n locations
cttttccctcatatcaaatgtctagacacatgtatggagcatcaaatgtggacaaaaagaaaaactaattgcacactccaactgtaaattgcgagacaaatcttttgagcctaattacgtcatgattagccataagtgctacgataacccacatgtgctaatgatggattaattaggctcaaaagatttgtctcgcaatttacaggcggaatctgtaatttgttttgttattagtctacgtttaatacttcaaatgtgtgtctgtatacgtcaaaaaaaaaactggcgatgaactaaacacggccttagaagattgagcttaaagaggtcatagctctttgttcacataagccaatctagtgattgcgttccttgtttagtttcatcaagtgttctacatgtatttttgagggaaaaaagatctctgaggttgtgcttgtgttgcagctcgcttctctccagatgacaagtactcacgccagagatacctgttgaagaagagattcgggttgctgccaacccaaaagccagcaccaaagtactgaaggagaaacctcggaccaccatgttccatggatccctcgaagcgaatcagtcttgcctacctcgctatttacctgtatcactcaaatgatctgatgtatcgcgatgctatctacgaatcgtacttcctctcgaccatattagtatgatcatgaaagtcattcaggtgtcttcgcatgttctgaactgttggcatgattataatctaaaaagtatgaatctagactgttactagtatattgtcacctttgtgctattaggaaatcatatggtggttagctgataaagcaaggaagcaataactgccattttattcaactgagcaataactgaacactcgtgagttgctactttgctttcatgtatagtactggtcataattttaaatgatggctatatgtcggataaggcattctgatagctcgcatggcttacgcggccattgtgtccaacggctaatcagtgatgccggtggtggcggcgtcgctcttggcttcggtaatgattgtagcagatgctatcgccggtgagggatcgagctggcggagcaatggactgttgataccagagctggagcacacggtgacggactgtcgtgccagcacaaatccgcataaccacagaacgtttcactgacactgaggaactctccctgctgatggacctttcctttctcatccatgatccatcaactatcccattttatgaaatgacctcgtctgattccttttcaatgagcatttattcattaccgtgcttgaacccacattactttgcaattcatggaactggaactgagatttcgcaaattgcattcatggatgtgcgaatggaactgaagtttgcattcatcatgaaaattatgatgatgatcagtctgcttcctagatcagaaactgtggtattatctgtgtgtgtgcagacaatttagaagagaagaccgcagagatacaatagatgaacatgacaaagtacagctacaaaatatatagtcgacatttgtcacgaatatacatggattagcagtaaagtttttgataggggcaaaatcaatattgaagatgaaagtggggggaaaaacgaaattgtccttagaaagggacaatttcctagaaatattggcactactcagaacagtacggtaggtcaggtcgctagtgtccttgttttcaatggtgctcgcaaacttctgtgatagaacacaaagttcaaacatgtacaacctccaaaatcgacttctgtggtagaacacgatgttcaaacatggacagcctccaacatcgagaaaatggaagtaaaaacgtgtctaagaaggagcactgagtaaagtcctataagattctgaaacaagatggttacgatctagactggcctatgcatcactaactagcataattacatctcaccttcaaagatgattttctccaaaacgtccatagtaacagtgatggatatgccacaagttccttgggggacaaaaaggatgtattgtgtgtgagcgagtggatgtattgcctagttaaaagcagaagaaatgtattgcctacatctaatgagttgcaaagtgagcagtaatcatctgcactctattttacatataggaaaacctttcaaactactctggagaagaaaccatctctacctccctggaggatggatcatcatcttcatcttctgagatatcatctccagtgctggttatatctgtatagtttgcctgtctaacaaattgccctcgcaccctcggccttgtttcagcaagtttcttcctattcacgtacctcaccttcttgtcaaaacaacgttccttccttttcagcctgaatttggcaagtgctgcagctctccgttcagaccgactacatgtttcctcgggcattggtgtgcttgatgcctgtggccacatattttgtgttggcagttgatttgattgaatgctcataccagcaggattatactgaaatggtggcatcatagatacaccatgacattggggataaacattatactgagggagcaacgtttgtggtgtatgcacttgagcgttgtttatgttcccttggaaattttgcaccggaggatgtgtcataccgtggtccatcatccctgggtaataaaagggaaaatgatatacaggaggagttcctgaagcatcattttggccttcattgcttcgctccagatgcaagttagaggaagaaaagcataccacagggtattgcactggcatctcaaaggcttctttatcccgaatatttacatcagtgccagtgtcacttctgtcagttgtactagagaaattacccctgtgatccgaagagtctaaccgatttccacctttttgtagttcgctgtcaaatgagctggtagttggggtgcttgacttaacataagctagaaaagcagaagactcagcaaccctcaagttagtctttattggacgtgaaaacattactccgggagatgctggcataaaagcaaaggcataaaccttagaaactattcttcaattgggggatctgctaaatcagctaaaggaaatggtttaaggctcaagatacttacaagcttggtcgccgccttcagtagagactagtaaaccctctggtgtgcctttttgtttaggctcagcatcagaaggattagactgcaaacatatcaagaaatgcaagggcatttaacaagtagactgatgcaaaaaattcagcatcttatcatcatcaattgaacatatgaggcaaaaaggcatgctctagcatctaaacagaacacaaaggtagaaagatactaaatagagaagtagtatgttggacagcaaaatataaaaggataactagtacttgattggttacctcatattcatgttgattcgaggtgcttgtttcttgattaatgttttcttttggcttatcatctgtgtcatccgagagaagagtggtgctgttggtattggcgtcactaggttccgataacgccaactcgaaattgtcattgaagaagtttttctccgacaaaccaagctgccaacaccaacattcaacttaagatcaactcatacacgctacagcaacgccacagccatctcagcttagagcatgcttttcaacacagaatttgaagatgaatcaacatagtcccctttaccatccgccttcgccgccacacatgggtccagaggttcagcagctcgttcatgcgcagtggcttgaccaggtactcggctgccccgagacgcaagcacttgacaacaacagagacctcgtctctgttggacatcactgcataattcgcatcaaagatgaggatggtcactacaacaaccctacgagcatgggcatcagaggaataggaggacagcttacttatgatggggatgtggcgcaattccttgttcctggcgatgtatttgagcatcttgaagcacttggagacgggcagatcgacctcggccaagatgatgtcgatctcccccgcctcgcagttgagtacgttgatcacctgcctcggagacttggcgcaagtcactgaaacaaaaacaaagacgtatcattccatgcgagaaggtgtgatagaactgctaattcatctactaaagcaatcttaatccttaattataagagcaaaccaaatactaagcagacaaagctgaactgaccttggtatgagcagttgcagaggaggcggagcacctcccgtgagctacttgggtcgctgtcgcagagcagaatcctcaccttgctccggtccacgaactgctgccctccccctaccgccgccccgccgccaacgcgatccccctcgccggcgcccaccataccccgacccgcacggattccccccctagccacttgtcaccagctgccgacgcgtccgaatcagcacgaacagcacagcagccagcagcagctgccggcgcctagactagacgacgcaggaggacgaagcggttgttggatctgcgggcggcgcctcctcctccatatcccgtgccgtcgccagtagtatcgcccccagaggctaagcagtgtgctaccgccgccacccgccgccgacgccggcggcgtcctcctccgccgcgcgttgcggtccggcccgcaccattatccgcgcctaatctattcaggaggcggcggcggtggtggtggcggcgttggtgtccgctctactggcacaggatattttcctccccctaccttttgctttcctctctcggtggggcacgcggctcggctcggctcggctcggcgagagatgaaagaaagaagaaaaggcctcgtcacgccgcgccggggcggtgtaaaaataaacgaaacggctcgtcgcgagcggtttgtgtcgcgtactcgcgtcgcgcggtgcgggtgtgcgtgtgcgtgtgccggtgtcaatggattcgtcacgggacgggacgggacgagccgcgagccgcggccccgtgggtgggagggccaggttggatggaggggaagagccgggcgtggttaagccagatgggcccggcctggcggcgtgtgatttcggtgagaaaatatctacgcctacctggcacggaaatatcttaatcgcggatgcgattaggggcggcgggcgtggtggggccgtggccgtgcgatacgggagccgccacgcgcgcgagctgggggccagcgaacgaacgccagggagacgcgctactgtagtagtactgtggaaacgacgacgcgagaggcggagggaggtggtgccgtggtggtgccgtgggagtgggagcgccacgcccacgtacgtgcggcggcgtccacggtggccgcgtccccgccctccgttgcggatcacgacgaaagccgcgccagcccaccgcggacgtgccaaggcggagaaaaatccagagggaaacgcggctctcacgttttcacgtagtacagaccttgatgggcagcatggcgatacggtggtggctgggctgatgagtaaaagattttgagctaccggacgagacgagtggccggtagagagcagcagctggatggggggtgttttttttttccccgtgttggcaacttgggatgcccattgccactacgccgatccggagagcgactggtcgtggacttgtggtggcggctcgtggcgccggcctagcgctttttctgtagctttgcttttcttgtttgccactggcgatgtacgtggtggcctccgggctccggcagcaaatcagcgatgctgcaaaatgggtttagcgttaacagcgctgtcgtttgtttactgatctgttaccagcgctgtaattcagtaattcagcagaatggtaaacacaaccaagatttttgattgcagctctgaactatggccaggcaaaacaatcattttgacgaagggtgtttcctccagttcactggctgtatttcttccaccgagaggagtggatggttggtatcagtgacgacacaacaacatctcgatctcaaaaatctggaggcaggctggcagccagtagcaggagcttggagtgccgatgtcatcagtctcattcacaggacgcactaatcatatttattgctaccaatgaaatcatacaaaatgagttattagctagagtagtgctgcatacaggcttgaaagtcacccaaagctactactatcagcaataagttgttctgacagtggaagtccccatatatattcgcctttattctatgacattgacacaccacaaacacgttttggcaaaggtatttatctacagggaaggagtggcgattgctcctgcctccgtcagcagagggaccaagttccctcctttgtgcatcgccatggtatctgtttgaaagacatcaatgaagatcgacgttaaaatagtgtagaaaaactctggcctaagtgacccttgttctagcgattttcttgttcagaaaaaagttaaacagcgataaaaatgcatgaaaatgttgttggtccgatgacattagtatcacaagttcacgacaaattaagaacaaggaactcaccgtcacagccaccaatatgtttccctttaatgaagacacaaggaacagttctctgtccagtccaatcggcaagagctgactgcagctcagacccatcaccttcgtattatgaggatgaattagttcaatgataaattacaatgtatgaactaaagaatagccaggacattctaaaattgactcatgtaataatatatgatcttttttctacactgttttaacgtcgatctagtcctccctactgagtgttgatgtatcagagctataagtgggtccctgtagtttcttctctgttcggttgtttagttctcttttatgcactatttgtcagaattttgcaaatgcatttctctttttttttcttctctttaaataaccggccggtttctttcaaaagagtgaagtttacagccattttcagcatttcaatttgattaaactcattattgcaaccagttttgctctaaactcaactacaataaatccaatgatatctaaaatagatgcagcacggcggagtaatatgttgtatatagattggagagcaaagaagacgaaatttagcatatgttagtatgtacaataaaaataaccagaagaaagaaaataacagaaaaaaaaataatccactcactttccacatccaattcaacagccttgtaacttgctgccagctctgccagcaatcgcttcactcgggcgcagaaagggcaataagtcttgctatggccagtccaggaagaggaatgacacgaagaaagatcaaaattggagtttaggacagcataggtcacaattttgcagaagtagggagataatcatgttaaactctgttttatatgattgcttgattggttttaatttgcatgatgtaatatggttgtatacagacaaaaggtaacaattatttctcatttctttcagaagctacttaaaagttgagcgcatatcaaatcaactcgttccacattatacctgtgcattccttacaaacaaaatatttcgattccatcatcagcagacaacgacgtgatacattggtaacattgctacaccaactaattggtatgcattggctggtaacttgcatgaatatggtcactatttagctccagaaagttcagcaaaataaatttatagcaaaaggaacatctttggtattgacctttttcatgtgctatcagcttagtgattatcacgaaatttaagcacaaattcagcagaggtttatcatccttgctgctacatcatacacgcgagtgaataaaaaaaggaaaaggtgtgagagagacctgaagacgacgacgggggaggaggcgacgatctccttggccttgtcgagcgccatgaccggcttgctgggctcctctagctgctcggagtcggaggggcgcgaggaagacgaagacgactgtgccatccccatgatgcccgacctccgttttatggccgggcagaaggaggctgggtgatttatttacttatttttatctgcgtttccgcggcagagtcgaacgcaagcacgtcaagctagccacgatttcgaacgcaagggggatcttttatggccagtaccgtgtttgcctatttgggttctttcaaaaaagaccaactttgaattggatatttggaagaatcgttgctttgttgaaggggcttgccttgaggaatggcaggcgccagcactgacgcagctacgaaaccaggatgccaaaactggtttttagtcgttcaaatgtgaggcgaaatatacggcgaaaggcgatactagtattttagtttttcgattatacggcgaagaaaggtgagtactacgtagtacttcttccatcccataataaaagagattttaagtttttatttgtattgtttaaccactcgtcttattcaaaaaaatttaaaattattatttattttttttgacttactttattatccaaagtacttcaagcataattttttatttttatatttacaaaaaaatttttgaataaaacgagtggtcaaatagtacaaacaaaaacttaaaatcctttatattaggacggagggagtagtagtttattagctgttcaaacttcaaacaaacggcaaaacagatagtcgccgtgcctggtttttcttttctttaggcacagcatttgactttacagagaaccggcgagatcagatgagcgaacgtgcctacggagtacctattaggcccatattcagaggcgaggggccgcgacgaatgagatgagcgaacgtgtctacctgttaggcccatatacagaggcgaggggtcgcgacgaatgagatgagcaaacatgtctacctgttaggcccatatagaggccgaggcccggtaaagagagccaggcatgaggcccacagcggcccagacaattttagtacttttcctaccgactgacgaatcccttcttccaaaagcttaaacctcgtgcttttcagaggttagatggaatgtaggattgagcccaaccaggtgagtctcttcgtcttctcagtgccaaatatagcctatatgaacgtctcctcaatgccaaatatagcccacatgaacacatttgcccatctccacacacatcacacatttattcagcccatcaatctatataaaaatagtatgctacctaaattatctccaaattctagatagggctgttaaaaaaaatttctccaaaaaagctaattgttatttatttcttctatttcttcttaagattgtcttctatttctctatttcttcttgagattgtacctcctgtcatgttaatcaatttgttaatcccgcagcatcgcggggcattctctagtagaattaatgatttacatttttttttttgaaaaacgagaagattttttcggaggccatctccaattctccattccaggaacgtgcagtttccgcggttcattcgttaagatcaatattttctgtacgcatgtttttgttccaagacaattttagaagaatacttcaaatagtagtactaaaaaagcgagtgtagatgtagttcctcgacgtccaatcgcatcaacaaattccgcgccggatagcgagaggaacacattgcttttgcttcacatctcaccattgcccacgaaccaaaaattcatccgaaggcacgattagatctgagagaagccgagacacaaactggcaaaaatcgacgacgcaaaagtaaatcgaaccgaagctaaaaatcctattggttgatcatgagcgacaactcagtcccttagatgttctttgaccatgcgatcatctccgcaggagtcattacaggtctgtaggactcatcaccgttgctagcgaccaacagatcgaatcaaattgtaacgaagatctacataaagaacaacaacaaaaaattgattttatggcgactattgtttcgaggggtgttcggatgtatgtaacagccgccgagtgccctgcggcgagacgcatccgagggcacgattggaaggcgagctcaggatacaacagggcgattttgcttcaagggaacgagtcgattgggaaccgattagagactaatcctcccaatgaccagatgacgaagcacgaacacaatcaccagattcaccacaaatccaaaaacaaacgaatcgaacacagacgagacgagcaaaaacgaaaagagaaacgaaggatcgaacactgaaggcttctgcggcggcgatggtatccttcggtggaggggggtggacgcattttataggctcgggcgttgtcagatgctcgcggagcaaaccctaatgggccggagagagtagtggacctgggagtgagttcatgggctggaaattcgatgttaatagcctgtgttggataattttgtagttgtgtctaactatatttcgcctacgatttgcaagaaaaatgcacaatgaacgaacaaacatgtgcttgcaaaattttggcaaccttacaaataggtgccaaagttttggagctagcatgattttgggcaagtttgccagacatacctatgactttctatggtagtctgtataaatgcctgcagttgatcaaacttcacacaaccaagagtgaacatgtttggtagtctgtgccttgaggaaagaaattcagttccagtttaactggacagcacaagataatcaactttgttttcagtggtttgcgagtggataggtcgtgcgtgatcaggatcaaatgatcaaatctcacttttatatcacagcaaatttgcaaccagtggcatcacctcatgcatatgcctccagacatggacgtttattagagccagagaaacagctaacatgtaacagacaattcagataatatatgctgcctatcaagttctcttacaaaaaagatgtagctaaataatagtcaacatgcagcagacgatgaagctacatgcactaagatcagttcttgttttcaccataagaaaagcataactgcaaagatgctctgcgttcttgcaaaacacaaacaatgcctagagcatccataagatcacttcttgttttcactagtctctgctgaagtggaggatgccgatgacgctgtgatgtccctggcacattgtgacacgtacggcttcaactgcagtcatttatacaggaaatttattactatacacacaaccataattgaaaagggaaaaaaaacaggaacaagatgattccttggtcactcataccacataaagaagaattccatgttataccattcatgatcaatttatctgtcttgcctgagttaaacgtttcaacagtaatggattatggagcattcaactcattgcccaaggaatgaagtcatcatcttttcagataaaatttggacatggcaagttatttccatcatatttcttaagaaggacctcaaacagaactgagagctttgattatgttatattagctattttctgtttgttaggtgccattaagttacttttaaaagtttgcccagcaagttcagactggaattaaccagagaagcagtggacactaaaccgtggcagtatgctaattaccttgaaatcagtcaagtcagggaccacaaatcttggcaacttctcatccaccataacatatccacctgcagaattaatcaatatttcgaaaattagactaagcaagtaggttgctttactcatgaaagaaaagggatggacatagataacgacaatcagttgaatgatcatataatagttagtacaaatgtcatttgaatcaagtatcaagtaaatcaggaatacaatggagaagtatccgtcccttgcacaaaacaatcaaactaatcaatgataactaaaatttaaacatgtccgtgctccaaacaagaattgcatagaaaggtcaaggctaagttatagctaagagcaaatatccactgatggataagtctttgcgttatcctgtaatttgttacccataatcatctagcactggtaaaactgtacttgcatacagatatgtttgggcttctttgttgaatactgcctacatattttcaaggtgaactgaataccaccagactctgctcttcaatattttatgtttgggcctctttgttgaatactgcctacatattttcaaggtgaactgaataccaccagactctgctcttcaatatttttctttctggcagactaacaaacaggctgttcggatctctttgctgcggttgtgtgggctgcggctgcaagccaatgcaatagtgctttgcaccttgccatggctgcagcgtagccacagtacagctgcagccatgatagcaccaagatttactatgttctgtaggatgattatataccatacaaattaaaataccattatgtaactatgatagatagagcatttttcaatgtgtccatgagaaatttctgcttggctgaaccaccagttgaaatggacctgttgaattgaaatgttatttgctactcactagatctttaatgccttattaaactttggttactcacaccttttattgaagcgatatttgacattattgaaagcacctcccaaattacagtaagcagacaattacttgcacggttgactcagataaatcctggaacaaaacgattcacataaagaacatcccttcctaggttcttccagatttccggttgggcaaatagtgtggtgactagcaactgtcaccatttcattctccatcaacgttcggtttaattaaactatccggttcgaaatcacaaaatttctcagctaagcaaaacctggtcgcaatcttatatgcgattatacacaaagagagcatgcttgagcaatacagacgactagaatcagatcacagagcgtcccgcaaggcattacctttgcgggtgtggaacccggtgggcttgcagttcttccccttgtagtaatcccgaggcgccctcttggaggagaggatgccgagcgaggacagccgcttacgccgcatcgaccttccgagcgagctcagtatcagtcccagcggcatatcctcctcctcctttctgatgattcctgcacacccacagaagggaaaatcagcacgatgaggtggagatagcgcctcgccggcgtacagggcaacgcgaggggcacacccgagcagcgaggggtggaccggatgcggagacgagggaggtccggtggtttgcttgagaagggaggagcggaggaggaatacggcggcggcggcggcggtgggggggcgtttcgcgtatgcgtacgagggggagaaggctcgtagcggtggacggccaggatgagtacatcggagaatggacggtcgatataactttgatgatcaaggacaattaaacgtctgaacttcatagaattttcgtgtggacaaaaaaaaaaggatctgtccataatgaccactgcttaacagaaattttgtaggatttttgtacgaatgaatcgttaatattcgaggttcacaggcactatggtattgatgtgaggcttagattaagtgtagccgtagtaacatttataagtaaaaaaagaagttctcattctgttgtacgtatagtatttcttaataagccaaaacaatttattaataaataataattaatttataggtaaggtttttatatatatgtttgtgacttaaaaaccaatactgaaaaataaactacgttgaaaatatcttacaatcaacttcaaaatcaagtttgacaaaaataaatttcagcttttgctttggtttgttagggtaaccaatgggactcatagtgtttttttcctttttgaagtttgtagcttctcccgaaaagactacgcgtcaggctcgggagccctttgtctctccccaccccatctattaagggcattcacagtgcactgaggtggcattctgccccaaccatccacgtcagatattccttcccatatatgtgcgtggcgttcccaaccgaagtccgcggagccaaactaagttacccgttcttcgtcataacttgcagcgagggtggagcggcgcgttgggagaggccgtagccccatgcgatgcccccacatcccgtgcgaagtggcgacggtcgccggcgaggccgccgccccgaccagctgcgtcatcccctaagcggtgcagcttgctagatccggcgaacccgaggctggatctggtgagctcgacggggtggcggtggcggctaagcgaggagaaggaagatggcggcggcgacagccaagcgaggagaagaaagatggtggtggcagcggcctagggaggaaagggatatggtggtggcggcggcaacttaacctcgctgttgtcgccattccgcgccaccaaggaccacagcagcggcagctcgacggagagggccacaccgccagatccactccaccaagctcccgccgtgcccccgtcagcgccgtctcccgctcgcgcccgccgatgggaggagagacgtagccctgccgtccacctatttgatggtattttggctattatatgtgtacacaagacttactcatgatggacaaagcaaacaagcagtttgtaagttggctagcttatcatttctacgcaatgctcggccatgtatatacacgcaaatacatgcatgcacaggcagctgggaatatatatacttggattagtatatgtgcatgtataattaaccaataactagccgtgtgaagattggctggtgaggcaatcacgtgcatgcatgcatgtactacagtagacggtcgtatgtgtgtgcatgcctgggtgattaagcaacctatgcatatccgagtgattaatcataggctcggcccatggccgaagacggtagctgcctacgcgccaagatttcagaagttaatatgcggaagagataaaaccagatgaattaagagataaccaacaaaccaattgattttatctctataacaaacttgatctagttagttacttcgcgcgagcgctggcgaggcgcttatcaccggactgtggcccagcagcagagaaacaaagcgaattacaaattagatatttgacgccaggagaagctaagagataaaatcaaagaaggatatgaacaaataacaaactgatcgatcaagccttatctgcaacgaacttgacgcggaggaaacggcgcgcggacgcggcgagcaccgacctcagacccctatataaggcgtcgacccctcggtagccaggggcattcacgaactcatccacacattcattcaccaacgcatctagcatccacaagccacccatcatcaacgcatctacccatccagcatcaacacatccatccatcaactctcatcggcgatccatccatcgacgacacgcaccggcggcggcgagcgacttcggccggagtcccggcgtccggcaggagagggcgcgcgcggtgatccgatcattagcaagcgcaggagaggagcttgatggctagtccaggtaaaagctagcaagattgtttcgttttctttcatctacagcacgcacacatccatgcatagggatccatctacacgtatcgtcgtcgccggggaagtcgcggtggccgattcatctacgcgtcacagaagcctcatcgatgccggtgtctgttcaagccgacgcagtgctacttgtccctggactcgacgctgctaattcaagccgctggtgatgcatctacccgaagctgcgacctcgccgagataccagacatccttgatttgcaagcttcaccgcactggagcgggctaaccatggaggaggtcgtcgggaagccgccctgccggagcgcgccgaggatcggcggagctgccgccgactgccaagacttctatcagttctcatgccggaggtcaagcatcatgcatggcgtcgaaaccagcggatgacgatggaggcaagtatggctgcagtacagaggaaggacgacgggaggacggcgagccagtgctgttggatggcaacaagctagctaatgcatgttgattaagttaattattgtggcaacgtggccaaccaatcggaggacgacatgtcatcgctgctacagtgccatgcacaaaccaatgcgtgggctgaagaagtcctgttggtttttcttatttgtcccaaatgagatgccgagctttgattaaatccggccaccgtctacatcaaccatcttcaataattcctccctgattcttctctaatctaatctcgacgcaactgctgtgacgtcaagtcgttcaagctacgcaactccatgcatgtcttcaccaacaatctacatcgacacgttgttcaagaccgacaaggctagacgacggagggtgggcgaccaacactggcgcacggaccgacgaggccatggatcgctgccggcgctcacacacacacacacacatctacatcatcatcacaaccatgcatggagaatgcgaagtgaagacgacgagacgaccacaagcagcttaatcggaggttctcttgcaggcctagacctgcggaggtaattaactgggagcttctcgaggccccaggaaccaggagaccacatcgcacaagtcagatctgtccaatgacagattatggagcgcgcatacatatatattacattgggaatttgtatttatgatcttttaagattaataaagagcatgtttcctatgttttgtttacattgtgtattcaggtacactggcacgcccacacatatatgtatctctaaacaaacgagatctcagatgttattttccaccctaaacaccaccgtagctccgcttggatccgagtccatcgccgggaacgctccgtgccgacgcctcatttcctacgcgatagaaaaggcgatgtgatgaaaagcagagtgaaaagtaaagggggatagagagagaaatagagagagtggggggacccaccatgagtgacctccactgtagagcatgtagctaataccgttcctggccttggtggcaagcgaggttcggcgaaaatgtgtggcacactgttactgccctaaatgcagtagactagtactactactcgatacaaaaagtatgcatctttcctgtctacgtgtctatctctttgtttctcttatgaataaatggtctactccatgcatgcaagaaggaggacatgcaacataaataaattttaaattgatttttctactaaactatttattatatatactatctaattactcctacattgttatactccttacaagtaaattttcaaaacaaaatctcaaatgattatttttatcaaatatatgattatattcctaattgaaacatttttataccatacaagaaaaatagttgtaactactaacatcgtaagatactgagtgaaacacaccaagaacaccacgtgcaacatttacacattaactagtggaacattagaacatatttattgaaacatcctaataatacatcgtgcaacgaattaaaaaatacatactgaaaaaaaagttgaatgtgcaacatagtcaaatacaaattgaaacatttgtttctcacgcatgaaacatctatttttaatggtgtgaaacatgtatattgtttttatcggaatgcaaccatacgaaatattgttatcaaaatttaattgcaacgaataaatggtgcaattaaatcgtagatttgataaatatattagtaaaaaatattgttttacaacttaatagatactactagtcgattttgtgcattcatgtgtagagggtgtatatagagagaggggcacatggggagagagggagggacgcacggtgagagtgagaggctaagagcgcagtccttgcatgcaatggcgttgcgtccgatacttccatgcgtgtgtcgggcacccgatgctaagcattgttcaacttcccaattatatattctatattcgagtgtaacatttgccatttgatctatatctaacaggattactataacccaatgcaacattaaggcaaaagctttgtcttgttgagaacacatacaactctgacgttgtggcaggttcctgagcaaggttacaacaacatggacctagcctatagctaaggcttggggcgacctgtggtgctctaacagtaagataacctatatacgatgaaaatttgttgtggcccatgggcttttgacaccagccccaggccatgacctagggtgttaggggcctgggtccgcctctagtggcagttttgcttcgttccaaatgttttcttcatttgaagctgtatgaatgtgttgttcacttgttcagcttccctcatgtaagtatgcaactgcacattctttgagagaattcagaatagtgtatcatggaacaaacaattgtattccaaacatttctcaacacttaaagatccgagtaaaaagtttggagtaggttgcccctaacatcataagccctttttgggctgaatattgatgcattaggacactttttctagacatacgttgcaaatttgtactctggtagcactatgatactacatccgtttctttaatatatgacactattagttttttatcaaatattgtaccatttgtcttattcaattttttcacacaaatatatatatatatatatatatatatatatatatatatatatatatatatatatatatatatatatatatatatatatatataaataaatcatgcttaaagaacatttaaagataaatcaagtcataataaaataaataataattactatattttttaataagacgaatgatcaaatgtattttaaaaagtcaacgatgatatatattaaaaaaacgaaggagtactatctctagcagtatacagtaagtactttggcagtttcagcttgcaagaatgactaggacgtatgatggatcaaggtaccacctgcagtgcttcggtattcagagacagcgattttcaatacatatatgcttagatgtttgtagattaattacatgtgttctattattattttcatcagaaaaacaacacatatttgtgaccgagctattgataaacagaatggcacgtattcttactttgcaatacccacccacacaatcctgcctcttcattgcaaatcgaacaacaagaaagatggcagcgttgatatgtgaaagatggcagcgttgatatgtcgaacaagatcaatcaaggatgctatctttcctggacacttaaaagctcccaagaaaagtactgagtaaagcatctgtctccagcattacaagcacttcttttggctgtatgttcatgtccaaggaagcttttctggacatctgccggaaatctgtgctctagtactagcctgcagtatgcgggaagcactttggcagcatcagcttgcaagaataaccaagatgcaattacagtgcttcagtctcagtacatgcttagacgttcgtagattcaagtattcaacacatacatgctcttcccattctttctatcagaagcaaaaaaatttatgactgaagctacagagccttaagtacttccaacaccgacctcacataatcctgtctcttcgtgcaaataactttatgcatttttttttcgaacgaaaggaaataacttgatgtaaaagaagatataacaataatgctatctttcaaggtaaatatgagcatctcggataaaatattcccaagcaacacacaagcaaacatttgactccacaaaacaagattacaccgagacaacttcttatctgcttccacaagatacaattgcaatgacctttgtaagggggaacaatagaaagttgaaacaactggaataaggttacaagggaatgaaactaaatttgataaactgaggagtaagatccagtcggagctcactattgccgatttatgacttgccggtttgttcatacctccctaagccacccagagattctggaatccagggaattatgccatgaaaggcatggacaaactgaagagttcttgagaaggaggaggagaaggaacagcacagccattcttctccatcctcatactgcttatgctgctcccgatctcaagaaccatgaagatgctcctgccatgcacccaccatgatctgtggaggcagagaattcaagagtcttcatgagaaaaaaaaaagacaggccaagaagccatgaggtgtctttccgtacctgattgaagttgcaaatgctcagctgttgatgaggcaaaagctaggggactagtgagagagccaagaacttgcacggtggcattttaaagaggctagtgtggtgcgctttatgggaaagaatgacaatgaaaggtagaaaacaaagtttactgtgttcagtacgtttattttactgaacatgcctcaaacatcaatctactaaacttaaatctgttgacaattctactacacttcatctgttgacgattcttcgttcctatcctacttctggggctcccaaacaaacttactaaatgtaggtataattgtagagctgtcactcctacctatttaagtgggacattcgaacaccttctgtcctccaattagagtaccaaaggcatcgatgttagtaaaagtttagacaacctctatacctcaattgatctgtcaatttttaccattttggtagcagctgctgaccaacagtcatgcttgccggcaaaagttcagaagcaaacattcatgtaggcatgtagctaaccaattacttagaagttaagcatctcacgactaacctgggacaataaacccaaccagatgtttaccaacaaacagagtctaatcagctttcactgagcaaccaaatccacagatccgcgataaaaagagaagagggcatcctttatataaagctaaagaagcaatcttccttttcgagatgcgcatttttcataatatatggagtttggagcaatgcagcctgcctgttcagccactaactcatgctgacaaagttttgcagcacttcatctgactcatgacgatgtaattctatgagggcaacaaggttgtaaattgacttagtaatccagatttggtacaaacaaactaagcttaagggcaggggaatatactatctatgcagcatgcgttactgctcccaccacaaaagagaggaaatcagcaccaccaattgtgggcaccaggtccagcactccagctacattagagctgtgtttagttcacgtcaaaattgaaagtttgtttgaaattggaatgatgtgacggaaaagttgaaagtttgtgtataggaaagttttgatgtaatagaaaagttgaaagtttgaagaaaaactttgaaactaatcacggcctagaccctcccaaacaatctcccttttcctctctttttttgtacaggtgggtgagcaagaggggaagtgaaaattcctcttgcgagtgcacccaatcattgccatcatgcacactaccctcactccctgatgagaagcactaacgtcttacagggtcctttcgaccttacgcgtcatccatgagaccatgaccaacagagaaagcatcaatatgtgcacgcatcactagtctttggactgatagtctccacctctagctgtgtgtccgtgtgtactgaatgattttttgtttgtacaaaccaaaacatgttgctatgaaaaaaattaaatcctgtccagccttgacctatggatgaactataaccttcagaaacgatggcctgaaaaggaggtaaagtagtactaaaacatcatgcttctaaagaataagtgcaaagttcatggcaaaggattctaggggtgtgtttgaggagaaggggattgagtagattgggaagatacgcaaaacgaggtgagctattagctcatgattaattgagtatcaactattttaaatttcaaaaatggattaatatgattttttaaagcaactttcctatataaattttttacaaaaaacacaccgtttagtagtttgagaaacgtgcgcgcggaaaacgaaacaaacaaactcactctcccaccctctggaacgctgcctaggtctacccatcagggagtaacaaaaagtagagatgctttactcaacaaaagaagaaacgaagaagaaaagacatatattaaattatatatttttactaagagagtccaattcattacatattctgttgtcaatcagcgctgcgaatatgtgatccatgttcagtttacccaagactcctctagggttgatatcagaaagcattgctgttataccccactactccactaaatccactcaatgaagaacaaatgtctcactctcaataatctacaaagcaattgccaacttccattcgctttcaacaatttatattgctgtcaatctgtagagtgaagactagtctaaagctaacatcactgaagggacatgattaccccacaagaaataaatgatttgttttcttcctagcatgctcagggtgagtaatgagtagtactaatagcctaaacttaaaatttatccctttttgagaggcttgatcccagcaaaaacaaatgaccaaattcaaactgcaggggacacaattcaaagagaacacaataaacccatgagctaaatatgacaaaaaaaatcaagaatgacaaaataaatggtaggatgactcttttacaggactggacaaatttatccaacatgacaaacccattgatctcctgaattaggagtattgagagattcaagaaattagtaaagttatgaacatctttttctacaccatcttctagcatatatcattttttctctaccagtatataggatagccaattctccgactcacagcaacaaccattctcatcatcgttacatgctgcggtactatcaagccacagaataatagaatatttaatccctttggttttgctttggacccaaatgatcggtgaactagtatttgtaccaaaaaatgaagtggccagtgtttcagataagtggattttcctcatatactaattttgactgtgaattggtgcttcatataatactttgaattacgtattgcaaattatacaagttcctctagaacagatattaaaaaaaaaatcagggatgagaacaattgaatgctgaaaagtacctatgatcaagtaggcaactggaaacaaaacctcgaagtcaccacattagcaacttttgcagtagaggagtagatacgtagctatgcaaattaactgggtactacaaatttcagacttggcattatcagaaagcccaagtagaaacaacaattcagactgcaatttgattaccacaaagtctgagtaactacctgacaaatttataagtcttcttggttgactatattccctaataagccacttattaggaaataaaaattaatttatagataaaaattttatatatttattcttagcgacttaaaaaccaatgctgaaaaagaaactaagttaagtatatcttaaatcaacttcaaaattaagtttaaaaattcaaattttggcttttgctctagcttattagcccaacagatgggcctattgtctatgcagtgaacagttccatactacggcacagtaagataaaagtttacaaaggttaccattgtgatttattaaggcttgctgccaagatattattatcaagattcctgtttataatttgcttatttgcacacgctactttatcctggcaaatccattttattctgactgtgatttagtgatgcctatattttgttggcgcctacaatacaatgtagatactactagcatatctgcttatgaactacagatctgcaaatgcaatggatctcaaataattatgcccacggttcccacattagatgcgcacgagtaattaaactctctgcaaaatggttccagaaatgccaacaggacaatgaacaaagcctagtcagtttagcttcaaattcaaacacaaccaatttgcaaggaatagttaatttcggagcaaatactatcgaacaacagaactgcgcagaacattcttcagaggtagtacatggctgatcacaaaggacaatgatgtgaccatgactactatagatacaaccgtcgttcacatcaagatcaagctgtccaagttctgcaatccagttcggtcacctgctacagtgtcgacttcaaacggccgccaaatatgcatgcgagctccattttaggtccatgagtacttgatggaaagctctcggagtcatctttccaatggatccagcttcatcgccaaattccatcccagtcgggcgaaatcacaaagagaaggtgttgcgtcacctataatgggcctatgggcttgtaacttcgtctgggaccccggcccaagtggggcccatgtggggtgcgccccaaccaggtggagcacgaccctagggtccccttaggtcgtcctcccacctccttaaatagttaggtacccctttacagtttattgggttttgatagattaaagtttagccattgctacttgcttgcagcgcgcgtgtcggctagaccgtccgtctgcttgttcttcggaaccccaacttatcattcgtatttaattcttatttgcaattcagattacttttatcttgttattgcttgtgtcggtgatatgggaccgggagtatcatgactagaggcttgaggcagacacaatcgcccacgtggcctggcaccttcggggacgtcgggcccgagggtgaggtgtccgccctcctcctgatttcccccgagggggggtcgggttgcgcttgccccggccccgagggccgaggcaccccgacccccttaaggaagtctgcgccacatatatgggataagtgagcacagcagtgctcacctaacagcatttattgcagtctggtcaagcgtgtcacgctgcatgcaacgcagtacagcacgctcttttatccggtctgtgaccagtcacagaccggtcagatcaagggttaggtggcgactggcggtctgacgcacgccttgccccatcccatcaagacgaaagcctctaggcactcgtctcaagccggagcaagcgtgttatttcttagagatggcacgttagccctggttagatttataccaggcttcatcctaaccattacaggcaaggtgttacacgaaaaagggcaaacgtgcacgttgttaaactgacgcgtggtggacaagaatgaccggtctgacactggtcgcatcagcaacgggcagccacgatctcacgttgcgcccgtctccgccgggagtggaggtaggtgtgagttgtcccatcgaagtgtcatttggacgacaaccataccaatctccgcccattaaagaaaaaaagaacagtccagtttggaaagggaagggtgcatgtggtatccccttgaagtataaaaggaggaccttgcccatagagaaggggttgattctggccagatttagagcttagagcgggggagaagtgggctcacactttgtagctcattcatacacaaatccacaaaaacacaggagtagggtattacgcttcgcagcggcccgaacctgtatacatcgccgtgtctcgtgtgtcttgccggggagtaatctttccacatacagttaaatttttgagagagagcttgagattgcaccctaagcccccggccgaaccggcaaaggggggcctgcgcggtctcccggtgaggagcctcgagctccgtcatctggcgcgccaggtagggggctcagcgtgtgttttctgagctctcatactcttccgtgtgcgccaagtttcccttgttcagcccaatggccgagcaagcaaaggcgcacgatctctctccgagtgtgagcggcgatgacggggagccaaatccgcgccgccgagctcgcactcccccacctcctccacgccaaagtcccaagcagggggaggcgctcgatagagtcgagaaatccgcagcatcaccagtcgcgggtggtgcaggagaacggcgagatggggagcgtcgcctcctcgtctacggcgacggcagcacgcctcaaggcgcgcttcaggctgttggcgcgctcttacgtcacccgcctgtcgtccctgacccggagtctccagcccagcgatggctggatgacgtggccaacttggtcatgacggcacagcagcgcctgggtgctggtggacggtccgccaccaccaagacctccggcgccgctaccaccggctccgtgtcatcaaggcggagggcgcggcgagcggcggcggctgcacgccattcggctgccactccctcgtctacaccgtcgactcgggaggatcagcatggggagccggatgcccgcctcaacaccgggcgccggcgtaatggccggcgtactccccatgcaacggagggcgcctcctcgtccagagtgtcacctcgacacggacgtgaagatcagccctccgtgcccccggccggtggtgttggctgtagagcctttgtggcgagtcttcggaatgtccgttggcccccaaggttccggcccaccatcaccgagaagtacgatgggagcgtcaaccccaccgagtttctccaggtctatacgaccgggatcgaggccgctgggggtgacgacagggtcatggcgaacttctttcccatggccctaaaaggacaggcgcggggttggctaatgaacctgccacccgcgtcggtccactcctgggaagatttgtgccaacagttcaccatgaacttccaaggcacatatccgcgcccaggcgaagaagcggacttgcatgcagtacagcgaggcgatgatgagtcgcttcgctcgtacattcagcggttttgccaagtccgcaatactataccatgcatccctgcacacgcggtgatctacgcgttcagggggggtgtgcggcacaaccgcatgctcgaaaagattgcctccaaagagccccagactaccgcagagctttttcagctcgcggaccgagtggctcgtaaagaggaagcgtggacatggaactcctccggttccggagtggcagcttcggccgcccccgaatccgccgctcagacagggcggcgggacaggaggaggaagaagaggtcggcccattccgacgacgagggtcatgtcctcgcagtcgagggcgtttcgctggccacccgaaaggggaggtctgcgagcgacagaaagaaggccggcgctccttgacctcgactacttggaagagcgaaggcggcgcgcggccctccgagccgcgcgctaccagcagagcctgcggcgctaccatcagcgccacgtccgggcccgatcactctgcgtcgacgacctcgtcctacgccgcgtccaaacgcgtgctggactgagcaaactctcaccaatgtgggagggtccgtatcgagtgatcggcgtcccccggccgggctccgttcggctggccacgggcgacggcacagagctgcctaacccgtggaacatcaaacaccttcgtcgcttctacccctagtgggggtcgggtgtcaggtttcgggctcgggccaaccccgcacccccccgggcgtgcagggttggccgggggcttatcttttttctcttccgtatttcaacaaaagcattttcgatttcctaaaggctgtgtctgtgcttttgtttcctttttgaagaatcttgacttgaaataggtcactcgtgctcaaccttgccctcgggggctcggttcggtcagctaaaatcgccaaacggggcccagaaccgagccgtgccccggggcgtggtgaactccgggggggaatcggcaaaaacccacaatcgggtcacccataaccctcggtcaccacgttcccggcctggccagtctcgacatgtggatctccccaggcactagccccgacccgagccatttgaggactaggacctgggcacgagcccttgatcaagccaagacacagaaggaccgcggcacagaccatcctcgtctcatacacacaacaaatagaattgacatagaaatttcctctttatttggttgcagattaaattagtctatacaagaagggggcccgaaggcctcggaagaagaaagaaaaagctattcaagattggcaggggcctgggggctcactccgacgcgcccgggtcaccagccttgtcgtcgttatcgtccgcaccaccgtcgccgccctcctcgtcggagtcgagggcgaacgcgagccgaggggccgtaccctcgaagctgtgaacgatgtggtcggcggcgtcccggacctgcgcgcgtgcgccgtcctcggttccgaaagggaactcttccagcgctgcccacggggagaagtcagggtccgagaggcccccaagccgaacggcggcccaaggcccccgacggccggagttggccctccgcctgcttgtccgacggtgtcaggcgcccccgaccctcaggatagcctcggggccactgcgggaaggccgcgcctgtcgccctcttaccccgaggatatcggcgcagaagccgagggcgccccgcgctgcctctcggatgaagagcgccctggagatgcggcccctagcgaagaggatcggccccgccgaaaggtgcagcggcccgtctactttgttagtgaggccctccgggacgccaaaacccgataccctcgggcccagaagatgctatacgctattctgatggctccgagaaaagcaccatcaccatatctccaggcgaagcaaatcggctcgcccagattcgtgcgctgctcaggtaatgtggcagtcttgaagagaccgcccattatggacagccaactcaccattaccaatgtgcatggattgagaccgttgggtattttgcccaactacggagaccggtcccacctgtcaccaggctttaggggtggcgtcacacctgaccgcttcccttgggaagggaaattgctctggcataacgccgggggctactgtcggtgatatgggaccgggagtatcatgactagaggcttgaggcagacacaatcgcccacgtggcctggcaccttcggggacgtcgggcccgagggtgaggtgtccgccctcctcctgatttcccccgagggggggtcgggttgcgcttgccccggccccgagggccgaggcaccccgacccccttaaggaagtctgcgccacatatatgggataagtgagcacagcagtgctcacctaacagcatttattgcagtctggtcaagcgtgtcacgctgcatgcaacgcagtacagcacgctcttttatccggtctgtgaccagtcacagaccggtcagatcaagggttaggtggcgactggcggtctgacgcacgccttgccccatcccatcaagacgaaagcctctaggcactcgtctcaagccggagcaagcgtgttatttcttagagatggcacgttagccctggttagatttataccaggcttcatcctaaccattacaggcaaggtgttacacgaaaaagggcaaacgtgcacgttgttaaactgacgcgtggtggacaagaatgaccggtctgacactggtcgcatcagcaacgggcagccacgatctcacgttgcgcccgtctccgccgggagtggaggtaggtgtgagttgtcccatcgaagtgtcatttggacgacaaccataccaatctccgcccattaaagaaaaaaagaacagtccagtttggaaagggaagggtgcatgtggtatccccttgaagtataaaaggaggaccttgcccatagagaaggggttgattctggccagatttagagcttagagcgggggagaagtgggctcacactttgtagctcattcatacacaaatccacaaaaacacaggagtagggtattacgcttcgcagcggcccgaacctgtatacatcgccgtgtctcgtgtgtcttgccggggagtaatctttccacatacagttaaatttttgagagagagcttgagattgcaccctaagcccccggccgaaccggcaaaggggggcctgcgcggtctcccggtgaggagcctcgagctccgtcagcttgtttcttcgatttgcttgcaggaataaggttgatttgcaccggcaagatcaacaacccacggagaggtgtatcgatcgctaaggcgcaacacaacgtctcgtacggttgtagtcggatcgttaacgtttctcccaaatcgtagttatcacaactcaccgaaagatcgagccaacaacagccttgagtgtcgaaaagaactcagggttcatcaagtggtatcagagctttcgttgctcggtgagtttttatcttcctataactagaaaatagccatacaaaaaaatttgtatcatttacctagccatattgtgccattgcattgttcttttcagtttttactttgttgaattttgtgttgcatcgtcacgtcgtgttgctggtcttagcgtctagttcgtttagagtttcgagttctggtcacgttttgtaccacagtcgtcgctgccaccgtgtctctgttgttgtcgggacctacgaaaacggaatcggctcgctgccacggttctatttttgtagttttcagaagtttctgtcggttagttttgagttcttgagttgcatctagagtttgccgatccttgtgtgtgtttgtttttgccgtgcatgtgcgcgtgaagaagaaggaagcagaagatgcgcatgaggaagatagaaggagaatattagactagattagattgctttcgtttctatttgggggccacgcagaaaaggaatcggtttccttcttttagatttctcaccgagtcccaccaccttccatgcggcattccccccttgagtccgactccctctcctttccttttggttcaatctacaccgtgccatcccatacaccttggtgaattttttgtttggtgtcggtttcgagatctgtttggaaaaacggaaccggcataaattcagagcattccatttttgtataattttaattttgggtttagacttttacatttgagtccctgtaaattttatatttacgtttgagtccctgtaaccttacattaaggtccttgagtcagtttttgttaaaaaaatcaagaaaaaagtgagaaaaaaaggcagaaaggtgcataaaaaaaagaaaaaaagccgcacaaaaaaaaagaaaaagaaaaggaaagaaaaaaaagaaaaagaagaaagaagaaagaaagaaaagagaaaatactgttatgagttagctgaacttcatatatcagagttgtgcatgagttgttcctagtgctattttgtggtatcgtttgtgtctaggctcgcgtctctagtacgttctagcctaggaccagcacggtacttgactttgaaccattattcaactttgcattctctcatttgagcatttgctatccctttgctacatatttaagcctacccagagctccacagatctgattgcagccgtacagcaagtgtttgccaaggcatcgatacatccaacctccattggggtgcttggttaagtcggtgtacatcaccattccgcttgctttagtaagaacttgtaagagcttggttaaaagcttgagtgtgtgtgatatttgagctgccactacctagtagttgataggagcgtgcatatttttgtgtgtttcttgtttgctactaaccatggtaggattgtgtaagggaatacgagaacatcgacttctacaccttcgacgagatatgacgacttctccatgtgatgcatatgaggtacatgactataattttgaacaagttgcatctaagttaccattctatgatgggaagtatgattctgttgcatacattgattgggagctagtagtagacaatgaatttgatatatatgatttttctgatgctcaaatgattaaggctgctagtaataagtttacctcttctgcattattttggtggacttatgttagtaataaacctgaaacttgggatggattgaaaaccatgatgagaaaacgctttgtgacatcttattacaaatgtactcttcgggagaaattagaacatctgaaacaaggtgacagaactgttagggagtacattcatgaatttaaggtttgtatcatctacagtgatcacaaagagtgcaatgaaaatacaatgcgtagatttttcaatgggcttaattctgaaattcaggttttgcttgataatgtgacatataatcatattggacacctattcatgcttgctcgtagcattgagagtcagatcatatcaaaggcgaggatgcatgaccaatgtgatttatctcctatttctgaatccccaatatacttatgtaatgatgatgtgcaaacattggaggagcaatcttttgtctcccctgttactaacgttttgcaggaagattagcacatccaagaaaaggagaatggtatacttgagaagaaagaggatgaagcacctgcgaagtctgaagaaagttcgcaaggtaaattaaatggtgctgagagaaatgaaggtgagtattctcaaggtgagctacacttgtccacttttcatgctatagtagagcaaccattagtggaatcaattgctgagttgcctttgtcacaagttgatttacttgctgttccttgtgataaagaagagttgtgcgataatgcttcacttatatccatgccacaactagtgaatggacatgctattcctgttgttaatactaactgcgctgattttaagcatgttgttcacattgctaatagagtagaggaacgttaattgacatcttctttaaatactttgggctatgttcagtttgctgattttcatgagctcgataatttgaaggagaaattatttgctaagtttgattttccatgtccaagtaacgctatttttcatctctttggtgaatataatgatagaggaatatatttggtgcatagagtttacatctgttcagatttagaacctcctgtacatgtggataaaacatgcaatctagagagaaatgttattgctaacaaaattatctcgagtttgtcttgttgtgattggaagaaacaggtagttttaaatggactacacgaagagcaccatatggaaaaaccgaggacggttttccgtgaagaaggggaggatgatgtgaccatggctactatagatacaaccgtcgttcacatcaagatcaagctgtccaagttctgcaatccagttcggccacctgctacagtgtcgacttcaaacggccgccaaatatgcatgcgagctccattttgggtccatgagtacttgatggaaagctctcggagtcatctttccaatggatccagcttcatcgccaaattccatcccagtcgggcgaaatcaaaaaagaaggtgctgcgtcacctataatgggcctatgggcttgtaacttcgtctgggaccccggcccaagtggggcccatgtggggtgcgccccaaccaggtggagcacgaccctagggtccccttaggtcgtcctcccacctccttaaatagtcaggtacccctttacagtttattgggttttgatagattaaagtttagccattgctacttgcttgcagcgcgcgtgtcggctagaccgtccgtctgcttgttcttcggaaccccaacttatcattcgtatttaactcctatttacaattcagattgcttttatcttgttcttgcttgtttcttcgatttgcttgcaggaataaggttgatttgcaccggcaagatcaacaaaccacggagaggtgtattgatcgctaaggcgcaacacaacgtctcgtacggttgtagtcgaatcgtcaacgtttctcccaaatcgtagttatcacaactcaccgaaagatcgggccaacaacagccttaagtgtcgaaaggaactcatggttcatcagacaatctgttctgtccacacaccgccgagttatgactgagcgcttgatccaaataactttttaactgccttagcaggcaatcttagcgcaaaaactgaattcaattcaagaactcgtctggaaggcgatccattacgaactctcaaaaaagaaaagcgttcatcaccaaccttgggccacggcccacggcgaccgcctgggtcatgagaaggagctcaccgccgccggggcccgggaggcgtcgcctcgccctctactgcgccgaagcggcggtgggttctgcgttttgacacgccatgaccattcccagccgtcgatcattccatgtacggtccagatcgcggggaggtggcgcgctggagaagatgtggccgattctcccgctgatacgtgggcccatagatacggtgtgaaaaaaccaaggcccagccgtttcgccttcgcctcgcttaaaccctaaaccaaaacccctctcctcctcctcccctccaccggcgcgcggccaccatgtcgatggcggtggcctccctccgcctcctcgcgcgcggcggccgccgccgcgcccgcttccccgcgccgctctccgtcccgggaggccgcgcggcgttcctctccggcgcggccgaggaggtcgcgcaggcggacgcgccgccgccgccgccgccgggacggaaggtgctggagagcttccgcgaggagttcgagatcggtgggcgcgtcatctccttcgagaccgggaagatggcccgcttcgccaacggctccgtcgtgatctccatggacgacacccatgtcctctccaccgtcgccgccgccaagtcctccgaacccgtccgggacttcctcccactgactgtacggatccccattttccaacctggttaccgtgttatggagttttagagagcgttgaatttgattgggaaactttcactagcaggttttgatttgcagtattatatagttaatttggctaatgatcgctctgtctagaatcaattttgtatcactaagagactgcggaagtcaaaatctgatgctaaatgccatttgtaatcctcgccgttggtttgaagggtgtttagtttgaggtgggatgcaaaagagaagctttggttgttcttgggcctttcttacagctgctgatacccatcgacaacttccatttatttaacttatttgaggaaatgacgaattcaatattgaaaacaaatattgacgtgctcacattttaaagacatcacttgtcttgtattttgtgcatctttttagctccattttgttctctgccctaatagatattttgtttattattcatgatgcaggttgattatcaagagaaacaatatgcccaaggtgttattccgacaacatatatgcggagggaaggtgcccctaaggaaagggagcttctatgtgggcgtataatcgatcgaccaatacgaccattgtttcctcctggattttaccatgaagtccaggtaatgaatgctactattatttggttcttaacatgtgtaaagtttttgtaaaatccttaacttatttacctagcaacatcctgcttttctagatcatggtaaatgttatatcgtcggatggaaaacaagacccagatgtgatggctgcaaatgcctcttcagctgcattaatgctatcggatataccttggaatggaccaattggagtaattcgtgtaggaagaattgatggaaattttgtgctgaacccaacggtggatgaggtatatactgatcgattagtaccacatggaattgcactgatctgtcctccataaattgttcccatggtgttgtgaaatgtactgtctgtggatgcgatgtatctcaggagtattgatattggtcattgcactggtccagttacggagatgcatacaattatttgattctctttggtctttttgtgtagcacgaccaactccatcagcatatatgattcaaatgtggtctacattgctagaattttttttcagctgtctcatgttgtatttactttactttaactgtgttttgcagttaggtttgagtgacctcaaccttgtttatgcgtgttctcgtgataaaacattaatgatagatgtgcaagctcgtgagattactgaaagggatcttcaagcaggaatgaaacttgcacacgctgaggtattattttatcttcatattcttgctctattgtaagtatatcctcatgaattgattcacattctcaggcagttaaatgcatcaacccacaacttagattagctaagagagctggcaaaaagaagaaagagtacaagatctcattgatttcagataaatcctatgagaaaattagaacattatcagaagcacccattgaagaagtcttcactgattcaacatacggcaaggtgattatatgttatctgtactcttccttaaaaaatatgtggaggggaaataaaatgctcgattgtgaccattttgtatgaattcaagccaccactatttgttttctatgccctgtcttttgtttgagaagcaaaatgtaacatgtttcaaactttactttttctttacaacatgaactcactgagtatttttctttctgcagtttgagcgaggagaagccttggaaaatattacacaatctgtgaaagcaaagcttgaagaagaatgcgatgaggacagcttgaagtttcttcacaaggcagttgatacagtgagaaaacaggtagtgcacactaattgctttggttaaagccttgcaaatggagggaaaaacctatttttggcaactgatggacatcaaatgcatgcatgtcggtcaacttattattgtacatatacagctaacatatatcctgattttgcaatgcgcgatggctgatgtcattattcgaccttttgcccttctgcatgaatgattttatcacatctagttttcctgcttgaatgattttatcacatccaatttaaatgcatcgaaacttacaagtttggaatgacctggtcatgctaacagaaatagcagagcacttttatttctttatgatttaacagaaattataaactttggcaagtctgtaacttatgtatccaacacattagtgtataacaaatctcattgtttagcactttaaacttagcatgccggttttgcattgagacaagcaaacttctagtcctgatgcatccttttgagccttcgtttgcttcatatgcctagatttacacaacctacataatttattggtgttgtagatcccagatgtactagctatccttgacaaaaatctgatattactttattcagtgttatgttcttatgtagagtcacttctgttatttcagttgacatggatttgtgcccatcttttgtgcaggttatacgcaaaagaataatcgagaaaggacttagagttgatggcaggcaacttgatgaagttaggccactctactgtgaatccagcacatatccaatattgcatggatctgccctgttttcacgtggggatacacaggttctctcgcacacactttaaattgaaggaacattgcaacatttgttttccagtaaagtgaccacccacatggactactttatttgtaggttttatgtacagttacccttggtgctcctggtgatgctcagcgattggattcaattgttggtcctccaacaaagcgtttcatgcttcactacagctttccaccattttcaataaatgaagttgcgaaacgtgggggcttgaatcgacgtgaagttggacatggtacattgtctagtttatgtttgtgtgcagattataggaactagtgagttaattaccctgaagtattagacaaacaactaaggtcatgtttggattgtggcctattggtacgatgagattagtctcacatgggtacgtgtactcagtaagagagtgtgttgaaaaatggagaaaggaccagtgaacaatagatagttgagtccttggcaatgggtacgtgtactcagtaagagagtgtgttgaaaaatggagaaatgaccagtgaacaatagatagttgagtccttggcaagtaacagacttcacagttaggtggcaaaaaccagtagttctcttaataaattagaaatttagcaaaagtgagggtcatcccccttgacctcagtgagtttgcagtggttgtaatggtgttatgttagtttaactagtaacacgcctacccattgcatgggcccatacagatgggttgcatgggcccatacgactgggagatgagctgagggtgtggatcgagcataaagcactagatccaactggttttttgttaaccaaccgcctggttttttgggagaggcagtggttatcagctggtgagttaaccaaccgcctggtttttttgggagaggcagtggttatcagctggtggggaggactggtttttttgggagaggcagtggttatctgctggtggggaggactggtttaaagcttaagcatttggtctgtattgggatactttggctgttgcaatttgctgaatgccatctagtgacaaggttttatatctagactagtcattgatagctcttcctttacatgctgcttcttatattccaatcttattttgcattgtaattttgcaaagcaaaatggttgtcagctgcacagctatttattttgtaacactttgcaggcacacttgcggagaaagcattgctcgctgtgcttcccccagaaggtgaatttccatatacagttcgggtaaattcagaagtcatggcttctgatggttcaacatcaatggcatcagtatgtggaggtacatttcatttgtctcttttattgtcctagtatacttcaaagttaaaatgaactaatataatttccattttggtgttaagaggcatcatgtggtaactagatcctgttatttccttttttattttttttaaaacgttatgtatcttttatctggtagcaattggccctaattctctcattctctcattcgcagaagcctttgtttgaaaggctatacactgcaaccatttgtaatagaatgcggatccatgtttttcatctatagaaaatccaagctagccattctccattgccttcataatatctactgtccagaagataaagttttagatcagtagtcagagactcttagcagagacctgaaaaatatttttgaatttttttaggttatgttaacttctttgtgttcctaggatctacttctgagtattgatatgaatctccttttagtgtcaaagtgcttaaatattgatttgtttcttaatatttctttttttttatcttcattcatctgaatggcaacaggaagtatggctttaatggatgctggaatacctgtaagggaacatgtggctggtgtttctgttggtcttgtcagtgaagtggaccagacaactggagatatttctagttatcgcatattaacggatattttagtaagtatagttgcataccatttctaccatcaatccttataaataactattcctttttcatccaactgtatattttggttggtgctgaactgaacatggccattgatgtttcccagggtcttgagnnnnnnnnnnnnnnnnnnnnnnnnnnnatttgaggaacaaggagaggtattactgctattcaactggatataaaacctgctggaataccgttggacataatatgtgaaagtttggaacctgcacgaaaggctcgaaatcaaatccttgaccgtatggaccaggaaataagttctgcacgtgcttttaatgatgggagctctcctcgattaggtttgttagtgcacttatagtttagttcttttaaggagttcttttttggtgcaaacattgcttgatcaacaccagaattgccctccatttgcagctacactgagcttcagcagtgattctcttaggaaactgcttttccacaggaaaaaaattgagcaagaaacaggtatcaagcccctgtgcaacttctttcaagaaataactagcatcatgtctgcacgttgcaacgaatccttaacatactatagtccaaaatatattatgcaaaaaagaaataattatactaaatccagatgttgcatgcatgatacatgatgctaatcaaacatctacatattgtcatatacttgtgcaaatatgccatttttttctgtaaacatcttacaaaaaatgcacacatgcctatatgtttgtagccacaaacgatgtagagtagcccaactccctcttctttaaaagtaaagatgcatgccatttcactagagtgatagatcaacgtagtggaaatcctggctattgtcgtaccataaagtcataaatttatgcggattggtgatgacttggtgtttcagtgtttgaaaaaagtgttttgcagagcttaacggcacctttttttttagaaaaaaaaacattgatttgatgaaagaatatcatatggatatatttaaggatcagaacttcataaagaatagcccatggacatatgtaagggtcaaaatgtcacttaatttagtatcgaatggttgcaagtttgtatctttcaaaacttcaggagtttgttttttttgcacgacaatatgaatataaaatattggtagagtttcattttgctaccaagcattcatattttatttctctattcttgacctcgcttatgtaggttctaaatttacagtctgtgtgagaatggagtttctcttgaggttaaaaatgatgtttcatcactaatttgtatttgataacctgcatatttgaatgcatgaacatacaatgcactctgttttattcacatttttctcaatcagctgagttttaactcttatcttccatattctcaaggtgcacgggtatctgttagtgatggtacagtcactattgtagcaaaaacccaaccaattatggataaggctatcgagaaggtatgtatcaacaatacaacaatatgctatttattcattgtgcttatgaaagggtctgtgatctttgcttgcactttattcatgatcttctgttctataaaatttgaaatatgagtacaacacaaagtgcctgggaggaagaaccccagaccattctaaatttctaacttttctacctcattacaggtagaatttcttgtgggtcgtgaaattgaagttggcagaacgtacaaaggtgttgtttcctcaataaaggagtacggtgcttttgtggaattcaatggtggacagcaaggtctacttcatatttctgagttgtcacatgataaggtatttttctcttaaaaactctgtaatattaatatatggaacatactgtctattatcatgtgttttatttactatgctaatcttgttcaaatttgtgccagtacatgattgcagttccaactgaacatgataccaatgttattgatgataaaagttcctatacactttttttttgtttgttaaagggttgttgggtttgaggaatcgatgttctagggtcatttgattcttagctccaaacttatcattcttgatttattgtatggtttgaagaatgagaatcatgaatgatcattatcatcatcttccccctccacattgttgtagtcatgatagaggatgtgaggaatagttccatggatgagtgttgatccatcatccaccttacagtagatgatggccaatgagattaagccataggaaacatagagcaatctcatgaagtcacccatgtgatatgagactattgttctaaccaaacacacttgagcaacaagaagaggttcaatcacgtttcacagtataagtgatccattagttcattgcattcatactggctaaaatgctgattaaccagcttttaatcagttgtatttattatatatgtatttagtgctcattttatttcccttctacctgcaggtgtctaaggtctcggatgttgtatctgttggccaagtgctctcattgacatgcattggacaggacttgaggggtaacattaaactttctcttaaagctaccctgccccatgcccatgaaaagaaggatttagcaagtaatcatactgatcctttgccaagtcaagaagttgttggctggacggctgtagagaacatgcctagcaaggatgctaatgctgaaccatccatcagcaaagacgaagacaacatgattgaggagacacctgggtgttctactcctgcagttataattcgaagtgctgctgaatgtgatgcgcaagatgttacaaatgatcctaagaagaaacgcccaaaggttgcaaagtcatctcctaagctatctaaaccagccagcgaaaggcaggaagttaagagaactagtgctaagaaaacttcaggtgcatcaacaacggccaagaaaaataagaaagaaaaagctgactcttcaaatgatgtgctggatgccattccagaacaaaataaaagtaacatcatgaactattctagtccctcaaacttcaggtctgggtctatgaagctgggtgacgtagttacagcaaaggtctaccagatacgagcctatggattagtacttgagttgagtgatggagttcgtggaatgcataaatttgcggtaatttcatacctaaactctctagtgagcaagttaatttgcttcgggatttgcaatattaatatcacattgcttgtcctttttgtccttctattatatgaaaaagaactgctatatgactatcgcatacatataacatctttgatagttaggaaagaaattatgtttccatatttgcagtattgaacatgacaatgcaatatcagatcggatggatccattgccctcaataacaaaaacttagctaaacataacaatgtagtatcattatttatgtattttaatttcattgcactgacattgaaacctttgcaggaaaatggacacaaggattttgaggtcggagaagaactacttgtgaaatgctcaagtttcaatgcaaagggaattccggtcttctcattgctagattagtagccattttgatggggctaatgtcttctctataggcctacagaaatagacgcttgtaaatgtgtagcagctaattcatcgacttgaggaacatgagaaataatactgcggctccctcgacttttgtcagagtgctaccaaaattgtgtggctgtcgttagtagttttgccctgcaactcacaaacgcccaaacattacgcatcacttggtatctgaatctcttttgcagcagttgtacacttgtatttttgccacgctgtttcttattcatcgttgaaactaaccgtaacagtagcattcatatttctctccactcgtaatcccatataattcatttcattctttaatacagttacttctaccatgagaatctctgagcagcagcttcttgggagttgggatatcttcatttcattcattgttgtgtggtgcgaagtgtgaattgtacatacagaagtacagaactggacgcaaaattgtggccttttctgccaccaggtcccacaacgacgaggcctgtggctccgaggccgcctctgataatcgccaagaaatgaaccaaaaaaacgaaccaaagatgaggtgatagactgactagcactgagcttgcccggccagcgccgaatagcgcgacgcgccgacgcccacacatgatacgttgcgacgaaggagctcctcgcgggtcgcggcgatgagcaacgccggcaggaggaggaggagcctgacctccatagctccctcccccgtttcctcctcttctttcccttccggcgcccgggaagctcaggcgccgccgtcccagcttcccagctggaagttctcccaggtgctcggcgaactgccgctcgccgccgccggcgaaggccacgacaacggcacgctccaagatgacggtacgtgtaactctcacgctatgtcgaaagccatcagggattttggcctctcgtctgagcgaggataataatccggttctttttcaggtgatacgatctcggcaatcgagttcgacggccggggcgagcacctggccgccggcgaccacgccgggcgcgtcatcctcttccgaagaaccgacgacgagagccacgtaaattacagcaatatatctcaaagctagctattccagtatggttccctgcagcacgagccgggctgttgaccagcgattcttgtgccccgcagccgccgccgccgccgtctcgcgccgacctggagcgcacggactacgccgcggcggcgccgccggcgtacgcctacatggcggagttccagagccacgagcaggaggtgagcgagtcacccatcgatcgagacggcttacgacatttgcaaatcgtagtacactcttactgatcagtaggcagtacacagttcgacgttctgcacagcttggagatcggcgagaaggtgaagaagctgagatggtgcgcgcggccgaacagctcgtcgctgtccatgctcgccaccaacgaccgcaccgtcaagctctggaaggtatatgtatcgatcgaacacggcattgagatcaccttgttgatagttcaagctcttcttttctgtaggattagtagctagaatgtaatgattttatagcttcaaggcaggtctccgaacacaggtcgaggaaagggaacggccagccgcggcggcggcggagcactccgacttcggcgtcgctgtccgagatcgcgctgctcggggagggtgattcgagcgtaagaaatgggtattattacgagtgggcgagcaagaaagctaggaactatttgtcccctgattcggctgaacattccgaaaaggtaatgttctatctgcagcattggaatcttcggttgaactcgtttgaattgtgccttttgtgtaaccatgtgtgatcaggcaagtgaggttggagaaggatataccgcgaagtgccggagagtgttcgcccgtgctcatgtgtacaacatcaactccatttcgaacaactggtaggttggttgatccagctattacagtacaagtttacaacctgtgtcatgccattctgtctcaactctgagaattaacgaggtcataatgtagatttgttctctttttcatgtgtgcagtgacggggagacgttcgtgtcggccgacgacctcaggatcaacctgtggcacctggaggtgacggaccagtgcttcaacgtcgtggacatgaagcccgcggacatggaggatctcgtaggtgatttagtttcatttgtttgctcaaaaacagtttgcatatacatagagatggattctaataatttgagtggacgtccacccgtttattgcatgtcagctagatggttacggaaaattttcaaaaaaattgacaagagagatcaatatgtaatatatcactccacaaacatgtaagttcaaattcaacttctataagttgtaacaaaaataacaaatttaattgtaaatatacatacagtaatttgagttttgtttgttatttttgttataatttgtagaagttgaattttaacttacatgtttgtgaattgatatattacatattgatctatcttgttcatattttttttaattttttttataatcatttaaataacatgcaataagtgggtggacgtccactcaagcttcccgcatataactgcataataaaagaagtcatgaatgaacggcgaaaccgaagggttgaacactaactgttgcctttttttttttcgatcagaggtgatcacttcggcagagttccacccgtcgtcgtgcagcctcctcgccttcggcagctcgaggggcttcgtccggctggtcgacctgcggcagtcggcgctgtgcgaccgcaacgtcagaatgtaagaggctggctaattaattagctgatgttgtacctttctttttttttctctgaaaaatgcaaaatggttcgttactgtttttcagattccaggatcgtgggaacagcgtgcagcctaggacgctcttcaccgagatcatctcttgcatctccgatgtgaagttcaccggagatgggaagtatctgctaactcgagactacatgaacctgaaggtattctgaattccacttgacatggcttctaaaaaggtccaagtgtacaggcagcgtgtcatatggatggttggatactgaaaccttcagtgttcctgaataacttcagttaacttcgccatttgcagctctgggacttgcgcgtggagagctcccctgttgcaacttacaaggtgcatgagttccttcgtcctaaggtacatcatttatccagcacagaagcatttcactgtcttacatcgcccggtcagctgtgtcagtcagaacacaacaacacaagaagttaagaattcttttgcagctgtcggagctgtacaacaacgactgcattttcgacaggttcagctgctgctccagcaagggcggggactacttcgccactggatcttacaggtttctactgctgcaacacatcaacctcatatctggagtataaggctatactgttagtgcccatccttatccatctcgtggttctttgtgttcagcaatacattcaaaattttctctcgtgctgctgcaaatcccaacggaactacgttggaagctagcacgaacccttacaggtacttagctttgttcttttactgtcgctttgacgctgccaaatgacttaaatttagcaaggctgatctaatacggtgaagaattcaggatacaatcattcccctctgcaaagagtcaagggttgctcagcaattttgctcgcggaatccagagaaaaggttcgaataattcatcaagttattcttttaatgtgtctttgtgcattctttcagtgacgcctctactttagaactgaagcttttagcgtgtgctctgcaaattctcttcccctgcaggtcaagatggaccaagatctgacggccgggaggacactaaatgtaacatgacatcaaaggtgacacatttagcttggcacccgatggaaaacttcatagtttgtgcagctaataacagcttgtacatgtaccacacataggcatatgcacttattttttctccattacccattttgttccgtgggagtactggatactggaggaaaatatagagggcaagatttactaaacacatcgagtgaaagcactatgcattacatatagaaaggcatttgaagcgctgaacatatttatgcgaagctgaaaccttagtcctcgggaagatttttcgctaagcatctggcatattacaatacatattcgggcatttcaaggtatgctgcacaagatcgccactgtgggtcagagaaatgagaagacactcttaacgtcaagaaaagatgcgccagtcccactgctctttgcactcgccaaaatatccttgcaataatcctgaatcgtgagaggttggactgaggctgcaacttgctttgtacattgcataggctggaaatctgcaagaggactgctgaagcagaatttgctcttctcagatgagctgtccattttacctaaaaactgaagagaattctcatctggagtcttgcttagagccttgcttttctcagacgagctgtcccttttacctacaaagtgaagtgaattctcatctggggtcttgctcttttcaaatgcttttttacccgcaagttgagtagagtttttgccttgagttctgttcaggatctcgctcttctgagatatactgtccattttgcccgtaaactgaaaggatctagtttctgcagttctggtcaggatgttgcggcacctctcatctgtattgtttggagagactctagcctcagtacgatcaaagaccataggcgtgacttcatatgcatgcagactgctctgatctagtccaaactgatcgcccgatgtcttcattttcttcagtatcaaaggttcataagaactatccatggatttcgacaacattagattggggaaatctctggatttcttgcgtatgtgatcaaaaattgtgttgttggtggcacttttgcattctgcctctactggttcagaagccaatacatctggaacatctgaacatgataacacaaattttcatgcaagagcacaaatgaaacacaatagatgtgcatagtgtcatatagaattgtgttaccttcataatcttcttcatgcagtagagtaaagcttggggcctccctgtagtcatcaaaatatcaccttagaagttagaacgctatattctatattcagatagtagagaactttcggaaaaaatggttataaataaagaaataattacaaggatgacgaatacatgttagaaatttcactaatagctgtgatctattgcaattctgtggtgacatattgcaatccttgcagaaaattaaataaaaaaaaaagtctgtgtgtagaatgatagccaccggataggtgttctattttctctgcactgattatggaatccttggcaatgtagagaaggttaagcacttacagtgaagctaagttgttgtactctcttgttcccagaatttccagatcattatcatctttgtctggagctttggccctaaaatcatcttctataacacatacctctttagaaagtgggttctgtccattatgatacttagattgatttgtccgagttgttttagagctaaccaaacagctctctgcaggcagattgtacaagggttctgcctttttaatcccaaacactttggtcacatgaaaatcttccctgctgaccacatgcttcttgtggatatcaagaccaacttgaacataaaattaaagatataaactatgtcagcataaaatcgtacacattatagatgaaaatttcattttttgatctatagttccccaatggtaatattaccatattcttcaaaaatgacgtcaaccttcagagtagccctggcatttggggggcatgggacatacagtttgacagagtatggactgcaattttcaaattagccagttaagagtatttgtgaacagctgagctacaacttagacgtccgagctgagaatgcagctaaatactccctctgtcccataatataagggattttggagggatgtgacacttcctagtactacgaatctgatgacaaatctgtttctttttctcattatttttaacggctcaatcaaagatcatttacttttaactttctatagaaggattgaagcattaactgaaataacaacagaaatattacctggaaaattcttgagtccttcacagaagaattagaaatggtgcagcaaccaccacaagaaaaacagataagcaaatatcaggagaggaaatagacagcaaaggacaggtaatatactgtaaaggatatcaactgagagaacaaaaccactgactttattttctcatgaaagaggatcgcattatcttcctctgatcccacaacctgacaaaaaatcatgtaaaaatttaggtttcaagagtgtcaattgatccaaaataaagttaaagagggtaccatatcagcgtaattttgtttactggatcctactgcctgtgataggcgagtcagtgttacaataattgttgattttccctgtctgtttccagcatcctctatgtttatatcaattttggggcctaatgatggcaaataactttttatgctatctccaaatggataatttcgtcctgttacggattctatcttcctagcatcagcagttgccaaactctcaaaagaatcaattccagcagtcttcagtgcctgggatgacagtgataacctcaagcattaattatgcagactgcagatacataaacataattacatacccaataaagataataaagttaataacctttgctgtgacaattccaattccaggcaattgcttcagcaaaaatggactactctcccaaagtttttggtgtaagcatttcgcaaggagcatagaacttatggcagacttgtaattctttttgtatataaaatattctctcatgcatttggcaaccctgcatccatttgagcatattgaattcatttcctgcatcaaatcgcaaaaattaaaatatgtcaaaagaataggtgacaaaatcaaatggtattttgaactggacaaacaaattacctggttgagagatagatcatggactagagggtccccagttaaacaatcatttgccagaataaatattttttcttctcttgtttgaatacgcttcttccttttcccatttgcaccaacaacatggaaccaaagccttccctctttgtcagcatttatctcattaaggagcttcttctcatttcgtcgtagttggatcccttgatattacagaaaaaaaatcaaatcgctaatttattatatttaattattaattagaataaactggagttacctacaagtaatctctgcagagtggcagatgatatgcaacagatcttccaaagtgcaacaggcagaagctttgacaataagcttcatagtatcaaatttcagatagaattttgtcatcagcctcccaggttctgagtagaaaatatatatctcagaagagtcatctttaatatgcaaatgaactgagtaactggaatgctgaggagacatctaagtagcaagggagttgaacagatgggcaaacagaacgagaaacactagaagaatagtaacaaaactattgaagttatgggacagaagtaggcttcaagttgaatacccagccgtcaaaggacctgccatgtttgccagcagaacttcttacaaaaacgaaccccattaaatttggagaagacggtgtacattttagtgtcagctgttaaggtcatgatcagaaaacgtacacagatatttcatgttatctacttgaactataagactgaacgatcgcaccccagatattcaagcatgtattggagctagctgaatagctgtcaatgttacagctcagatattgaagcactggtctatgttagttgttaaggttgctgaggtcggaactcggaaaacctcaacaccacaccaatcataagctcaaactccgtacttgaaacaggttgaagaaatgcatgttgtccatagtgtaatgctcattttccatccccagtcaaatctaggcctattacctaaatgtattttagatacaatgatgtggttcggaattgaatcctttggacactttgacatgcactatacaacgaatccagttcaaaggaacaactgtaatgtatttagcccaaattaatagaaagatttgctatggatcaggttggtggatactatagatggtagtgcttctattctctcctcaaaaactgaattgcacaaaagccacagatattaagcaatgctagtgggcacaccatcaaaagcctactttccacaatgtaggtaggtgtgcagatgggaaacacacaaggcgtaccacaaagtgaggacacaccgttttccaactaaagccaaactattttgcagaagcgtggaattggcaaaagactaaacttcaatttgtatagcgtaagcttgtaccaatagacctgtattaatttgtatcatcatttttttaataaaaaaaatagaaaatttacctaatggttttagaaggaaaccatcttcatctgtccaaattagaccatactcccccagctcatggatcttctcaacacatatatctgtaaattgagttcataacgatcaaaatcccatagaaccatgaattctacaaaatccaagaaagatatacctttcatttgcttttcaagaagttcacgtggaatttctttcttaattccgtaatgctgaggattctggtaattcaattcgtcaaagtcagtttatgcatttaagcgaaatggatttaaagatttaataatactaatttgcccatgccttctttatcctgatgtacaaatacgagcacttgagccactcaatagccaaagttatatcagacaccgtcagctgaacaatctctgcatttagatgctcaaccgcacatggaagtaacctggtcatagcatctatactcagcgagaagtttgaaatggtatgcagtccatgtcaaagtcaactaggtgaaattattagttttcagttgaacataaaacacttactgagactccaccatctcacatccatttagaaggttctcatatagatgcacctacaagatataacaggttagcacaaaagacctatagagccaattttgcccaataatggtatcaaaatatctcagagttaacaagagtggaaaatatagatcctttactgtctctcttcttgtcatgattataattgttccagtatcatcaaatggtggacgcccagcccttccacacatctgtagatcacccaaataaggggaggggcattgttagaagcaagaggaaaccatatagtataattttataattgaatcacaaaatgctctgaactacaatgctttaaatgcatgttagttttaattaaaaaaatatgatcttacacattacactataaataattgaactagtatgtggcatgaaatttgcacgtccaatttcaagtgttttgcagatataagatcaaatgatgtgttttcgtcaaagaaaaggatcaaacgatatgatgttgtggcaataagtatgtcagaatcaactttgctttatgataaacaattgaacttatatgcagcatgaaatttagaacatctgatatacctcttttttcataaataactattccaataataaacttttggcaataagtatgtcataaccaacttaacataacacccgcccaagcaaaaagttattgtataagtatagagtgaaaggtcatgatagattatgttctcatgcactttacagcgtatatgttggttccgataaacttaaccaagtttatagaaaaatatttaacatctacaataccaaataaatacattatcaagacataatttatggtgaatttaattcaactattttgatattatagatgtgggtgcatttttctataaatttggtctaagttagagaagtttagcttagggcaaactgaaacaccttacaatatggaacagagggagtagcattaagactacacatcaaagataacaaaatcacatatactttcatgaagcaaaactgaataatattattgcatatcaacaatgatgtatttactggtggaaatgagacatgatagtatgtatacctgaagaaccatggatctctcatattctacatacagacccttctctttgttgctgaaaaatagaatgaatatcagagaaaaatcattaagatgatagaggctaactcaatcactgaatatttaaaatgaactcacaaaaattgtgttgactttatcaccactgtgtgagcaggtaagttgatcccatgtgccaaagtattcgtcgtgcaaagaatttgaatatcacccttcaggaaaagtccctcaacgacactcctatcctttaggcaaagaccaccgttgtgataaccaactgaaaagttgaaataagatatgcatcaccaatcagtgtaatgttaggcaacacatcaaaacatgggaaaccattgtaggttgtgaaggtatcgtgggtcgagaacaagattcaacatgacctccatgtacgagacaagcctgcaactgcttgtcgctacaggttagtgcagcctcctttagatgttcatactgctgcatcgatttcataaatggatttgaatagcctagagaactcgcagtttgtgaaaggcactgtgctgcttcttgtgcgccttttctagtagaacagaaaacaagtgcagactttcctcttgaatgttgcatcagtatatctgtatcaatattatcctttattttgaatcctgaaattctgctaacttaacttaaagtacaattgacagataggtagatgtaacttaccgaaaatgaaactttggagtctctacaagtagaaagaaataaagaaaataaatatatcagattcgattcagtgattatgcacaaattatcagtacagtagtacagctcaaggagatgaagaagacatctgacttagcacacgccctaattgtcccttctcattttaaagaaggaacattctcagatagtaagaaaatgcataccctctcaaacaggaagtcatttcttgctggagcataacctaaatagcacagtgaaacagatatagattaggtcaaacatataaattgctggtttaagtgttgtaaggctgtcaggacatgctaagtaatcaaagtggcattttcaagagttcatgattttgtggagtaaaacaaaaataatgatctattcgaacatcatttcatgactgattctgtgaggaagttgcaggtgtaggatggaggtattcatgacacagtttcttctcactttgacataataagtaaatcaaatgtcctaattcttacgctttggccaaatatttgcaatatgatgagaaacaagaaccataccaaaaaccttggttgtcaacttcactggcctcatctcttctccaaatctgcaaaaggaatatatagataaggaagttctagtggtggtatccttgatgaagttgcttctcatcacctttttattccttcagacggtactgcaagccactccgctgagatccaagcaaagccaaaacgtaagtaatctttaacagaacataatctggtaatgtaaataaaatagagacatgttgggaccatactgcttggagtttaccaacctatatcctcaatattagggatagtggcagaaactgctatgaatcgaacatttgccaaaggagcaatcttcattgtgccaagtcgagaaagcatttttattctactgacaattgcttctagggcagctccacgaggatcgttgaggagatgaacttcatcaataaggaccagagcaatgtcactgaagaaacccagtccaccatctcttattccatgacgactcacagaatcaaacttctgcaaacataaagatgttggttaaaaaacaaggaagtggctagcagttgtgccaatcctctttttacaccgtgtaaagcaaagcaagcagtcacatatacctcaggagttgtgagaattaagtcagcatcatgtatggatttggtgttatagaattcattgtcaccagtcatctccaagcaactgatccccaacgagcccagcttcatgttccagtcacgcaacttctcctgcaccaacgccttcattggagcaatatagatctaccaggcagttcaaattaagcacatggtaaaaattagacattcgtatcctcaacatacaaagtgaatccctaaagtgtatagaaaagctaagaaggtacttgacacatactgttttcagggttcctttgatcaaattaaacctccactctgatgagaggaaccttgagagaagccttagaatgcagagctcgaacagcacggttttgccactcccagtaggcgcagagataaccatgtttacatccgagaggaagcatgcagggaagcactcgctctgcaacgaattgaaatacctgcacggaacgcaggatgccactgtaaaaccccatcccagctactccacgtttcataccgtaatccacattccacagaagtgttttgttagcctgatgcactacgactacaaggctactcaaaatctcaatctactgaatgtgtgagcgcgatcatacaactacacagaaatgcaccgtgcaaacaccgtaaccgcggcccacggagtttgatattggcaaatgcgatgatgcatcgcgcgcacctgaacccgaaaacggagcggaatggcgggggaaggtccgcgacggagcgcagcgcgtacgggtcgccgagatgtcccatcgccgccatcgcgtgcggtccctgcagaaaaatcgagcgatcgcgggtgagtagccccgccgccgaggaatttcgtcgaacacgttgcgcgcggcggccggcgatcggagccgaaccggctcgatcacgatcaggaactcgcggacgaaccgagcgggcggaggcgcgcagcgtaggaagacgagaggcggagagggagaggcttgcttactgctggttggtggaaccggatttggaggggggggggggggatttggaccggaggagtcggagagatggcgagagagaggagcggctgcttcgcgagggaacgaaggtgggagaaggaatggcaggagaagccgcgcgcggataatgcctctggtgtctcgaggtgagaaggagaaggcggaggagatgagccgtggatgat

SEQ ID NO: 8259 - DNA, 40380 bp, Oryza sativa
atgcacatgttctttgaactgtactctgcaataacaaaacttattttcagatttgatgatgacaaagacatcggtgcattgtatggagaactttgggaggatattcctagtagcgaaagagtaaccctacagttatacttaccagaaattatctctcttttgtgtgattccatgtcctcgtcatcatgggctgggaagagaaaggtgaagcctctatttcattattttactgtctatacacataaaagtatcatagcttggaatacacttacgatactgtgtgctacttgcagtcagccaaggctataaaaaaactatgtgatgctctaagagaatccctgtctgtgcaccacaataatattcttgaatcacttttgaaagaactacctggtcgattttgggaggtaagtagtactatgatttttctatctgtggcatatcagtgaatctttccttttattcatggaataaaataggatggaatgcttagagattttcaagaaacattatccatgactaggttcataattcatttttttcgccatgaattaccacagggaaaagatgctattctggatgcactcgctgcactttgttcgagctgccatactgctatgagtgcagaagactctggcatgcctagtgttattctaaatgctgtttgtgctgcatgcagtaggaagtcaaaattgtaccgtgaagcagctttctcgtgtttgcagcaagtaagtatctctcttctctaccctgatctctatgtgaaactgaaatttgtggctagtggatactctaaagcattttactgtttgtggaccagacttttctttgataaaaggatttttagctgttagatagctgtgttcttaacctagtgctcaaaaggtttatgatcttagatgcaacaaaattgatgagaaaattactttcatgcttaatactccctccgtttcatattataagtcgttttgacttttttcctagtcaaatttatttaagttagaccaagtttatagaaaaacaatattagcattttcaccacaaaacaaacatatgaccaaaatatattcaatgttagatttaatgaaactgatttggtgttttagatgttgctaaatttttctataaatttgggcaaacttaataaagtttgaataggaaaaaagtcaaaacaacttataatatgaaacggagggagtgggtatttagtttgaagatctttccggaaatattgcaaacagctctcttctcaaaatattatggggagcaatctagattgtcagtgttatattttcacaaaagacattcatcgggtttaggtgttgtgttgggatggcattttgacattttctatatattagaatttacttagttttctttttctttctttaccacttttcaggtgattacagcattcaaagatccaggattcttcaatattgtttttcctatgctgtatgaggtttctaatcgatctgtcatttgtaaaacaaggaactcatcttcactcactgcatcctctagtgctggtcagtcattaattccagcccctcactgcattcaactaatgtcaatgctggatgaaacatcttgtaaatgaatactagaacttctattttattatctcattctttatcacataaatatgatatagtactgatagttgccatcacaacacaatgtttgaaaaccttgatgggatcggcttaacaagacaactttagaactatacattgttgcccttaatgcagcatacgtgcatgacttcaaaagccacttatcctcctttattttttatgtattactgtcttctgcagagcaagatgaaactgaaggtgtttctgtttctcttgataaggtgctcaactgtgtagcatcttcaatcactgttgctttcctgcaagatattatcaaccaaaggaagaatatcctggaaattattttaaattctctatcccccgaggagagttggcagagtatgtatcttgtatgcaagatctattataattctatgcaactgtttttgaatctcacttatttgatacatcaccactatcattgatgctttttttatggatttctatgtgcagttaagttgtcatcgttcttgtgtatcaaagagttgtgctataaattccagaattcagatggtaataacacttggcctgaggaaacaacttacttggttgaggaggtacatcacatagttgtttagtcctacacaactgtactctttagttcagtatttggtttcttcattttcctgacaaatttcttttaatttgaccgttcagttatttcattcaacagcaccaaaagttgtggatgtcatacgcttagttaagattgctcaggtaatcatcagtatatctagccctcaccaattcatattatattgtgtttgctcatatttattacaatctcatatagcacttttaaagtttcaccataagataatttgttgtcttccttctaatgaataaacatattgtagtttactacttgtatgttttatggcaatgggagcatgtgaactgaaattgcactggacggagctgttgtgggtgttatactaaatttgatgattgcataacaccatttggcaccagtttttttatagattatttagagatgatacaaaattattcatcaaatattcagggaaaaataagaacttgtctttagaaaaaaaaaaggtggctagtctggtggtttgatgaaccctggtgcacatggtttacagattactgctttgcttctttatgtaacagttcatatgcttgtttttggcttcactgattttagaacaaacagttacaaggtttcttgcactgactgtaacatataatttatatcttgaaaggacgagctatccaagatttatgtaaaatataattgttacatactatgctagagtatattagactactgtatattgcacaaaccagcagtttctggatatgcaatctgagtttgaattgccccctcatgactaacttcttctcaggttcacaccgctgcttccgagtgtctccttgagttgagcaaattgtatagagactttccattggttgacagaaaagggcccaagttctcaggcgaacttgctgaactttgtgagtcggaaaaaagcgagcaagcaaaggcatttttgaagcaatgcatggatattctcaaagacttcgaagatcccactggattagccatggagatggactaagtgaagctctcgaggttaaatcggcatagtaaatatcaaaaacaaggctgcgcatgtataaagggcgcgagcaccagggaaggtgggttattctcgcaaattggaatcaccatgtaataggatgagcgtttcattactggttgcatccgaaggaaattctgaagctttgcatccgcaacccacttgtgcaacatgccctgccgctgttacgatttaatgtttttctcccagaatgtagtggtgagctaccagagattggtttcatgattctttcaagtctcaacttctcctagaccaggcccgcttacatctggcagctttcataggtcataaactgccctcacagaccaacacatgcccacacatgcttgcgcaactgcgacacacgcgcccgtgaaaactcgggaagaatttcccgatcggtcacccatccctaaattgctccaggccaagcacacactttgtccacactcgtgcacactcgggaagaaattctcggccaagcacacactttgtcctcactcgtgcacacttgggaagaatttcccgatcggtcacccatccctaaattgcttcaggccaagcacacactttgtcctcactcgtgcacactcgggaagaaattcccggccaagcacacactttgtcctcactcgtgcacacttgggaagaatttcccgatcggttacccatccctaaattgcttcaggccaagcacgcttaaccttagactctcatagttctttgaagattggcttccggaaaaaagttgcaacttgttgatatgagtattctattaattatattaagccttagaccaggatgtcaaaaaaggaaccaagaccttattatacccgagagtgatacttatgctaggaaacatatactcatcctaaagaacgatttttgtatgaagggcattgattattcaatccaagaacttaaacacaaatgtgtctatacatatatggtttctgtttactttcacccatattgggactaaattgagacggtttacaggttacaatcacatatgacttgtgtaaaaacattaaactgacgccaaccgatgtatcttcggacttcttttctgaatccctattatgatcatcagggacttaagtggttagcttgcggagagcagtggtggtcttggagcctgactgccttcccagatgcttggagatgtaatctccagcatccatgagcttgttgaggtcaacattggtctctatccccagtccatggagcatgtacacaacgtcctccgtcgcgacattgccggtggcgccctttgcatatgggcagcctcccagtcctgacactgatgagtccactatgttgatccccagctggtaatacaaaaggaaatgttagaccaacagagcatttctggttgttctgtgtctgtttttcagtaagatggtttgttcattggcattggcaggatgtgaagtgtggttgcttacttggagagagaccagtatgttggcaagggcttggccgtatgtgtcatggaaatggacggcgatcttgtccactggaacaaaagacattacagcttcaagcatagcaagtacgctacctgaaacaaataagataacaaggagcaggaaattcccaatgagaagtggctcatactatcatgtagaaaagttcgaacaattgaaatcacatgattagcaagtaatgtgtcggcatgttttatggattaggactgcaatgctttcaaaaaaacgtatcatcgcttttgaaagtagttttaaatgcgcaaaaatatataaaccaggaaatgacatgctgaaagcagtaaaggcaacaaaatcaatacctggtgtaccaacaccaatcgtgtctccgagtgagatctccgagcaacccatgtcataaagctccttagctacatatgctacctttgatggatgaattgtgccttcaacagggcaaccaaccacacatgaaacatacctatgacaatcaaattttgcaaattctcagatcagattgctgtctgttcattttaactttcaggctcgatagatcatcaagcttatgtgacttacccacggattcgtattccatgtttcttggcagaagttacaacatcatggtaccgaacaaggctttccttgatggtacaattaaggtttgacttagaaaaggattcagaggcagatgcgaaaactgcaacttcttttgcaccagctgcaacagcagcctcaaatccctggataagtggagataaggttgattcatcacaatagatcaaaagtcttcaaaaaacgatacgtatagatagtctattggtgctatggtgctagtatattgtagagtctcccaataatagaacagaaccagacatactctgaggttaggagttaacactggaaaccgcacatctggcacatgcttaatcccttcaaccacatcctttgcatctgctagctgcaactccaaattgagtgataaaggttagctatttgaacttgaactgctaccaattttatcgtgtttttgttctgcaatgaattttgcaatacaagttttacaagctaatgtcccaattttaacattttttgttatgtaataaattttgcggtacaagttttacaaactaatgtcatacaaaaaattgatagtgaaagaagttagatggaattatcagtaacaacttctgatgagaaattaagtgctaccagatatgcatgagtttctcatgcagcatgacatgctaaattcttagaaaaggcggttcgtttcttcacctaatctgagtaaatactgacaaaaaacaaatcaagagctatcgtgacaatctctcaaatgtctgtgatttaaattaatgtatgatactagtacacgccttcacctaatctaagtaattacctgtggcacccattttggggacacaaaacttgtggcttcaactactgatagaccagaagccaccaatttgtgtatcagttcaatctttacagatgtgggtacagtattcttctcattttgcagaccgtcccgtggtccaacttcaactatcttcacaaaccttggaaggtcccataaaacctgaaaaccagttaatcatcaattgagaaaaggagtaacttgtggtaatacattacgatcactatacttcatcagcggccattttcacttatttagttataaaggtaaatagagaagactgacatgttgcattgccacagtcataatgctacatgtgagttcattccttctatttgaggtggtctgatgaaacctataacaaggaaatgaaattgaatacacccaatcacccatgagccatttcagttacacatgatcaaactaccttccgtggaagagctctgaactccatatccaccccattgcaggatgaatcagtatattggccttgcatatgccatgaatgagcactgctgtgaaagatcgtctgattgttgccaccattgcgatgcttgtaactgaaagtaagttcacatggtcatatcatacgagtttcagggcatacttcagtaataaaattctactgtcactaaagtaaactaacaagttcctgaagaaaaatagaagtgttgcaaaggtggaaatgtacatgatttgcttaaacctctggaaatactggaaaaacattccgcgtcaaagtaaaaataccgacaaagcaacaactaggaaaggaagaaatgtagcacggtaaagtttgcaacagtagaacactagaacttacttgttggtgttgctgtcatcaacacttgctctgcaggcacttggagagaacctttcaagtctgttaatactcaactttggcaggtccccaagaccaagtggctcctcgaggcttgacattctgtgaagcaggaggcgttacaattttaacaactatgttgagatgaatcttgatatgttaatatataaaggacacgcccggggtgggggagttgaggaacatagtcagaaatggtgcactagtccgcatggaaaggaacgtttgaaatccaatccaatgggactcgcaaaccatgtccattctcccggcatggtcaatgtgcagtgtgcaatgcttgcttgcacaccggaactcgaacttggccagacttcttctttagatattgaattgcacatgagatactcaccctaattaattatccatcaagcaggtctctttaaccattcaatcatgaaatgccatgcttgatgaactaatatatgatgatgcccagtaactagcagcaaaaatggaacagcgccaactgctctgtattaattcattttttttccttgtaaatactcaaagcaaaccaagatactacaaacccacactgcaacctctccatgaaaccaaatcaagcaggccaatcggcaacatacttgctacgaagaacagggaacagaaaggggaaagaaccaagaagaaacaagaaatcacatacctcaatcgaacgacgaattcgaagcaaacccgatcgaatcgcacccgagattgagggatatggggcaccgaactcaacaagccttacttgaatccgacgcaaaggagagagcagagcgccgaaaatggaggccgcggcttgcgcctccgcgtctccgccaagggaaaggaactggtcggcgaggtcgcgcgtggacccggttcacggtgagatccgtggtgcagcgccctgggccccaggtgtcagtgggagttggctcacgggacccggtccagggagttgagtctggcgggctgtgcggacgcagtggcgttggtggtaggtctcgttcccgttttctagttcggtgagcggccagccgaccacctaaaaaccccggactccttatcggattcggtttttggataattgtgcattacccgttaacacttagcagagcctggcattgcatttgcatggtcatgaacccatggtcttcatatgtagtagtagtagatttgtagcgaagaataatgatgatggtgattatgaaaaatattcatggttgtctatatgttcagatcagaatgaatcaatcagctgatacgatctggatttgtggtcttgtctcatgacagcaacgagacccgattcgcaaatttgtatttaatgatctctgttagtgcagacgtggtcagctgagttccagaagaaaaatcggattggaaggagtggtggccatgattttgttgatgtatttcctcctcgtgttttataagagtaaccatcatccgtcctattcaattcaatttatggttgaaatagcaatcgtcattatagcactagataaattatacatacgtgttttgcaacaaatataaaaaaaggacaaataatatcaacgtatatataaaaaaaaggaaaaaaatcaaattgaggccgaaaactttacacacctcaactattattctaaataacgcccctcaactttaaaaccaggatacccaatacccgtcaactattaaaattgtctggctgatttaccctctcaaggttgttttcactagattaaaggggccttcatgcatgaccagtcagccaaatcaaaattaaaaaaataatatggatcccacattcatgcgttggaggagcaattagttatctacatgatttgaaagagctcaagcaataaatctcattgtgcaaattacaattgctgtggaggaagattttcagcgattcgagcattgtcgccagggagaagataagaggacactaccagggaagaaaattacacaggacttctttgcgtgacagctgtataatacgaatctcaaagcaacatgttttcttccctgatttccccagagacttgacgagtaaacgtgttctcctgctgtcgccgcacgccggtcccaagtggtctcactgcgtcccctgcaatccttggcggtgccccctcactctggcccttccttgtgtccttgtgggctgtggccctccgtgcctctcgtcgcgtggccaacggtgctagctgcagctcagtggcttgcacgtgtcgaccagctgactctttgttagactgactatgcaggtggtggggattatcacttagttctcgccaacacttacgttgtctcagatgaggcggaccaggaggttttttcggagctgtcaattggaaagaagttcgacacctaaaagataatagagtaggcatacctataagacttcaccatggtcttggtgatgtgctaagcaatggtggttgcagggctagagattggctcatggcggagccaagagcatctcactaacactagtatcgacaattacgagtttgcgacgatgccaagattgtgcacaccttatcgacaaaatcatcacttgggtgcttgatagagctctcgacactttaatttcctcatccttgtggcatcatttttgcagtttcgtccatgtccgacgtggaggataaggcaaaaataccaaaatgaccttgtagccacctataaggtggtagcgctcttgttgttgctagtccagtctaacttccatgttgctagaggcccaaagggcacctccgcataaacaaagctagagcacagctctgcatggcatcctccctatggctctagttgcctagagtttggtaggtaatctttcctgcacgcccccctgactttgcattgcatccttcggtgagctccgtcccctgcttttgacgtggcatccacctttgagctctccaccgttgtttgcatactcccactgtcccacatctcatcgtcctcgacgtatccaagaataattacatcatgccaaaaatatctacacaaattagatgagttagcaagcttgtcctctaatttgatatgcataagttgatataaatgaaattggatggatgccaaacttttgagctaatctaattacatagtagtagaagggaaaaaaaaagaaataacaccataaagaaatcatcatacttgtttctggtttcaatacaaacttttttcctctaaacttatacttcctccgtctaaaaatgttgctaactaggatgagattctgaacggttaaattcgaggacctatattttcaattttctgcgcttgagaaaataaaagggaaaatgtcatgtctcctcccgttaaaccctagcttaagcccccttcctcttctccgcgcctccgcctccgcctccgcctccggtctcccctctcctcacacgctccggctccgacggacgattcccacccagtaatggcgatggatttggacgagccgctcgacgcggagaagggcgaggcggcgctgcggcggctgcgcgacgccgacccggccctctacctctccccctccgccgacctcgccgccgccgcccgtgaggcctccaagcacctctacgcctcgctcgtccccttctcccccgcgcagccgcccccgctctccaacctcctcgcaggccccgccttcgacgccgagcagatttggtcccagattgagctgctctcccgccccctcatcccccacctgcgccgccagctccgccgcctcgagaagcaacccccgtctcagccgccgcctcgtacggaatcgaagtccgctgatgccgaagagaagtcagaggaggaggacgaggaggatggtgaaggtgacgaagaattggaggagttggacgatgtagatgatgaagaggagtcagaggaggaggaagaggaagaggaagaagacaaagaaggattggaggataaagcagggaatcaagtggaggacgagttcttcaagataaaggatctcgataagttcatggtaaagggggaggaggcggaatatggtgggggtgccaagcaagggaagaagaagaagaaaacagagaactggatggaagaagatagtgatgaggaggaagaggaggaccttgatgaggatgaggacaatgaggatgaagaagatgacgatgaacacttggacgtaagcatttcgtaatcacatcccttgttaaattcttagagaccagtattagctctcataaagaagattgatatatagaaccactgatctagaagtatctcaggagtagacaccggaatttctgtagtcgcaaaagatagtatctgtattacctcaggaaattgagcatatggattaagttttaaaacagtttcccgcttgagctaataggcttatattgggagctagcattgggtatggtttaatgcaagatgcatgcttgctaaatgtgattcttaagtatcgttttttattaatatagttggaagactttgacgatgaagaagaagaagaagagggtgcagttggagatataatgtaagcctttatgctattttctgaaaatgctcatatcatgattgatagaatcacagaatgcgaaacagttcgggtttccgcacagtgtttttttatctttaagtgattatatactgggatatcaaatggttttaactacatttgaattgcttttttgaagatcggtatgatattcgtagaaatggaaatggtagtcatttataaatttgaattgtagaatcacttgaataattcttcacaaccttttcctattttatcattttcatgctcgacacataatttgatctgtttaagttaactgtcatacaatatgacctgtttagctcagagaagggcatacaaaggcaaatggagtaggaaaacaattggctccaaataatggcatggaatggactcaattaaattagaaaacattaagtatgtaagacaaacatattacattttcatgtaaattgttaaaaaaatgatgatagcacaagaaaatggatttatgaaaaaacaattagattaagcataaggcaaagaagaagtttgttgaacactaaaatataggtataaccacgtgtggcaatgtgggaatagaatgctgtgaaaaaaactgccacattcgcataactcataggataatagcaaaggatacctacaagtttatatgtcatgtacaaaaaggttgagacacaatatcaccctaaaaaacacagctttttagcatataacctaggcaaaactgagctgtaagttctgtctacttcttagccactgcaaatgtccctggaaggataagagatctgattagacaattccaagatctcaccatgcacataaatgcattacatcattctttcctgccttgtatttgtccagtggagcctttacagaagtttccatatgttgtattgactcagcaaagcttaatcgttatgcccagacttcggttgtatttaatatttgttcatttatagtattatgctttgaccagcaaagatgatttttccaggtataaggatttttttgaggaagctgatgaccaaaaagtaaggaagaaaggtggctccaagaaagttcaattcaaggatgaaccagatgaaccagaagttgatgacaaaaatgatgatggaaatgttagtcaagtactacacttactcacttcaatataaacaagttaggcacatgtatattatcagcatattcttccaattctgcaggatgaacagggtttgtcaactcacgagaaggcgcgcctgaagatgcatgctaaaatagaggaaatggagaaagctaatcttgaacctagtatgtggaccatgcagggagaggtaatatataatatgtttatccattcattagtttctagaacaaaacagatttttaactttgaaactgttctggtattaaatcatcagctcatggtaaagaaaccacttgaaattttcttgtaggttaatgcttccagcagacccaaaaacagtgctctagaagtggaccttgattttgagcacaatgtaagacctgccccagtaatcactgaggaagtcactgcttctcttgaagagatgataaagaaaagaataatagaggtatgtgtgttgtttcctttttggacatggcataatgggcagttttgcaacttggttaactttgttacagtgctggagaataaatttattctggacatatatttttgtatttgtggccttgtgctacttatactgagggagctttacttgttgattccatgtagggtcattttgacgatgttgaaaagccttctcccttgcaatttaaatccccaaaggaacaaaaggatctggtatacttttagtcttgtccaagaacataactcattgatgataacaataactaatcatgtaattgttgtcttgccgttatcaatattatttcaacaggacgaaagtaagagcaagaagggtcttgctgaactatatgaggtttgcactatcagaatacagcttttattttttatattcaaagaagttgctacttaagatcagtttaatgatgatttattgagggctggtgtttgtgtttgtacaggacgattatgcgcaaaaggctggccttgcacctgcaccactttctatttcagatgaacttaagaacgaggtgagtttagtcgctttctattataatatgactattggctttcatgggactaaggctgtactgtttctattgttaaggactttttttttcttttgtttaattgctgtgtgattgcatgtcatttgtttttagttaaaagcaagctgcaaaaagaagaaatcctacatgtcaaagaggaaatcttgagttcttctcattgaatacatgtcattctattatgacctccccccaccacacacacacactcacatgtaaaaaaaaaaaaaagaaatcttgtatcaatgcttgtcttgattgctagtgttgctactttattcaatattttcttctgtgtgtggtgatggtggcaaaggtacttgcaatgtctttgagaaagatcttttgaaaggaattgataatgctgtacctcatgagcatgcaattgattaaagtttgttttttttatggtagaagcagacatcgatttcttttgaaaaatagagaagtgattacttgtgatcacattgttgttaacttagtactaactatgtagcaataagcatgcaaatgggtcataccgtcatactcggtgatttttaaaactgtaattttttgaggtaccattatcaacttggtggtctttataaatttgttcccaccatttcattggtgctttatgcatattttttcccctgtaatgatattggaggcttgctgcattgacctaacttttgtttccacttaggcaaataccttatttaagagaatatgcttgaagttggatgcactatctcatttccactttgctccaaagccggtatggaatagtgacaagatattttacttacatttgtaatttctttcagcgaagttaactaacaaggtaaatattcacttttcaggtcattgaagatatgtctatacaagcaaatgtaccagctctagcaatggaggaggtaaataaaatccttcatttctccatgatgtttatacggttgagcatttcatgtcatgatttctctctctttttgcagattgcacctgtagctgtttcagatgctgcaatgcttgctcctgaagaaatttttgaaggaaaaggtgatgttaaagaagaagcagaacttacacaagctgagcgcagaagaagaagagctaacaagaaaaggagatatgcaggtaaatgtccttatgttttttaagatacattccttctagcttttagtataaatattctgacctgacatggataatgctcctacttcctcattcaaaacatttcattgttcattcaaacatggaagtagtttgagcaacacaaattcaattatagctagcaatatttccaattgcaaagttgggtacgagaatagattgaggcctgctagtttttcatacttttgtaccatacaggatcgcataaggagaggccagccaagatgcagaaagattaactcaatactggggaaacgcttacattatgaacaagtagtcagccatttttactgttcagcattacctcctgacccaaggatccattcatgatgagtattgtgcaaatggcaacgcagcattgacagacatggaggcagagagcaggctaggaaaggtagggtgaagggttgggctccaatgcttttgatcacaggatctgtactctggtggcacaacagacagacagctgttccaggtcaaagaccctgacgtaacccatctcccgtcccacaagaaaaggcgagcgaacgtattggaatgtgggatgggtaaaagaaatcttttgtttcttgttacactagtcgtagtagtagtgtagtaatgcaattttacaatatcattttttacactatagagtatcaatggagtgcatgtattcagaggcatatgttctgtttttgatacgttagggcattggtttgcagatgtctgaaatttgcgtgcggtgtattagtatcattttgatcctttgctttttttgccacattgagggattagattgatctaataaaggtgatgcagctatagactatagcatggcaagaaagcaaaataaacatgggttatgggggattgtactatcagctacagtagcaggtagagatgcctgtacgcaggtcaagcttggacccgagaatgaggacgtagagttgggaatcaaaaatcatgttgtagatactctgccatgcgtcgtcatcttcatgcacgttacaacgttatcatcttccagtggagtacagtacacgtacatgtagagggagtagtatacgttttctgttcgttccgggttcgcaagactggagaggtagctgaacgagagtgacgcaatgagctgcaatgcaccacagcagcagcacaaactctgcacatgtgctgctgcgaatgcagagttggccgtagagcaatgttgtgctgtactactactggagactggactggccgtcgccattctagcaaatgtcatttgtaacaacgatacactggagtatgcacagtggtgtaccgtgaaccagcaaggacgtgcgaatgcacagtgtgtaacagcaaatgtgccccaggcagaggtagcaagccagaaagtccaacactacactgcataaagttttggatctttataggattctcccaacacatgatgagtcgcacgcagctactactcctacagtagcagctagggacaatttcttcttcagctcaggctcagctgctgagccggtcgcgcctcccaacgcataggcatgctcccgccggccccgtctttcttgtccgccattacgccaaccagccgcagtaactcagcgtactactctactcctactccttttctttcgtttaatagtatagtcaactactaactttaaatcaccattaacttaatagctacttcataccatacttagagcagtcccaacccttcacttaggatagtgtttatggcattaactacattgcaatgtaggacttttagcttatgtgacactatattaattaaaagagagagtgaagagaggaagaaactgggtctcatataggacacagcttcaacacgagaatatatgcactatacactatcaagttttacattgagagataatagtgtctttataatagatgaagaataaatatgattggtagagaagagagatgatgtatttattaatggcccattttaagaaaccatgggttgtagagtgtagtttctattgtaatgtcttattaacatggcaccatagacacggtttatgtatactatgggttgtgactgcctttatatactacactattaatacttgatcctatttatcatacacacattgcgtcttgaaattcgtgctacagctggctataaatttatagccctctgctcatctctcttctctattatcttcttaaaatatatttatagctggcttatagcctgctattatacctgctcttactcgctgcagcattgctcactactgtactctcttcgttaaaaaaaaaattaaattctggccgtaaacctgaaccagcgtaagccacctatacgtataccaggtttactaaggcctgcttagttccaaaaactttttttaaaaaatatcacctcaaatctttagatatatgtatgaattattaaatatagataaattaaaaaactaattgcacagttggaggagaaatcactagacgaatcttttaaggctaattagtccatgattagccataagtgctacagtaacccacatgtactaatgacggattaattaggctcaaaagattcgtctcgcggtttccaggcgagttataaaattagttttttaattcgtgtccaaaaaccccttccgacatccggtcaaacgtccggtgtgacacccaaaaattttcttttcatgaactaaacaggccctaaaccttgaggtgaggtcattgccacctacggagtatgaggtatgatttaacggttaccacgaaatatatcggttttaaaaactaagaagattatcgcacgtgatgtcgtgataattgtacggttttataaaccttgtatatgactctgtagtacaacttatgtacaattaaagacatgtaattatagattaattaaaaaataacatgttcatatgtctgtatagttgtttataatcgttaatcaaatttagtgataacgtgagtcaaacagttagaccgtatgcataatattttttttttgaccgaggatgtactcccaacccagacgagccaccaccatgctagctgctgctgctgctagcgttgcccagtgaccttgcagctcgccatgctagctccgctgctgcttttgcccaaagctgcaccccctgcattgcccctcccctgaccaccttgcctcatctgtatctccgcccccccccccccctctcctcaacctctcttgtgcttgcttctccattgcagctcacctccatctcctattctcctcctccttgttgaaggagttcgtgtgcctctaccaagaacaataagaagccttgcattggtagccatgatcacggtggtggacctgtaccacgtcctgacggcggtggtgccgttgtacgtggcgatgacgctggcgtacgcctccgtccggtggtggcgcatcttctccccggaccagtgctccggcatcaaccgcttcgtcgcgctcttcgccgtcccgctcctctccttccacttcatctccaccaacaaccccttcgccatgaacctccgcttcctcgccgccgacacgctccagaagctcatcgtcctcgccctcctcgcgctctggtgccgcctctccgcgcgcgggtccctcgactggctcatcaccctcttctccctctccaccctccccaacaccctcgtcatgggcatcccgctgctcaaggggatgtacgccgccgccggcgccgcagccggcgccgactccggcagcctcatggtgcagatcgtcgtgctccagtgcatcatctggtacacgctcatgctgttcctcttcgagtaccgtggcgcgcggcttcttgtcatggagcagttcccggacaccgccgcctccatcgtctccttccgggtggattccgacgtcgtctcgctcgccggcggcggtggtggagccgcggagctgcaggcggaggcggaggtcggggacgatggcaagatgcgagtcaccgtgcgcaagtcgacgagctcgcgctccgaggcggcgtgctcgcacgggacgcagtcacactcgcagtccatgcagccgcgcgtctccaacctctccggcgtcgagatttactcgctgcagtcgtcgcggaacccgacgccgcggggctccagcttcaaccacgccgagttcttcaacatcgtcggcaacggcaagcacggcgacgaggagaagggcgccgccggtggcgggggccactcgccgcagccggtggtggggaagaggaaggacctgcacatgttcgtgtggagctcaagcgcctcgccggtgtcggagcgcgccgccgccgccgccgctgccggcgcggtgcacgtcttcggcggtggtggcgccgaccacggcgacgccaaaggtgacgacaccttttttatcatcttttcgtgcactttgacttccctttttgttttgcccgcgtgtattacactgttgtttgcttctgcacaattaatcactcttgtcttgtgctcttgaccatccgatcagtataatcaacggtccagatcacactggtctgctgattgtttggagaactcaactgcgtatactgatttaataccacattcttgaagtgattctttttcacaaacttaccttcttgaattgttaattcatgtaagcttttctgatcttaacagtgacattgactgttaagtagagttgaattgtacagttaagacaaaatcttaacagtaaactactgatttgacaaaagaaaatgttctttgatggatgcacaggtgctcaggcctatgatgagtacagcttcgggaacaagaatgagaaggacgggccgacactgtcgaagctggggtccaactcgacggcgcagctccggccaaaggacgacggcgaggggagggcggcagcgatgccgccggcgagcgtgatgacgaggctcatactgatcatggtctggaggaagctgatcaggaacccaaacacttactccagcctcctcggtgtcatctggtccctcgtctcctacaggtcaattaagcaaacattttactcacacttttcacattgccatgttcatcatcagtcatctctgtttgttgcatgtgttgttaatcttgtgaacaatgtgatgtaattcaggtggggaattgagatgccggctatcatcgcccggtcgatttcgatcctttcagatgcagggctcggaatggccatgttcagcctaggtttgtttgtgcatctctgatacatgctgcattgctgtaatcttacatggttccatgtctgattgcaatgactgaactatgttctggtttgcaggattgttcatggcattgcagccacggatcattgcctgtgggaactcccttgcttcgtatgccatggccgtcaggttcctcgttggtcctgccgtcatggctgcggcctccatcgccgtcggacttcgcggggtgcttctgcacattgccattgttcaggtaagctgcaagttcaggcttctgcaccaaaatgcatccttaactgcaaaagaatctatcgtaactcaacaattgtcattgaactctcaggccgctcttcctcaaggaatcgtgcccttcgtgtttgccaaggagtacaatgttcatcctaacattctgagcacagcgtatgatctctttaccaccatttttttcagtattggagaaatgtccccattttgaggtttcttttcttttatgccctgaaatctctcgccctgtttcccggttcccttttccattgtatcacaaacgccatgcactgaattttctgaaaaggggcgcatcttgcagcttttgatgattcctaatcatattgttttagactaagaaatccatttttactcatgatttatcatccacaaaggcagagtccataacaataccattaaccatgattctataacactatcattgtatctgacatgaccatgaactcttgttctgcagcgtgatattcgggatgctgatagctctccccatcacattggtctactacatactgctggggctctgaagagctctccaagtctcaactcaactgtgcaagaacttgatgttactgacagtttgattaggatttatggtctgttttagttgctcagattttgtttggatgataggtcagcttagtgatgctaggtggacaattatccgagaacttttgggttcaagtgacggccagccacggtttctgattgaagattaggaacatagacatcacattagtgataacaggcatccaatttgtaagacattgagaaggtctgtttcaaattactgacaatgtagtaagacattgaacagtgcttatttagcattccaataactgatggtaatgcgcttacttaaggagctactctgaaggaatttatttttaatctcttgagagattagctccggattttccttttcaaatgtttctgagtttgagggctccttcggaagacaagattctgaaaacacgggaataatcgtaggaataggatgtcatgctataacaaatattataggaaataaatttataaatttataggattctataaaaagtattgttttgtagtaccataggaaaatcaagaaactttaagttacaaggatgagaaaacatgaggtctagtctcatgttagttttctgtcaaaattcctacaaaatgagcaataggaattttaaaggattttggggaagccatttctatgtttcaaaagatcatatggggaaatttttcaatggattttaggggttgaacgctttatcatcacttgccaacaaaagttattacactttgtttaaggtgaggtgaataaattcttagacataacttactaagggcaacaacaatgtatatagcaaaaatagtccatataaataggacctatatatgtgggttttaactattataacattcacaatgtatataaatagcaaatagtattaggaggagagaaagtagagacaaaaaatatattttatcctatatgagaagcccatatgcttatgaattttttttccttactatggactagttccacaatgttgttaggtgactggataaaatattgtattagttatgaactagttttacactatagttatgaactatattgtattagactgaataaaataagtctaagggaatcttgccacattttttaagttattaacacatgagactgactccctctatttcaggttataaaacgttttgactttggtcaaagtcaaactactgtaagtttaactaattctgtagaaaaaaaagtaatatttacaacaccagcatagtttcattaaatctataattaaataaaatttcataatatatttgtcttggtttaaaaatattactacttttttctaaagaatttatcaaacttatagtagtttgactttgatcaaattgaaaacatattataacctgaaacggagggagtagttagaagggaatcttattaacggtggttacaatcaaacacttaccaaattgattaaatttgtctaaccttaggtttgcagactatggtaaaatgtagcttacaaccaaacattctctaatcctttaaaattttctctatgtttctttttatctacttttcctttgttccaaagaatcggaaagatggaatctttttgccacttttttcaagtttcaaatgaagaaaaacatgcgtagcattttgagcatcttttctagtactactcccaagtataacaaaaagtttgggcccaaaattaaaaggctaatggctggcctgtttgctcgaaacagcaggacagaaaaatgattgtgttgggagtcagacaaaagtgttggctttaggcatgcgcacttgaaggttgaagcagcaaccgacgattatactccactcttctcgtcctgtgacagacttgacacggttggatgtctctgaagcttataaccaacggtaattttatcatttttgccgagacatatttcttattataaaatttggtatattagcatatcatgatataaaaaaatttagtataaaatttatatacttataaggaccgtaaaaattctttagtaccaatgcatggatcttgtgaagaagattttttttactcttcatcacactcttttagatcatctgatatagtacacggttaccatgggttcttttagatcatctggcatagtacacggttaccaagggttattagacatatccacggacctaatttacaaaatcgtggaataaattggtcaagtttaagagaaggtaaactcaaaatatagataaaatttatacaatttgtcaacgaaattgcaacggtttttagagcaagtagtttttattattttttcggtttagatcccaacctatgtattttgaatttgttttatatctcttctatagagctgggtattctttttacattaatatactcccttagtcttgtagtatagcaacctatgattggatgagatattttagacctattcaaatttattataccgtgaaatgttccatctggtcctaacttggataaagggagtaggggtgaaaacgggatggatatttatatttctgtccagtcgcccgctcgtattattttggagcaatttcgggtaaaaaatccgggtactcgggtgtttgtacagatatcgaagccgaattcggatacattttggttgatacgtgatcgggtttgagagggtggtatccgatggatacggattatccgataaataatacagatattacacggtgtctgaattgatacctattcgttccgtatttatgaccgatattatccatgtttgtatctgtattcgatactatctatgtctgacccgattccaattattaaatatgggttaggatatgggaaggatgcgatccgacgaaaacaaccccatttcacccgtaggagggagtagttggtttgattgttttttcgattgtgtagaatttgatttttgtaaaagattgttgtcagggtctcgggtgggccacacatgggctgtcagcccatcaccaagaagtccaagcaagccccaacctgaagtaatacatagcagcaacagcttacaggagaggacatcgatcgatcaattggccaaggcggcaaacggcggcggcggcgacctggaggcgggcttgcctccttgtcgatctctaccttccctcttcctctgcttgtctagaagttactagacctttctagcccttgtattcctccatcttccaccccaaaaccttccaatattgtaacagattcactagctccttgtgttggatttgataccactacttctgaaattgcattgttgaagtgggtcgctaacaattgtaaaaacgaaaaaaccccttgtcgtcttctccattgcggcactgaaactcaggcggcgccaccagccagcgtaccacgacgttgctctgctagggtttgctccaccctcctcccacctcgcgccatcggattccaccttcccaggtctccctcccctcccgtcgccatgccgcacctcgtccgcgagcgcctcttcttcggcgacatcaacgacgccatcgccgcgctcaccaccaccaccgcggaagccggcggcttcacccacctcctctccgtcgtcagctccgccttcatctccttcatcaccgactgccgcccgggcctctccatccccaccgaggaggtccgccgcgtggtcgccggggaggagggcgcgccgccggtctccgccgtggcccccgggcggctgatgcgagtggtggagcgcgctggggtcgggctgcgggtcacgcggatggccgtgccgctgcgggacaccgaggaggagaacctgctcgatcacctcgagccgtgtcttgatttcatcgatgagggcaggaaggaggggaacgtccttgtccattgctttgctggggtctccaggaggtacgattaatatttaccaacactaatattccgagtaatctgtgcttttttgtaatctttagtgtcgtgtgctaatcaaagtgaagttcattagatatttttagttctggaatgttacatatatctgttaggcatacttccgttttagccaaatggacattgtgaattttgttccaagaatttatcaattaatcataagcatatgatggaatgtgaatccctgtatcatgctctgttttgacaagttggatatttttgcctgtcctgatgcattggttataacaaatatattggttaacagcgatgtatctcctgttcactgttgttcatttgtaagaaaattaaatacttgtaaatttatctgtatcttgttgcagtgctaccatcatcgttgcttatcttatgagaacagaacaaaaatctctggaaggttcgattatttcaacaaaatgggtgatttttcagtcgttgctttggttattactccagatgaatacctgagctgtctttttgatacactctggtgacatgccatgcttactgtcttgtttcagaagcactagagtctcttaaggaagtcaatgagtcagcctgcccaaatgacggttttcttgagcaggtaaccctttgtgatctgtttgcaccctattgctcttagctttcttttatttatttgttgaatgtgttgtaaattgcagttgaaactgtttgaagaaatgggcttcaaagttgatacttcaagtcctctatacaagcgtttccgtttaaaattgctaggttagtcataattcatcttggattctttgttactgttggacaggttgtgtggttattatgtcagggaaactgtgaagattctggccactggttagcatttatttaaaaaatggagatgtaaattctttgttttagtaaatttcaacattgcatgtctgtgaatcatgatatatttgatgttttcctgctttttttttaattatccatgactaagagtgctattcatgcagtcctgttgaaaataaagcagtcatacacttctcaatattgcttacttttgtttcttacttatgaaaaatctttgacaaatggacagatttgggtactttactgtttcacctttgtcctttctcttatgcatagtctcttactttgccacttttcactaaacttgtcaattttttttacttctcacaggccaatcctacaaaattggagagaaaataggaagctatgtatttgaagatgatcctggtctttctggacagcctaattcttctactcagaatttaccaaacaagcaaacccaacaaccagcataccgctgcaaaaaatgcaggagaattattgctgtgcagggcaatgttgtgagccacactcctggtgagggtgaatcttgctttcagtggcaaaacaagagaaaaggagagcgatcatatagcaaagaacaagattgctcatcgttgtttgttgagcctctgaagtggatgactccaggtaattcaccctcgtaattcagccctttgcagttacctacggtcacaaatgacttctcagattgatctcctattgatgtggctcatagcaaatctgtgtttactgctgagtgttcgtccaatctgttatgtaattctatttgttttatcatttctaattggtgcttttgttattgatggaacagtggaagatggtgctttggaggggaagctatcgtgtatccactgcggagcacggctaggatatttcaactggtcaggaatccagtgcaactgtggcagttggatcaccccagccttccaaatttccaagagcaaagttgatattagtaccacttagatagttgtcagaggctagtagattatttcaggaccatgtgagctggtgtaaataccgttttatcagaaggatttacgaactcgaaggatctcgaccgaagattttcagatccattgtgcactagatagataccatgaagaaatatagtctcagaaaccaccacttgtattgctacttgctgttagactatgccatcaattgtaattgttggttctgatgatctgaaatgctatcagcacgaatttcattttttttcttctcttttttcgagtacgcaatgcatcgtagtacgtatataaatccgtaatgcagttttgttgtacatgagtgcatccattgaaaacaatactgtgtttctcatgttccgttttatgccgctgaggtggcgggttcggagtttttgcttccggcccagccaataatgctctaagatgggcttgctcaccaagggtgtgggctcgacgtctaattgtgggccttgtattcggcctcagccacgtacgtgggctttatattgggccgcatgttccttgaggcccatgtacaccatcaagtcaggaggagaaatccccttccacgccgcacactctgtcacacgccggcgcgccggccagcggcggaactcgcgacacccgccggcgaaggagcagcagcacaggaggtggacggcgcgccagcgaggtcgcccatccagcctctgcgtttagttgtttgaccaatcgggaaagaaggcgaggaagggaggagaggagcggagaggaaaggaggaggggaggatgccgcaccacgcgcggccgatgacggggctgctgctgttcacgggagtcaacctggtgctcctcaacaccatcacccccgtctatgacttcgtctgcttccacccctactgggaacgcagggtacgccgcctccctctttcttcttcacccaccttatccccccattccgatctcccaaggctacgctttgatcctgtcgccctactacaccctggccaagccttttccccacagttcgatccgtgcatctgttgattgtttcttgtctcgagcatgcgcgccagctgtttgtggaaatgcctcgcgtctgtgctgcaactttcttcaattttatgatttcgggaacgaactatccctaacacttcctttcgacagacaatttggtgaagaaattccatattcgctagccagaaatttttacaattgaagagtgctcttataggagcatctttgtgctattatgatgtttttcctttctatactatgatcttgatatattgcatacaatttgaagttttgttgatgtgtaatcttgtgaccaatttagagagaacgtcgtcaaaaggagcgtaaagcactacaagccaatggttctctacaaactgctaaatgattttattcctaggtatgtgcgtgacactccttgagaaaaatctgtttgatggaagtgttcatttttataaccacttcaggagtagcttcacaatttggtggatgtgaaaggaaggtgagaatccccaatttatctggtaaaaaacttgagatatatttttgttcatcctagtgatagtgaacttgcttttggtatgctttatttatgcatgcatttgtttaactttgaattgacatggtatattttaaattttcagttgttttactacttggttagttggatgaaaccctggattcttcattgatatggagtgaagaaaattttataggcaggtaatattgtgatgctcttcagatatgagtagatctccgcactccaggtcttgctttcataatgctactcaactgcatcatcacatccttgtaaaattaccgaggaaactagatctgatgaatattgtttcttgaaactacctttatgtatctcttatcttctcatactcatctggctataacatagtaaatgaaaaccactgtttggctcaagccatttattctgatcaggatcctattaacttagttatttcctggggtggaaggaacatatgtttaacaactgatcctgcagagtgcttcattacgtgtttgaaagttctgaaaacctccaaccattttactgttcttccctcaacggtttatctgtcaacaagcagtagaggaatgctttctctgttcttgttgaatgtaccagtaatcttttgggctttctaatcaggtaggattcaatcatgtagtgtacaagatgactgaacagaaagaaggaacaaatccatcttcccaacaactagccaggacaatgtgcaagaccaaacatgaacctgagcccaacctgaaatgtaaatatgcaattggaaagaaaattccattgtatacattacactcgtggtaaatgcacatcatgtttgaaattgtgcacaaaccagccactatacacactaccctgtttcgctatagaactagatctcgcctcttcttctttgggtttgttgcttctgcacagcctgatcctttcctcatcatggccacaaactctgaataatctatcctcccatcctacatgtgcaaaatgcattcagcgtctcttgataggacaaatattttcagctttatcgatttcatctgttttgcatgaacacaatttaaagagcatttcttccttacattattagagtctgcatctgtgatgacatccttgatctcgttggcgtcgtataacccttgttccttcaaggcttgctcgagctcttcctttgtgatgtacctgcaagagggatggaataaatgtgtacaaatccctgaagttcagaattcagttatatcagtttttgctatccttaacttacccactattatccttgtcaaagtactggaatgccgtgtaaaggtgctcttctcgatccattttgttcatgtgcaccgtcgcggtgacgaactcctcatagtcgataattccattgccatcagcatcagcctgaaagttgaaaggaatttccaggagtcctgtcagttttagcatttcatctcgaactgaactgaagtttgtagcttcactatgaggactcactgcttccataagttgctcaatttcgttgtctgaaaacttggtgccctgctttgctaacccatttttgagctcctcaagcgtaatggtcccactattgtccttgtcgatgttcttgaacatctccttcagccccttgatctcctcctctgacaggcatccggctataatctacagaagattcaaaacaacaattaagatgcatatatctaccctgatgatgtgattaagagtaatatttaccctcagtgcagctttcttgaactggttcatggccctgaactgcttgagcctgttgagaacaacattgtcaagtggtacatcaggagcatccccatcttctttgatccacgggtgatctgcaaatccaaattgatccaaatgaatccaaatttaattctgacaccaattaagggaaaattaatccaaactgtacctctatatgaaaaaaaggagcagatttgagtaattaatctgtaacaaataaacttactgagcacttggaatgctgtaagcctctccttggggttgatgttgagcatcttcctgacgaggtccttggctccagaggagatcttcggccatggctcactggcgaggtcgatctgtccgcgaaggatggcggcgaagatggcgttctccgactcggcccagaagggcggcacgccggcgaggaagatgtagagcatgacgccgatgctccagatgtcggcctcggggccgtacttcctcttgagcacctccggcgcgatgtagtaggcgctgccgacgatgtcgcggaacacctcgccttccttgaagaagacggagaggccgaagtcggtggccttgagcggcgcgtcgtcccctttgctcagcagcaggaagttctccggcttgaggtcccggtggatcacccccatggagtggcaggtgtgcacgatcccgacgatggcgcggaggagcgccgccgcggcgcgctccgtgtagtggccacgcgcgatgatgcggtcgaagagctcgccgccggcgcagagctccatcacgaggtggacgttgtgcttgtcctcgtaggcgccgcggaggtcgacgatgttgggctggccagagaggtggtgcatgatctgcacctcgcggcggacgtcgtcgacgtcctccttgttcgccagcttccgcttcgcgatcgtcttgcacgccagcttctcgccggtggccttgtgggtgcacaggtgggtcacgccgaactgcccgcgcccgagctccttgccgatggagtacgtcgtgcgaacctcctccatcggccgctccagcacctcgccgatggggcctgccggcttcttggacgacgacgccgccgccgccgcttccgtcgccgccgccttggccgccggcgagcacggctgctgcttggcggacccatttttggaggaggtgccgcggctcggcggcgccgccttggaggtccctggctctgcctcgtcgccggcgacggccttcccgccacccgtgcagcactggcccatggcgtcgggggatgcgcgcgtgcctgctccggcgacggagaggcacggatcggagagagaatttttggtagaaggaagaaatggatgtgtgagtttgatgggttgagaggaaatggcgggaagaagtgagcggtagttgtttcggtttggattttcagcgtctcgtaggtttggtcgctggctattcttggctgctaataattgtttctggttagattttcctgtgaccaatcatcaatcgattagctgctaatagttttttctgattagatttttccagtgaccaatcaacaatctgcctttacaattgcctaaaaaaatgcgcctttgcaaacactaccaaactagtcaaagcttacaatatcaagcgtctcctctgttatgaaagaaaaaacaggccctaacatcttaagctctcatttctgcagaagcaccgagagcaaatacaaggatacttttcctaattttggtgtgctatgtatgtattttaactttcaggatacactcacaatttgttgattttagtcctgcattagtatgtcaccgcaaaattcaagaagaccatttaatcatgtaactgtataaggtgttccactgtcaatagagtgaaagcttcttctggaatttctattgccgtatgcaattctccctcctgaataaccacatcagataatgttctcctgaagctgtcaatagcatcctctggatgccctttcgcaatggatgcctgcagtggtgttgataaccgtaagcaaataacctatcacaagaccaaaactagaagtacaagagccaaagtttaggcactgtagatgatgcgaaaaattcagacataccaaatgcatttcatcaatcttgaaaagccaaaacatccatttcctagcctcttctccatcaatacagagagaaatattagtccaattcatatggtggaattccaaacgttgcagcccgaatccaacgccagcacctgtagctttgacaaatgcttctttaagacaccaatacctacagaaacagacaattgttaactccacaaattttggcttgtaaacatgatcagcaccctgcacttgttctgaaaagaaaaaaatgaacaagaacaaatgcatacctgtagaactcagttagcataccatcatgactgtctgcagtaacaatgcagttccactcatgatctgtgagataggaagtgaaattgttgatgaactccagggcagtttctcgttggggcttggagatgcacacaatgtccaggccaacgaggcagagaggctcagatgctatgccaacgtactccccctgatgcgacgtgttgaagttgaagccaggaaggttgacatttttattctgctgcaacaacaagacgtgatcgattccaatttgggcttcagaaactgacagaatgtaaacgtgaaactgaagatatggatttgggatgaattaattgatgagaatatctactagactactactactaccagatagggcttcccttcaagcgtgcggttgatgcgaatttggtggaatggcattccaagggcatggtgcacgagcgagtacttgagcaggcggctgacgagcgctcgtttcctgtcttcttctctgacgaacctgcaccggtgaggtcgtgaggacgaggagaaaaatctagaggctgaattcaattgcagtagtgagtgggtggaatcaatggggagaaagaggagttggttggaaaaacctgtggatggcggggcggtcgtgcggcgggaggacggcggcggcggcttggaactcggcgggggaggggcgccaccggccgacgtcgacgagccacctacaccgccaccgccccccgctgctctgcttctctccttcctccatcatcaacaactcgatcaacggacaacggtcaactcaagagttaaggcagagaaagccgtagaccatggcctggccggccggcaaggaaaggaaaggaaaggaagagggacgacgacaacagagaggggaggttaggatgggcctttctcacgaggcctgtaaacttttgaagctaaactaggcccaaattgcatatgtgcatcttgccatggtgccatggcagagacatcagcaaattaaacagcaacagagacataaccatagccatcagtccatcaccatctgccaatctctcacattcaataacagtcgccattgatacgctgagtgttgtgcactacattgattttttcgtcagactcggaggagatggagattaattgagctcgagtgtgagactaacagcaatgctacgcaggctaaagatcgcaatagtaattaatggcgaatcgagccaacgtcagttcgctatcgaccgacataataaatcaggttggttgtgaaccgagacatctcatcatctcaccctggagtcaggagctcaggaacagcaaagcaagaggaggaagaagcggagatggctgcaggcgacgctgcgacgccattgctggagatggcgtaccaataccatgagggctgccccgcctgcgccgtggagcgcagcaaggcgctcaaccccggcatcccctacatgcgcttcttccacatctggatcatcatcctcgtctcatgtacgtacgcgcctcctatatatcgatcactgcttcatttatacgtgttcatgcatgcttcgcttcctgctctgcttgactgcctctccagtctccttattatctattattaacttatgaagtctcatgttcgctctcatggcctaaaaattctcacattaatcggagaaaaaaaacagtctatataggaatctacctatattattttactacttaaagttcaaaatatttccatcgtcataaaaaagaaaaaaaataagtcggactcaacatgcgagaaaaaagattctctcgtcagtaaaaataggaaaaaaatatttcgtagtaaaaacaacgtccgactcattataacagaaaaaaagaatctcccccataaaatacatccgattccttaaaaaaaagaaaaaaatatcgccagtaaagaaaacgaaaaaaaaagtccaactcccatagaaaggaaaaaataacttctgacatcctactcccataaataaaggaaaaaaacatgtcctactcaaaatcgagaaaaaacacatattataaaaaatcccgtttataaaagaaatcgattcgaaaaaaccacccgactagataaaaaaccgaaaaaacacagattataaaaaatcccgtttataaaagaaaccgattcgaaaaaaccacccgactagataaaaaaccgctccgaaataaaccatcagaaaaaacattgctgaaaaaggatcgaaaaaaccatccgaattcacacgagaaagaaccgccatatataaaaaatactaccccgaaaaaactgtctgacccaacacgagaaaaatcccgcgtttataaaataattccgattcagtactgtgcaatgcgaaaaaaaactgtctaatttcataaaaaaaatccgatttcatgaaataagatccgtattgtttgtattgtccatcgtctaccatgtcgttttggtttttccatagcgtcgtcgaatgttcagacgtgtggatctaaaacaagtcttgcttaggcttgtttttctcggaacaagatcaaattgatcgaggctttgggtcagataggattctcgatttttccatcatctaaaaacttggtttgtgttccacgattatattctcctctattggagactctacatgtctctgtatgcaattattatactactggtaagtatagctaatattcttgatagcttatcatataaaaataataataataaataaacatatttttaattgttattaagagaagagtgcactgaggctctatttatttagacttgacaatacaagacaatgcaggatttgattgatcctattattattgcaagaatgagattgaaagattattttagattatatgtgtacaaccacataaataatccaatttgtttgggtaaaacatgcattgttaaggttgtcatagtcaagattgggtcattatattacagatgtttcaattttccttataatatgtcttagcaacaacgatcgatacgattattatcatgggaaaattgaaaccatgccattataattttgcaaaatttgagatatgacatcctgacccacatgtcattgactcatgtgggtcctacatgtcattgagataccgatggcatatcttaaactttgcaaaattataatggcatggttccaatttaccctatcatcattgacataattatagaatatagctgaaattcggaatttaaaataaggaacacaggaagaaaagactagagtccatactggcataccatagaactaatggaaatccggaactagaaaaataagaaaactaaaagtagaggttagagtccatatagaaatacaatttagctggaatttggaattagaaaaataacaaaactgaaagtagaggttagagtccatatagaaatacaatttagctgaaattcgaaattaaagataaggaatataggaagataagactatagtccataccggtatacaatataactaatggaaatttgggattagaaaaataagaaaatttaaagtagaggttagagtccatatagaaatacaatttagaaataacgaaaattcaaaattttaaaaaataaggaatatggaatgaagtatatagagtccatataaaaatacaattttaaaataattaaattcgcaattagaaaaaataaatactaaaagataagtttagagtccaaatacaatttagacataatagaaactaggaattaaaattaagaatattggaagaagagtatagagtcatataggaatttataattaactaaaatttgaaataaaaataataaaactaaaagtagagtttagagcacatgtagaaacacattttacaaataaataaataaattataatgaaaaaaagaatattggaacaatagtccataaagaaataatattgaaacatgagtccataaagaaataaaattagaaataataaaaatttagaattaaaataataagcaatagtagaaaaagagtctagagtccatataaaaatacaatttataaagaaaagaaattcggaattaaaaataagaaatattggaagatgagtataggaatataatttagaaataactaaaattttgaattttgaattagaaatataggaataaaattataaataatagaaattcatgattaacaaaatgaagaatgttggaagaggattctagagtccatatagaaatacaatttagaaataactaaaattcgctattaaaaataattaataattgtcatttatatacaatacattacgaatattacacattggttagtttgatcaagttagtacaaaatttaaaattatgttgtccttttaatatatttgataataaaatatgaaatatgctattatatgagagaaaatataagaatgctagctgcgcaatttacgcgggccaccatgctagttcatgttatgttcgaaaaagctaatggacgagcgctcgcgttcacctgcccccacgcgatcaatttactctgaccaatcccatgccacacgaagtatagatggccaatggattgcccggctccgcatggcccaagcacggctgtgcctgggctgaggtcagtcaggcaagcacggcccaacctacatgtcaggctgtgtcgtgccagctcacgggctgcacacacattccaggcacggccctatatgactcgggtcatgccgtttcggctgtaaggcacgataacccatcgtgcttcttcatagaataagtctatttttcatcctcaactctttgggctgtcttatatgactataaataagtctattttgtattcctcctctcttttggcattgccttatatggttgattaagtctattttggatccctataatattttcttcgatcgtgccgtgccgggccagcccaccgtgccaaggcattggcctaagcacagcccaactgtcgggccatgccgtgcttaggcccggccaaatggtcgtgtcttcggccgggtcgttgggccccgggccatatggccatctataacatgaagcgtcatattctttttggctctaatacgaatatagccacttcttccattttcggctagtcctttttcttttcggctttactctttcccatttaattttatttgaccaagttgaattttaggtgagaccaaccagttaggcctcacaacccgcatgcatgatttttctttttttattctatgaattcattttaatttgtatatatgatacaaactttatacgtatgaagtttctatacataaagtttatatgtataaaatttattgcatattttttttgggacagattaacatgtcgttgaattcatttgaaatttatgtttataaaaatttacatgcacaaatttctatataaaaaatttctctttctatatatgtatatatattttagatatgtaaagtctatatataaatatattttctttactgggccatgttgcttttgttgggctgaattctagaaaagagagaaaaagatgcacgtggaagcctacgagcgtggaaacatgaccgagaaatctgagtcgtcgcgctcgcgccttagcaattccttcttaggtgtgtaaacgtaatcgtgcacaccgtggacccatggttgctaagtattagacggaccctattatgtttgcatatccattttttttccatttccaccagcattgcaagatgtgaatgctttatcagtcatttctagttcacctgaatttatcttatagaggattattttgtactacctccattttttctttttatatagatgactcatttgacttttggcataatgtttaatcattcgtcttatttaagaatttagtataaatatgaaaaaaatatgagtcatataaattttattaataagagaaatggtcaaatgtcacgttaaaagttaaaaaaataaagagagtattagtgtctaaaattaaggggctaaaaggaaagttcaagcttgtaatcgttggtcgaactattgaagcaaaattctaaattgttgtttcttgcatctcttttgcatctttatttatcttgtcattggcttagcttgttccattgatgcgggcctgtgagcttttcatggtagatttttaacctttcatccttacaatattttttttactgaattccatccttataattgaatttcaggtttgccaatatcatcgttatttcccttcttatacttcatggtatgtatttatgattgtaaaatttacaatagcaccaaaagtatactctacattgtataagttttagtgtaaattagctgtttctatttctcattagcggaatttgtaccttgcataattttatcatttggttccgtgaaatgttgttcatcattcatgtagcaattcaaatttctctagtttccatttatattaactagttttttagtcttggaaacggaaataacagtaaagttaccacctaattcctaattcttcaagctatgtatagtcatatatatgttgctatgtatactcatactcatatgttttggctaatcattgtttgaataaaaggtaagctcatagtttaattctcttcttcacaatatgtaagagattatagcatttatttttattgtatatttctcttgtccactacagataagagacttgcatgttgcaaaaagagtagaggacattggattctatgcaggttttgtaggtaagcaattataatgtctgtaataccaaaggtcatgcttttacttagtagtgacaaatgttttttacacctatttatctatcgcaaacatggcatattataattctcaacctattaggtgcgtcatatatgtttggtagagctttaacttccactgcttgggggatggtagcagatcgtattgggaggaagcctgttatcatttttggaattttttcagcctaagtactttttagttcagttccgattgaaccaagtaagtaatgatttgtattaccttctttatatccacctatgattactttaccttgtgttgtgaaatcagatttgtattcaatactctctttggactaagtacacactattggatggcgataactacacgatttcttttaggttcattgaatggcttacttggaccaataagagtacggtgattaaattatctaaattcatattttctatccactattgaaatactataactagctagcatactgcaaccgggctttacaggcttatgccgttgaagtttgttgaccagagcatcaatccattgggttgtcattggtatactacaaagttctataatattttttactatagttatattgcactttagattatgacactctttttatatgattaggttagcacatcatgggcaataggtctcattgttgggccagctatcagtggatatcttgcacaggtatcctactaaattttaataccatatgagttgggtgcatgcttaaacaatgcattgacgctattatgatgcttttgtttcatttgacagccatcagaaaaatatccaattctatttttagcaaactcattatttggaaggtatcgttgttataggaaatataattgttctagatggtataactccttaaatgactgattcttgaaaatctttccttaggttcccatattttctaccttgtttatgtatatcgatcttctgcttcgttattcttataagttgcatttggctcccggtaagtgcacaactagccaattttattcttattgatattaatttgggcacacataattcttgtttttatgcttcccttagctaaaatttatcttacctactaaaatacaaaagttaattaatattttgctaatactttcaggaaaataatgtgttttcatttcaaaataatgtgtttcataaaatttcaggaaacactacataaatattcaatagaaagaactgagattgtaaaattggatctttgagtacacatttggttgacttcgaagagtttgtcaagcaacacactggtccagctaaagataagagcttatttaagaattggccattaatgtcatctattgttctcttctgcattgtctccttcgatgacatggcttacacagaggtatgtaccaagtatgtctaaactaatggtgtagtatttcttagctaaatgagtctagatgtttgaacccaataatgggacaattgaaccatgccacacaaattttgcgaataattgaggaaaagttgccctgttttgggaaatatcgattaaacacttcacccaattacaaaactagggtatagtgttatcactataaataatgcttctatgtttatgta

SEQ ID NO: 8260 - DNA, 17110 bp, Oryza sativa
ttctctaccattgctaatggtattacagatattaatgtgttttgaagttcactttcagtctatcacagtaacttgaaatgcacatgttctttgaactgtacattgcaataacaaaacttattttcagatttgatgatgacaaagacatcggtgcattgtatggagaactttgggaggatattcctagtagcgaaagagtaaccctacagttatacttaccagaaattatctctcttttgtgtgattccatgtcctcgtcgtcatgggctgggaagagaaaggtgaagcctttatttcattatcttactgtccatacacataaaagtatcatagcttggaatacacttacagtactgtgtgctacttgcagtcagccaaggctataaaaaaactatgtgatgctctaggagaatccctgtctgtgcaccacaataatattcttgaatcacttttgaaagaactacctggtcgattttgggaggtaattagtactatgatttttctatctgtggcttatcagtgaatctttccttttattcatggaataaaacaggatggattgcttagagattttcaagaaacattatccatgactaggttcataattcattttttcgccatgaataaccacagggaaaagatgctattctggatgcactcgctgcactttgttcgagctgccatactgctatgagtgcagaagactctggcatgcctagtgttattctaaatgctgtttgtgctgcatgcagtaggaagtcaaaattgtaccgtgaagcagctttctcgtgtttgcagcaagtaagtatctctcttctctaccctgatctctatgtgaaactgaaatttgtggctagtggataatctaaagcattttactgtttgtggaccagacttttctttgataaaaggatttttagctgttagatagctgtgctcttaacctagtgctcaaaaggtttatgatcttagatgcaacaaaattgatgagaaaattactttcatgcttaatactccctccgtttcatattataagtcgttttgacttttttcctagtcaaatttatttgagttagaccaagtttatagaaaaacaatattagcattttcaccacaaaacaaacatattaccaaaatatattcaatgttagatttaatgaaactgatttggtattttagatgttgctaaatttttctataaatttgggcaaacttaataaagtttgaataggaaaaaagtcaaaacaacttataatatgaaacggagggagtgggtatttagtttgaagatctttccgaaaatattgcaaacagctctcttctcaaaatattatggggagcaatctaggttgtcagtgttatattttcacaaaagacattcatcgggtttaggtgttgcgttgggatggcattttgacattttctatatattagaatttacttagttttctttttctttctttaccacttttcaggtgattacagcattcaaagatccaggattcttcaatattgtttttcctatgctgtatgaggtttctaatcgatctgtcatttgtaaaacaaggaactcatcttcactcactgcatcctctagtgctggtcagtcattaattccagcccctcactgcattcaactaatgtcaatgctggatgaaacatcttgtaaatgaatactagaacttctattttattatctcattctttatcacataaatatgatatagtactgatagttgccatcacaacacaatgtttgaaaaccttgatgggatcggcttaacaagagtacaagacaactttagaactatacattgttgcccttaatgcagcatacgtgcatgacttcaaagccacttatcctcctttattttttatgtattactgccttctgcagagcaagatgaaactgaaggtgtttctgtttctcttgataaggtgctcaactgtgtagcatctttaatcactgttgctttcctgcaagatattatcaaccaaaggaagaatatcctggaaattattttaaattctctatcccccgaggagagttggcagagtatgtatcttgtatgcaagatctattataattctatgcaactgtttttgaatctcacttatttgatacatcaccactatcattgatgctttttttatggatttctatgtgcagttaagttgtcatcgttcttgtgtatcaaagagttgtgctataaattccagaatccagatggtaataacacttggcctgaggaaacaacttacttggttgaggaggtacatcacatagttgtttagtcctacacaactgtactccttagttcagtatttggtttcttcattttcctgacaaatttcttttaatttgactgttcagttatttcattcaacagcaccaaaagttgtggatgtcatacgcttagttaagattgctcaggtaatcatcagtatatctagccctcaccaattcatattatattgtgtttgctcatatttattacaatctcatatagcacttttaaagtttcaccataagataatttgttgtcttccttctaatgaataaacatattgtagtttactacttgtatgttttatggcaatgggagcatgtgaactgaaattgcactggacggagctgttgtgggtgttatactaaatttgatgattgcataacaccatttggcaccaattttccatttggcaccagtttttttatagattatttagagatgatacaaaattattcatcaaatattcagggaaaaataagaacttgtctttagaaaaaaaaaaggtggctggtctggtggtttgatgaaccctggtgcacatggtttacagattactgctttgcttctttatgtaacagttcatatgcttgtttttggcttcactgattttagaacaaacagttacaaggtttcttgcactgattgtaacatataatttatatcttgaaaggacgagctatccaagatttatgtaaaatataattgttacatactgtgctagagtatattagattactgtatattgcacaaaccagcagtttctggatatgcaatctgggtttgaattgccccctcatgactaacttcttctcaggttcacaccgctgcttccgagtgtctccttgagttgagcaaattgtatagagactttccattggttgacagaaaagggcccaagttctcaggcgaacttgctgaactttgtgagtcggaaaaaagcgagcaagcaaaggcatttttgaagcaatgcatggatattctcaaagacttcgaagatgccactggattagccatggagatggattaagtgaagctctcaaggttaaatcgtcttagtaaatgtcaaaaacaagcccgcacatgtataaagggcgcgagcaccagggaaggtgggttattctcgcaaactggaatcaccgtgtaataggatgagcgtttcattactgattgcatccgaaggaaattctgaagctttgcatccgcaacccacttgtgcaacatgtcctgccgctgttacgatttattgttattctccagaatggagtagcggtgagctaccagagattggtttcatgattctttcgagtctcaactttgagtgcaaaaggaaccaagacctaattagacccgagagtgatacttatgctaggaaacatatactcaaatccaagaacgatttttgtatgaagggcattgattattcaatccaagaaattaaacacaaatgtgtgtatacatatatggtttctgtttactttcacccatattgggactaaattgagacggtttacaagttacaatcacatatgatttgtgtaaaaacattaaactgacgccaaccgatgtatcttcggtcttcttttctgaatccctattatgatcatcagggacttaagtggttagcttgcggagagcagtggtggtcttggagcctgactgccttcccagatgcttggagatgtaatctccagcatccatgagcttgttgaggtcaacattggtctctatccccagtccatggagcatgtacacaacgtcctccgtcgcgacattgccggtggcgccctttgcatatgggcagcctcccagtcctgacactgatgagtccactatgttgatccccagctggtaatacaaaaggaaatgttaggccaagcagagcatttctgattgttttgtgtctgtttttcagtaagatggtttgttcattggcattggcaggatgtgaagtgtggttgcttacttggagagagaccagtatgttggcaagggcttggccgtatgtgtcatgaaaatggacggcgagcttgtccactggaacaaaagacattacagcttcaagcatagcaagtatgctacctgaaacaaacaatacaagagagcggaaaattgccaatgagatatgtggctcatactgtcatatagaaaaattcgaacaattgaaattatatgattagcaagtaatgtgtcagaatgtttgtagattaggactgcaatgcttttaaaaaatcggtatcatcactttaaaagtagttttaaacgggcaaaaatgtatgaaccaggaaatggcatgctgaaagcaataaaggcaacaaaatcagtacctggtgtaccaacaccaatcgtgtctccaagtgaaatctccgagcaacccatgtcataaagctccttagctacgtatgctacctttgatggatgaattgtgccttcaacagggcaaccaaccacacatgaaacatacctatgacgatcaaattatgcaaattctcagatcagattgctgtctgttctttttaactttcaggctcgatagatcatcaagcttatgtgacttacccacggattcgcattccatgtttcttggcagaagttacaacatcacggtaccgaacaaggctttccttgatggtacaattaaggtttgacttagaaaaggattcagaggcagatgcgaagactgcaacttcttttgcaccagctgcaagagcagcctcaaatccctagagaagtggaaacaaagttgattcatcacaaagatcatagcccttcataaaacaataatgtatagtctattgctgatatagtgctatgtgatagagttcccaaaaaaaataaaacagaactggacatactctgaggttaggagttaacacaggaaaccgcacatctggcacatgcctaatcccttgaaggacatcctttgcatcagctagctgaactccgaaatgagtgataagattagttatttgaaatttaactgataccaaatttgtcaaattaacagtacaaattttacaaattaaggtcatacaaaaaaataatagtaaaaggagttcaatataattatcagagaagtagtgacaacttccgatgaggatttccacataaaaaaatccggttttgaagtaagtgcaatcacatatgctagaaaaggtggattttaaatcaagaggtatcttgacattgttccttaaatatctgttaatttaaattaatatatgatactacatttattcacttaatctaagtaattacctgcggcacccattttggggaaacaaaacttgtggcttcaactactgatagaccagaagccaccaatttgtgtatcagttcaatctttacagaagctggtacagtactcttctcattttgcagaccatcccgtggtccgacttcaactatcttcacaaaccttggaagctcccacaaaacctgaaaaccagttattcatcaattgagaaaaaagagtaatttgtagtaatattttacaatcactacactttttcagccaccattttcacttattcagttatgaaggtaaatagaaaagactatgacatgttgaattgccgcagacataatgctacatgtcagttcattcctcgtatttgaggtggtctgatgaagagatctaaaaaaaggaaatgaaattgaatacactcataagccattccataacacaggatcaaaataccttccgtggaagagctctgaactccatatccactccattgcaggaggaatcagtatattggccttgcatatgccatgaatgagaactgctgtgaaagatcgtctgattgttgccaccattgtgatgcttgtaactgaaagtaggtccagatggtcagatcttacttttttttttcagggcatcctttggcagtaaaaattctactgatgataaaagaaggtgagaaaggaaaatcttcggtgtaaaacaaaataggaaaggaagaatctagcatctgtatggtttgcaagagtaaaacttacttgctggtgctacggtcatcagcacttgctctgcaagcatttggagagaacctttcaagtctgttaatactcaactttggaaggtccccaagaccgagcggctcctcgaggctcgacattctggaatcagatgttacaatgtgaagaagactgttgatatgaacacttgatatatgtcactgaattgagttataatctcaaaacacatgaagaacaggaggaaaaaacaatgtatcgggtcgtattatctcattgatcatatgccaactgaacaaacattagtttccgtttaccagttgggatatatcgctgcaacaagccactagaacagtcagaaacggtacactaatccgcatggaaaggaaagtttgaaatctaatccaatggaactccagaaacaatgtccattctcccggcatggtcaatgtgcaatgcctgcacaccggacctcgatcttgaccaaacttcttctttacgcattgaacagaacagcatatatacaaaatactcaccctaattatccataaagtggtttatttaaacattgaatcatgaaatggtatgcttaagcttcaatgaactaatgatgcccattgcacagtaattagtaatactagcagaaatggaacgacaccaacgccgctgttaattccgctcttttccctgtaagcactcatagcaattcaatctagctacaaaacctcacttgaaactctccaagaaaccaaatcaagcagccaaattgtcaccagctaagaagtagtacaaggaacagaagagatcagaaaggggaaaagtgcaagaagaaacaagaaaccatcgcacctcgatcgatcgacaaattggaagccaacccgatcaaatcgcacccaggattgagtgagtgatatagggcaccgaactcaacaagccttacttgaatccgacgcaaaggaggagagagcaccggagtccgaaaatggaggtcgcggctgcgcctccgcgtctccgccaagggaaaggaacgggtcggcgaggcagcgcgtggaccaggtctcccgtggaacgtctccgtggggcccaccgtgtcagtggctgttggtccacaagacccggtgtagggagaagtgcatgccggtttggcgggctgtgtggaagccgtggtgtttggttggttggtactccttttcaggtctggtgagcgaccacccaaccccgcgagttcttatcggattcgggctgtgaaacgttgttgtgttcacccgttaataacagtgcctgataaatatattacttccggtgattatgcgaatgccctgcttataatctgctcaatgtagattaatgtggaaatggatcttctggattttagtgatggtgattatgaatatattcattaccacctctttaaatatgagatcatgaatcaactgataatatacggattgatgatcttttgtgtcttgacagtaaggatacccgatccgcataatttgtatttaatgatctttgaaagtgtaaacgtggtcagcttaactccagagaaaagaataaatcagatccggagttgtggtggtgcccaaaattctattgatgtatacatgccgtcctcgtgttttattaggtggctaggaaccatcttatttaatttagagaaaattgcaaaaaccaccccaaatgtcactctgagtttgagatgtctccccataagaagatttgttgcaaatccccacatcctaattcatcttgctttgatttaggcaccttctcttcacacgtgcgtgattcttgaagaatctcgtggcgaaatcaaccgagtcccactcggcgagagcaagagattacgttgtttgttctgtataaggcggtcattttgttgcgttatcatggtcatttcactgtgtttttcatggtatactagctatatattctaaactgatatcatgtgtattgaacaacatatccttttttttcatggacataatgagcatatagaaacatttgaacatgaagcaataatcatatagccagattaaacctgcatgacttcatctattgcaattggtcagatgacccaaaatagcatgtgttagtataggttaatcagaaattaaggccacacaatctaatgcaaaacggacatgttgacaaatcatcacgatgggcaggacttggctaatttcgccatgagatgctccaggaatcacgcatgtgtagagagaaggtgcctaaatcaaaccaaggtaaattaggaggtgaggatttgcaacaaatcttcttatagagttatagggggcatctcaaacttagagtgatgtttaggatggtttttcatttttccctttaatttatagtataaatattttctatatgtattaatgttaccttcatttttaatagatagcaccgacaatttttttaataacatttaattattcatcttattcaaacatgtactctaaatatgctaaagtataagtcataatcaaaataataaattttgatgataaaataagtcacaacaaaaggcctgttcactttgatgccattttcaaccttaccaaattttgataatgttgctaaaaaagtggctatatttagtttgctaccaaattttggtaactatataagaaatcctacaaaaattttggcaagtatgctaaaattttggtaatgctaaaatttggtaaggttttttttagcatcaaagtgaacaggcccaaaataaacactatttatataatattttaaataagatgaatgataaagaaagtagaaaagttaacaacgttatttattaaagaaatggagagagcaatatttatcgttcattaatgaaacgtactcctacaactctcgtatttccaattttccaaacaactatcaagtcgtttcatcttgtactttagcaaatttaacctatcaacttgtgcaagagtcaaactacattttatatgccttagaaaaaaaaatattctctcgtatcaaaatataataacttttagtagctaaaatttatttgaaaatataacttcaattgaactgcaataattataattacgatggttcgaatcaaaatttcaagataatcatgaatttaaaagagaaacacaaatcatatacctcctgatttcctcctttcagtgaagtgttaaaccctagctagcccctcttctccgctctgcctcctctcctcccccatcccctctccgccgtctcaacctccgccgattcttcccacccagcaatggcgatggatttggacgagccgctcgacgcggagaagggcgaggcggcgctgcggcggctgcgcgacgccgacccggccctctacctctccccctccgccgacctcgccgccgccgcccgtgaggcctccaagcacctctacgcctcgctcgtccccttctcccccgcgcagccgcccccgctctccaacctcctcgcaggccccgccttcgacgccgagcagatttggtcccagattgagctgctctcccgccctctcatcccccacctgcgccgccagctccgccgcctcgagcagcaacccccgtctcagccgccgcctcgtacggaatcgaagtccgctgatgccgaagagaagtcagaggaggaggaggatggtgaaggtgacgaagaattggaggagttggacgatgtagatgatgaagaggaatcagaggaggaggaaaaggaagaattaggattggagggtgaagcagggaatgaagtggaggacgagttcttcaagataaaggatctcgataagttcatggtaaagggggaggaggcggaatatggtgggggtgccaagcaagggaagaagaagaagaaaacagagaactggatggaagaagatagtgattcggaggacgaggagtatcttgatgaggatgaagaagatgacgatgagcacttggatgtaagcatttcgtaatcacatctcttgttaaattctgagaccagtattagctatcgtaaagaagattgatatatagaaccactgatctagtagtatttcaggagtagacaccagaatttctgtagtcgcaaaagagaaagtatttgcattacctcaggaaattgagcatatggagtaagttctaaaacagtttcctgcttgagctaataggcttatattgggagctagcattgggtatggtttaatgcaagatgcatgcttgctaaatgtgattcttaagtatcgtattttgtaatgtagttggaagacttcgacgatgaagaagaagaagaagagggtgcagttggagatataatgtaagcctttatgctattttctgaaaatgctcatatcatgattgacagaatcacagaatgctttcgcacactatttttatctttaagtgattaaatactgggatatcagatggttttaactacattttaattgcttttgtgaagatcggtatgatattcgtagaaatggaaatggttgtcatttataaatttgaattgtagaatcacttgaataattcttcacaaccttttcctattttatcattttcatgctcggcacataatttgacctgtttaagttaattgtcaaacttacttattagatgatggctagcttttcatgagaccaacagctcagaaaagggcatacagaggcaaatggagtaggaaaacaattggctccaaataatggcatggagtggactcaattaaattagcaaacattaagtatgtaagacaaacatattacattttcacgtaaattgttaaaaaaatgatgatagcacaagaaattggatttatgaataacaattagattaggcataagtcaaagaagaagtctgttgaatattaaaatataggtataaccacatgtgtggccatgtgggaatagaatgctgtgaaaaaaaactgccatgttcacataactcatagaataatagcaaaggatacctacaagtttatatgtcatgtacaaaaaggttaagacacacaatatcaccctaaaaacacagctttttagcatatatataacctaggcaaaactgagccaagttctgtctacttcttagccactgcaaatgcccctggaaggataagtgatctgattagacaattccaagatctcaccatgcacataaatgcattacatcattctttcctgccttgtatttgtccagtggagcctttacagaagtttccatatgttgtattgactcagcaaagcttaatcgttatgcccagacttcggttgtatttaatatttgtgcatttatagtattatgctttgaccaggaaagatgatttttccaggtataaggatttttttcaggaagcggatgaccaaaaagtaaggaagaaaggtggctccaagaaagttcaattcaaggatgaaccagataaaccagaagttgatgacaaaaatgatgatggaaatgttagtcaagtactagacttaattacttcaatataaacaagtgaggcacatgtatattatcaacatattcttccaattctgcaggatgaacagggtttgtcaactcacgagaaggcgcgcctgaagatgcatgctaaaatagaggaaatggagaaagctaatcttgaacctagtacgtggaccatgcagggagaggtaatatataatatgtttatccattcattagtttctagaacaaaacaaagttttaactttgaactgttctgctattaaatcatcagttcatggtaaagaaaccacttgaaattttcttgtaggttaatgcttccagcagacccaaaaatagtgctctagaagtggaccttgattttgagcacaatgtaagacctgccccagtaatcactgaggaagtcactgcttctcttgaagagatgataaagaaaagaataatagaggtatgtgtgttgtttcctttttcgacatggcataatgggcagttttgcaacttggttaactttgtggccttgtgctacttatactgagggagctttacttgttgattccctgtagggtcattttgacgatgttgaaaagccttctcccttgcaatttaaatccccaaaggaacaaaaggatctggtatacttttaatcttgtccaataacataactcattgatgataacaataactaatcatgtatttgttgtcttaccgttatcaatattatttcaacaggatgaaagtaagagcaagaagggtcttgctgaactatatgaggtttgcactatcagaatacagcttttatttttttatattcaaagaagttgctacttaagatcagtttaatgatgatttattgagggctggtgtttgtgtttgtacaggatgattatgcgcaaaaagctggccttgcacctgcaccactttctatttcagatgaacttaagaacgaggtgagtttaatcgctttctattataatatgacaattggctttcatgggactaaggttgtacagtttctattgttaaggacattttttttcttttgtttaattgctgtgtgattgcatgtcatttgttttttagttaaaagcaagctgcaaaaagaagaaatcctacatgtcaaagaggaaatcttgagttcttctcattgaatacatgtcattctattatgaccttcccccaccccacacacacacacacacgcaaaaaaaaaaaaatcttgtatcaatgcatgtcttgattgctagtgttgctactttattcaatattttcctctctgtgtggtgatggtggcaaagatacttgcaatgtctttgagaaagatcttttgaaaggaattgataatgctgtacctcatgatcatgcaattgattaaagtttgttttttttatggtagaagcagacatcattttcttttgaaaaatagataagtgattacttgtgatcacaatgttgttaacttagtactaactatgtagcaataagcatgcaaatgggtcatagcgtcatactcagagatttttaaaactgtaattttttgaggtaccattatcaacttggtggtctttataaatttgttcccaccatttcattggtgctttatgcatatttttttcccctgtgatgatattagaggcttgctgcattgacctaacttctgtttccacttaggcaaagaccttatttaagagaatatgcttgaagttggatgcactatctcatttccactttgctccaaagccggtatggaatagtgaccagatattttacttaaatttgtaatttctttcagcgaagttaactaacaaggtaaatattcacttttcaggtcattgaagatatgtctatacaagcaaatgtaccagctctagcaatggaggaggtaaataaaatccttcatttctccatgatgtttatacggttgagcatttcatgtcatgatttctctctctttttgcagattgcacctgtagctgtttcagatgctgcaatgcttgctcctgaagaaatttttgaaggaaaaggtgatgttaaagaagaagcagaacttacacaagctgagcgcaaaagaagaagagctaacaagaaaaggagatatgcaggtaaattcccttatgttttttaagatgcattccttctagcttttagtataaatcttctgacctgacatggataatgctcctacttcctcattcaaaacatttcgttgttcattcaaacatggaagtagtttgagcaacacaaattcgattagctagcaatatttccaattgcaaagttgggtacgatagtagattgaggcctgctcgtttttcctacttttgtaccatacaggatcgcataaggagaggccagccaagatgcagaaagattaagtcaatactggggaaacgcttacattatgaacaagtagtcagccatttttactgttcagcattacctcttgacccaaggatccattcatgatgagtattggtgcaaatggcaacgcagcattgacagacatggagggagagagcaggctaggaaaggtagtgaagggttgggttggaaaggaagtgtgaagggttgggctccaatgcgtttgatcacaggatctgtactctggtggcacaacagacagatagctgttccaggtcaaagaccctgacgtaacccatctcccgtctcacaagaaaacgcgagcgaacgtattggaatgtgggatgggtaaaagaaatcttttatttctcgttacactagtcgtagcagtacttcatttttacagtaattttttttacactatagaaggaatatcaatggtttgcatgtattagagaggcatatgttttgtttttgatacgttatggaattggtttgcagatgtctgaaatttgcgtgcggtgtattagtatcattttgatcctttgcttttttgccgcattgagggattagattgatctaataaaggtgatttgcaagaaagcaaaataaaaatgggttatgggggattgtactctcagctacagtggcaggtagagatgcctgtacgcaggtcaagcttggacccgagaatgaggacgtagagttgggaatcaaatcatgttgtagatactctgccatgcgtcgtcatcgtcatgcacgttacaacgttgcacacgatcatcatcttccagtggagtacggtacacgtacatgtagggggagtatacgttttctgctcgttccgccgaccgcgtaccgtacgagacagggaggaaggcagcacgcaacgcgatgctgcaagactggagaggtagctgaacgagagtgacgcaatgagttgcaatgcaccacagcagcagcacaaactctgcacatgtgctgctgcgcaatgcagagttggccgtagagcaatgttgtgctgtactactagtctactggagtactactgcagactggactggccgtcgccattctactagcaaatatcacatttgtaacaacgatacactggagtatgcacagtggtgtaccgtgaaccagcatggacgtgcgaatgcacagtgtaacagcaagtgtgccccaggcagaggtagcaagcccgaaagtccaacactacactgcataaagttataggattctcccacacatgatgagtcgcacgcagctactactcctacagtagcagctagggacaatttcttcttcagctcaggctcagctgctgagccggtcgcgcctcccaacgcataggcatgctcccgccggccccgtctttcttgtccgccattacgccaaccggccgcagtaactcagcgtactactcgtactctactctactccctccattccaaaataaataaataaataaatagataaatctagggtgtgtttagttcacatcaaaattaaaagtttagcccttgtttagttccaaactttttcttcaaactttcaacttttctatcacatcaaaacttttctacacacacaaactttcaaattttctgtcacgtcgttccaatttcaaccaaacttctaattttgacgtgagctaaacatagcctagccctgtttagttctaaagtttttttttccaaactttcaactttccatgacatcagacctttcatacacacacaacttttcagtcacatcgttccaatttcaaccaaacttccaaacttcagcgtgaactaaacatagcccaaggcaaagttggaagtttgtatgtgtacggaagttttgatgtgatgaaaaagtggatgtttgaagaaaaattttgaaactaaactcgggcctagcactgaatgtgacagattctaatacaataaatctggacagagctatatctaaatatatcacatctagtactaaattgattttttatgagaaggagagagtactccttttctttccctgcttttacgcgctgcagcattgctccctactgcatgctccctaccctcttcgttaaaaaaaaaaaaatcaaattctggccgtaaacctgaaccacgctatacgtatttaccatgttttggctccctatgagttaacggttagcatgtaatatatattggttttaaaaagtaagaaagttatcttacgtgatgttgcgataaacgcacggttttataaatcttgtatatgattttgtagtataactcatgtataactagatatatataattatagataatcgaaaaataacatgttcatatgtttataatcgttaaaagtcataacgtgagtcagactcaaacagttagtagaccgtatgcataatatttttctttttggaccgagggttactcccaaccggaaaacagatccctgactttgcagtttgtagttgtaccatgtgggggccacatatcagtgacacaactatatgtcggtggtctaactacaaactgcacaaaggctaagtttagatccaaacttcagtctttttccatcacatcaaattgtcatacacatataacttttcagtcacatcatctctaatttcaaccaaaatttaagctttacgctgagctgaacaaagccaaagtcaggaccatcattctcccaacccagacgagccaccatgctagctgctgctgctgctagtgttgcccagtgaccttgcagctcgccatgctagctccgctgctcgctgctgctgcttttgcccaaagctgcacaacctgcattgcctctcgcctgaccctcttgccttatctgagtctccccccttcttttttcttcaacccctctttatgctcgtttctccattgcagctcacctccatcttctattctccccctccttggagaaagagttcgtgtgcctctaccaagaacaagaagaagccttttgcattggcagccatgatcaccgtggtggacctgtaccacgttatgacggcggtggatgccctgtacgtggcaatgacgctggcgtacgccatcgtgcggg

SEQ ID NO: 8261 - DNA, 24236 bp, Oryza sativa
  unsure (1)..(24236): unsure at all n locations
tgccttctttatgcgcaagcctgaaaaaaaggggagagttgtttaatcaccggaaatgggggcaccactcccggccggggcattctcctcctcgttgtaggcggaagcggccaccgcgtcgcctcgccgtggggaatgcccgccgcgccgccagccgggtatgtgccaccccctccaccccgtgaagaaggccattgcgtctccttgctgtgcggggatgaccgcccgcttgccgccgccccgctagtcgctaggggtgaaaacggtaacggtaattaccggtcgaccggcgttcgttttcaactttctaccggccgagccatatagaaatggtaatcgcccgaaacaaaaatggaaatggtaaaaaatatggaaatgaaaatggaaatagttttgctgttatacctatcatttccgtatttaccgtattcttgcggaaattaccgtttcttataatatggtaattaccgtattctaaatatgtcgatattataggacatgtctatacttgacccacagcttatagattgaataactcttcaataaatctctaacttttgtacatggctaaaatgaagttaatttataatttatatagtataagcttgaatttatgtatatatataacatacttatgtaaagttaaatatatgtttttatagtttaatgtttccgtatttattaccggtttccgatctgtaccgacatgtttccgtccgtattgtttcgtttccggttttccgatatttccgatatcgttttcgtttccgactttaccgtttccgatttcgtttccgagaaaaatatggttacggaaatggttgaggctgttttccgatcgtttccgaccgttttcatccctactcgtcgccacccgctcgctgctcgccgcctcgccgcgcatgtggaaggggccgccgcggacgcctggtgatggaggaggggaagaggaggtagagaatagagataaggtggtgacggaggaggggaggaggaggtagagtatagagacaaggtaggagagatgagtggttaaggtagaataaaggggaaaaaaaggaagagagaggatatgtcaaaaatttgaggtgggtggaagggaaagaaatagtnaatttttctgtgcgggccagataaaaggcccgcgcgtgaaaattgatttttccgtgcgatcctcttaagtcgaccgtacgggataatgaggattatcccgtacagtcggattaagacgcacgcacgggaaaatgcattttcccgtgcgggcattttcccgtgcgggcgataacccggcgcacggggaaaatctatcatgtagtagtggtcacatgaggatattaattagcctaaaagttttgtcacgtggtggccgtcggcacgcaaaacgaagcatgcattattgcacgattaattaagtattagctatttttttcaaaaatggattaatttgatttttaaagcaactttcatatagaaactttttgcaaaaatcgcaccgtttagtagtttaaaaagcgtgcacgcggaaaacgagggagaggggttacactgaccaaataccagaatcctgagtatagctgtagttgcttatgcaagaatctagtcagaacttatttcaatttttgtgtttcagtttgtacatagccttctagtaaggaggctccacctaatttcttggggagtagggagttccatgaaacgtacaatatgtatacggccgctcttagaggcacttgtttggaacaaaccttattgcaaaacaatctcagtgatggcgatcaaacacatatgtaagtacaatttgccataactgggaagtccagataacatcatatagtattgctgtgttaaaactggtcagcaaatcatcattacagtctcacgtcatcatccatcaacttgcacgagcatcctacaattactatgtgcaagcaacaaagaacgcgaccatacttttcgttactggatgcagacatgcagtaatgttacctttacaaatttgagcattttacgaatgtaagttcttttatagacacataaggcgaaaacgcagaaatggctttgtctcgaaaaaaaaaagaaaggcagaaagggcaaaattcgtatttacatgatttacatatctatatcatcaccatctataaagtcttcatcaccatctgatcacgcttgggtctcaaaattctagtctgcttgttcgcatatatagcacatctctcaagcttgttccctgtattagtttaaatatgttagatccatgcccaacacatttatgatacatcagtcaaaggcaacatgttaagaacataagatatacccccatctattaaatttcagttacaaacgttctataactcatcatggaattcatacagatcagatcatttcagtggctaactgaactgcaagtaaatatggtgggaatatcatttacaagacaggaaaagtaccagaccatgtttctttttctattatactaagacaaaaggacatgcaattagataactaggagtttagaaacatcaagaaagaaggagactacagctacaacgttaaatgtggaagtagatttaatttgtatggtgtatttattaatggactcatctccagacacaggtcggaacaaagcttttggctgaactcaagtatttaagctcagttgaaatacttgtaagtgctacactaggtcactctcatcaaagcatacatgcatcattatcatcccgtttccacttggcaccaaattgccgctcatgctgtgcttgagaagtaaatggttggtcagagaaacatgcctgaattaattctagccttgaaatgaagaatgcttaatggaaactagtggagagtaaaaatggaaaaacagaccttgagatgttggtatggaaagttcactcaattaggggagactgacattgattaattctagcctaactggtgtcatcatttgtgctatccttttaacaaactgtgctatctttttaacatgcattacctgtatttgtcatagctgctcttccttatcttccgtatggttgatatctttcctaatgacaaatgaaggtatcggtcttgcatcttgcacacgaaattcaaaaatctcttcatcggcatcaatgcatgatgcactgcctttttgatgttcatgtgactgtttgtcaaatatacacgcattattcaaaatttaatatagaaattaatgtcattcaaaaaatagtaagaatagaaatattagtgcaaatataataaatagtgcaaaaattagtcttatttgaaaatataaaaatattttgcaatgtttaaccattcgtcttatttgaaaaattaatacaaatataaaaatgataagtcatacttaacttttgataataaagcaagtcacaaacaaaataaataataatttcacaatcttttgaataagacgaatgatcaaacgttacaaacaaaaactcaaagcaactagtattgtaggatggaggtagtaatgtaattaaactttactcgataacaggcttaccattacctctccaaggaagagcattggtctgctgacatcatcaccacctgcaggttctctcatattgcgctcccatgtttccaaagccagaaactctggaaaatctagatcttttaccttgttcaattgtgatattaggcgctccatctgatgctgcatcagtacagattcaaataatattaaagaatagaaatatgtaatacaaatgaagtgcaaaacacaagatgatcaagattggaacaagtataaacttggacatccaagagtaagaatagaacttcctttcagtctgcaccttcaggcaaaaataataccgagccaatatcttcaaaatttcttaataggtatagagatgccccactagtgttgtcctttctcatatattcatgtattaaaaacatttattgaaagtttatgcacaatttcctgcataacagaatgattattgctgaatgcagacataataatttagtcactctctgaaaagagaaggccctttcattacaaggaaacaaaccattgaaaaacaagttcatttgctattcaagtaattacaatttatattttttactacaagttgaacaattttggcattacatcattaacatttgatgtgcagaaaatcaaatgtttgtttcttgcaaaaaagggagcaacctccattctttgcagaaaatctttcagttttgcatgcctgtctcttctggcattatcaccatcacccccccttcctccccaagcaagatctccaaagtcttgactcaattcttcattgcaatgcttgcagtgaaaattgttatcaatatggcttacaagatccagtgcattgagggatgaatacctacagctcaacacagaaatgacagctgtgctaaaatcttttaggtggtactatatgtccatataacaatcaaaattaagctttactacctcctctcacagttagggcacacatagttctgaatcatgtagtttccatctaattcatcctttaatttcttcttcatctcgtggatcctatacagtgtgacatcatacacctgcattcaagaaaaacatacacaatgaaaacaatctttaccagattagattaaaggggtttggaaaattggataggactttgcttataggttatagcctacattaaacatgagccagtagctgaaaatgaaactaccagcacattactcaacctgtttagcattatgctaagagcagaaaaagaaaaaaaaagcaatattcaagaaacatgtagaaagaagtcaaccagcttcttcatttttgtgaagttttaaaagaacttcaggttcttcataactactgcctgacctcatttaggcaaatggttatatcatgaaattgactattctgtgttgccatcacatggtaacagaaaaggatattctggtatccagttgtctaattacagttcgatagtatccctaagatgcaattactgattgcctaaactttgatacactgcatgagtccaactgcttacagtgtcaaacaagtttatgttttcagaggtatataaagctcattgtgttatcccatatataaggacatgataaatactatgtgaaggtcatcattagttgcaaacacaaaagttttgtactcttgtaatgaaggtcagcatgcaaaagaccttgtatatgcaaaacacataaattttgtttttctctagacgagcaatatctttgaaaaaagatgcgtgtttgataaataacctgcccatagtgtaagcaacagtagggctgcatgatcatcttcaatttcccagctacattggtaggaacaagatgggcatcatgcgaaacatgggagggtgaggcagttgaaatgcttgcatcatgtattgcctgcgccgaaaacaacacaaggtcagaaggaaagcaagggactagtcgatcaaaacttatacaattatacatatggattgcatctaccagacccaccaacgaaacaaaagaagcaagttcagctctcctgaattctgatgctaccattaatgattctgtaaatatattaaaccctttggatgcttacctacataaatttaacctaaagttgctcctacttatttcaatagtgctgcatgcacaatgtgctgttgataaatgatcgattactgtaagaaaaccagtttaaacagatgacatttttttagtacacagtaaacagagcatgcctccatatatgaataaaaaagactacataggacgaaagaatggactaacttccttccgatagtatcttctcactaatttctgctgttcgagaaaatgggtaatctgacgcaatcggttgaatggaatcatcagacttcttgctaaatcttcctcccggacccactgttgcctgaggcaaaaaagaaaagaagataaaagttgcactaaatcagtacctaaaggctcatagaactgctcatgcacctttcacttagagaagttgtgagtacaagataatggaatcacattaattatcaatgctacaaaaacaccaccctgataaataccctgcaacagcatcccataaatccaacaatacatagaggtctgcactgattattccttatcactgttaaccttttacagtaaatctgagcagtgaattaaccaactcggccacccattgttctactagtgggactcccaaaaaacgtagcctaaaaaaccacaaaagccaatcccccattggcactcgcatcatcattcatcaattaggtaatcgcatccccaccaacaccgaagggcggacacactcacaacaacacaagcagcacggcacaccaccaaggtcagggctccgggtctggctcaggattaagcgatctcacctggtgagggcatcgaggacgacgacgacaatcccacagctgccgctgccgttgggtttggactggtcttcctcaagcgagacgtcctcatagaatcctcgcgccaccatcctcaccaacctaccaaaccaagttgccaaaccgaaacccagtaaacctcctaaacccctagaagccgaagtacgaagcaggggaggggcatatggagaggaaggcgaaggggaagggacctcaccgatttaactgctccatggtgtccatggcggcggaggcggaggacgacggcgagcggcgagcggcggaggattttagccggccgcgcagcgtggcgcggaggcttgagttgaggagaggagaaaccgaggagaaaaatggctaccccgaaatccgaatcacccaactcgacctgccctctttggacttcggagttcggaccgttggactcgacccaaacttcctctcctctccccctccttgcgccggaaggaacaggagaactcggtgagctgaaaggctacgtgaaccggcgcacgctcagcccacgcgggccttttccttttttttcttttttttttcctctcccacgccggtttgttcgaggctcctgcaaattggacgcctgatttttttaaaaaaaaaatcgagcgttattccattatagaccggaattgtttcactaagtaaatcaaaaatgtttcaatatggtaaaaagctgaaacacaaccaaatcacctcatgaaacattttgctacaacgtatgaaacaacggttttcaaaaaatgggcgatgtttcaccctcaatgtttcagcaataacgaaagaacatttcaattcttaaaaaaagtgaaacatgctcagatggctacatgaaacaatttggttcaatgtatacaacaaacgatttaaagccattgcaacacttaaatcccgtgtacatcaacaaaccacgtgtccatcaagatggaaaatattaaacggtacaaaaatccactgcaacatttcatccatacatagtaaaacatcacgagtatacttgctgaaacattgttggtgaaataaaaaatgaaacgaattcccttaatagggcgttttcgttatatcgggacgacggttgcaatggggacacgcgtggtgggggacacatggagcgtggtggagatgcatggagcgcgtgtgggcggcgggaggcgcggcgcccgatttttctcccacccattgggcgtccaatgtgcggcattttcgcagtttttttctcttccactccaggccgaataaggacattttcttttcaactccatttcctttttttatattgtgtgctttcaaataaatttaaatttgaaaatttcgagtaaagtttctactaaaatttgaaacctccaattcaaatttttaaaactttcaactcaaagtttggaagctcacaaatcaaaatttgaaattttatttcatatttcaaaattgtcaacttaactatttatttgttatttttattatagaaattatgcttatcgcggcatagttctagcgaattgagttggtaaggcctcttgtttcgtaacctgcctacctgagttcaaattgtaaacttggcatgtgtatttagatttacggctaattattctttcaataataggcaatgtacccgtcaacagcgagaccactattgtgacttcgtcaattttatgatatgcctgcctaatcttcaaatgtacttatatgagtaaggtgtgcgtgcgtgtttatagggggtgagtgtgcgcgtgtgtatatgagcgcctgcatctctacggtgggttttttaaaaattttttgtaagagtaaccaattactgaatcttttgcacataattgcaaagattattctattaaatgccaatgtgtaatttaaatggttttggcatacaaaagatataacccccatttcatatctcttgcttgcatttttttttcagtcttagttttagataaaccaataacttctgatacgtggtacagtggtaagcttagataggtcatagatggtcatagatttattcggtctttgtgtatccatcctcttatttgatcaatcttcgttgctaggcaacgatgtagtgctagaaggcatgacggaggcaagatagggacgataggtagacagggagccggtgagcggccggcataattgttatgctgttttttaaaaaaaaaaatttggttaattgcatcgtgtatagtataaactaactgaaattatcctttggacgatatacaattacagaggaaaaaatagtctcgtgcctatgatatgttaggtatgatccacaatgatctcaatatgagttgcacatgcgtgattactagttgcgaataaaggcacggcctccacggggcgacaatgagtataaacatgctatctatgtcaagtgccatatctctgaaactacagcttgtcaattgctatgtcccagatcacatcatatattgtgttaaaactggtaaatgacatcatcatatatttctggtgtcccttttctaatggctacttatacacaagcgaagaccagtgtatcattcgctactgatcctcagaaattgtagcatttgactactcagcaggaggtatacagttcttctccacaagcttgaaaagcaaagtgcggaaggcagaattcatttttagttgatttaagtcaaactagtttcatatactcacggtatgaatactgtgattaaatgtccaaccattggtaatgtatcaaacttgagccatcagtcctactgtcccagtgtttcaaacttggaccacttagcacattctgacattaaggaagtaagcaattcttcagccctcttcccattcataatcattacaacttacttcttgggtctccacattcagatcagcaaacttatatacctcttctatatttcctacagacacattagatccaaagtcaacacactaaaagataagatgaaagtcgacatgttaaaaaacatcgcaccagtgagctttcagttcaaaacattgtatgactaacatttttgacatatataaatcgggccatataattagctaactcaaccacaagtctgtgaaacaaaaaaaatggtggtaatatcatataaattcaaaaaatgataacaaacaattaccttttcattatagaaatacaaggggtatgtaattagattactagaaaatgctagactacagctagaatagttgttgattaatattttaaagaaatttttttggctcttatgtgaaattatagataggaacacaagttttgatcaagaaatacctgttgattgcctcactttcaattcaatgccatcatcaccagattcaccaccatcatcacgttttgatttggcacccaaccgcctctcaaactgtgcatcagaagcaaatggctggtcagaaatacatgctaggctttcttcttgtatcgcccttttgccctcatcttcctgccttttctggatagcctcataataagcttttgcgtatgcctcctacagcattaaataaaaggtgaatttatatttaacattcactctactagatagttcttgattgtgaaacttataattgatattgaaatgcaaattttatcagatcacctgtatgctcttcatctcatcttcctctgagagctgtttcttgtcactcttggcttctgaactttgatccagatttgcagtgttgttgttttcttctttatgttcccccgcgaggactgtgcgcttacgattcatccatgagtgctgtggctttatactttccataccagattcaacaccttcctgtgcaccagtacttcctaagaaattaacttcaacctggaaaggagaattggattaatcaggcagtgcaatatctagtttaaatgaagtaaatttcacgattagtacttacaggggcaaatcctaataatcaaaccattttattccaatctagaaagctagtagatgtttcaggaagcatagaaattctagcagtattcccagcataacaccatggtcatgctatatgcctcaatcaatgttgcctttattggctccacatttatctaaatttgcacctttagttctaatgaatacagctcaatgcatataccaggcttacctctgtttccccaaggaagggcattggtttactgctgtatcgcccttctgaattctgagatgaaccaactgcaccatttgcagatgcccctatagttgctctttcccaatcttgcaaactcataaaagatggaaaaggaagatcctttaccctgtcaagtactgctattagtggtttcaattgctcctgcattcatgcatgttcaaatgttagagcagaaatctataaaacgcagcatcacaatccacactatcatcaagattctagaacatgcactttgccatccatgtttaagctaaaaacttccttgcagtcagcatcttgagggacacgcttagccaatatgggagaacatacaccgttgtatttattttatatacgagaaaaatgcattagctgaatcataaacatatacaagtgatcagcgaagtgatgcttcatagatgacataaccaatatatatagaaatattttcatctttgctatagatgttgaaactatatatatggttcatatcaaagaaagtccttctcacaacaatgaaatgctatattgttatcgtgctattatcacaaatgcgataatggttagagagatgctaaactatgtattgtctatgtgcaatgtaaaaatttatagaaagtttatgcacaatttactggatagcaatctgattattggccaaaatgcagattcactaatttagtttttctgaccaatgtaaaacaaatttaattattttccgatagttatagtatgtaagctgtactaaaaactgaacaattctaacatcatttatgtttgatctatgctcccaaatttggtaacaaatttctaactgaataaaaagtaataacctccattctttgctgcatatccttcagtttatcgtgcgtatgctttattgcattgccaccaccacacacaatttcatccaaagtaagcttttcactttctggacgaagttctcctttgcaatgctcgcagtgaaaatagtcatccatatcgctgacaagttgcagtgcatcaaatgctgaatacctatggttcaacagagacaataatgtaagcttcatttttttatgtggtactatagatccagaataatcagaagtatacttagtaccttcttttacaattaggacacacataatgctgaactgtatctctgtcatctaagccatctttcaattttttcctcatgcggtgtatcctatatcttacaacatcatacacctgtatttcagaaaaatatgcacattacaatctatatcagattatgaccagatcaaaagatgtttttggatcatgggatgggtaaggtacaagcagattttattctaagactgaagatggataatgttatctctaacgctgtggtgagagacagattttatctcactttctgttcaacaaattttcagtaggattctgtcctaataattctaataaagccaaatgacttagattttgccaacctatggaagagaaaccaatttaatcaaaacacccaccatgcatgctgaaaaactgcaatgttcaattgaagtaatttatatgagaaggtccgcttgtgtgatttttggcccatgcggttttctaattatagttcagttatacccctaagatgtgattaatgatttctttattattcggtacaaaacattgcattaagtccaagtgttcacatcttataatgttaaacaagtttccatgcacagagtctatatcaaatctcagtgagctctaccacacgtaaaaacataagaaatagatatagtgctacaatgctacatgtcccacacatgtgctttgtggatcaatgtgaaaagtcaaatatcttgtttatgcgaaagatttcagcaaacaagtttctctttcattagagaagtattttttccctcaaacacgcaagagaattacgcgtcatttcgttaagagaggtgggggggggggcgatcccaccccaagagtcagaaaaaaacgtcattagagaagcaattgtattgaagattatatgttcaatcgataagtaacctgagcatagtccaaacaacagtaggaatgtgtgtgcatctttgctttctctcctcccttagtaaaaggatgcacatcaccagcggtggcagagacatcgttatatatgtttactccttttggttactgctatgacataaaacaacacaaggtgagaaggggcaaaaaaaaaactgagaatcagattaacaaacaaagatgactcctggatgttcatattgattgcacctccgaccacacaacccagaaaacaaaagagttcaagcaatgttcaggtcacctcatgctgtcattaatgatcctgtgaatgttgattgtcttaagctctttggatgcttatgttcataaagtgaacctaaagttactccttatttagcaatactgcacacacgaagtgattcagtgtgccaagcaaaacagtgtaaatagaaggctaaattttttagtacataggaaaacagagcggccttcatatctgtaagaaaatgactatacaagagtgtgtggcgcaaatggtatctaaagagccctatacaacaaccatcacaaaaaacaacaaaaaatccatggcacacatagatagtcagatttaacgaaatatgcatattccggaaaatgggaaaatgtttaatatggactataaaaaagagcatagcacacacatgtttatgcctctgcagtatcaaaacacagatgaaatatacatgacataaaatttcatttattgaagtcccacctaagttctgctgaacttttctgatttgtccatgtaagattatacaagtcattaatgcaccaaatatagttatgcaactaattcatttcccatgtatttccactaatcacgtacaagcttatgtgaagtaggtgctcaaaaacatatttctggcactcattctatagtctaaagaaataaaataataacaccactgcatataaatgtggataatttgtagaatatcttgacatcttgactcggttggaaagtggtcggcagtttttactttttaggataagtggaaaatggctgagggcaaaacaggtagagagaaaatagaaatgtaaacattttgcaaaaagaccccaacatgacaaatgctagagatgcgcaatctttaatagtggcgattcactactcacattgggagtgggtggcatatcctacagtgccaaactgagaggccgcaatcgttgtctcactcttctatcaggtcttgctttcagaaactactaataaattaacaacttctgttttaagtggagtagatggcgattccatgctagaataaaaaaaaaaggctatgcaaaaatgagaacaactttctctcagaaatttctaacctccttccgatgacatcttctcaccagcttctcttcttcaaaaaactggagaatgcggcgcagttgcttagaggaaatctttaatgctttagccaaatcttcctctcggacccactggcgccgcctgtggtaaaaaaaagtatcacaattgtgcattggcactacatataaatatataattagttacacacgaaagaagataataaatattgaaatgagagaaaaaatgtttcagagagagagacagaagaaagataatagatttactaagaagactaaactctttgtgatcagagttggacaattgaagcagcttctccaattgctgatttccatctctagtaaccaaaattttcttatttgcgaaagggcaggggcactgcctcatgcattgaataaaggaagaagagttatagtaagagagagtgaggagtggaagccgcctcctcacacaagcccgaaaacattacacatacactataggaaaattttattaggcttgacagaggatgtacactccggggtgcgaaagataggattaaggaggagaaaaaaaatgaatacagacgtaagggcatagtagtcaaaactgagcaagcagcattataaaaagaaaatgtgggacatcaacgagtaccatgtagcactacttatatggattaggagggaaaatgttctctcagcagttccacatggataatgagtcataagaaattatttgtttcataatgttgtatacaaactggatctagttggtgatagtggtgattaaccattatttcaagttgcatatttggaatgaagctatcaattctagatgccatagatttgataaacgacaaaccatgagcagcagttacaccaaaacagtacctaagggatcataacaaaatcgttcatcattcactctgaaaaaaatcttcaaaaactggatctacattaccaatgcttgtttgagcactgaacaggacgttgtggccaacctgctttaagaaacgaaataatcaatttaaccttgaaaaataaatcctggaccatatgccataaatttgacaatgcacaggcacaaaaagtctgcattaattatctgttactgtaaattctccttgcctaaaatcgcaagaggccaagagtgaagagcagtattcaacatgaaggtttcctcattggcgctagcaactagcatcatcaatcaatcaggtaaatgaaaccaacagaacatgtaaggaacagaaacacacgcaacagggcacattgataagcgacagcaccgaggtcaaagctttggttcaggatttaggtttgatctcactctcacctgccgagggcttcgaggacaacgacggcaagcccacagttgtcgccgcgagcggacttggggtctctggccagcgagacgtcgtcgtagaatgcgcgcgccaccatcctcaccatcctgccatgccagccaaaaatccccaaaccaaaaccaataaaattacacctcccgcagatgccaactatcatcaatgcagcatggatacacggaggggagcacagtgggaggatccgcaccggttcaagggctccatggaggccatggcggcgacggcggcgacggcgagcggcggttggggtttcgcgggttttcgccgcgatcaaggaggttttagccgctgcagcgcagggcgcaaggcttgaggacgaagaatgcagcgaccgcgccgagttggttgggttgggtttcgtttcgtttcgttctcgagtgtaccgactcgtgtgggtcggacccgagcccgacacgactcccctctcgttttaagcggtttggactcgaacccgactcgaccatttttcttcttctcaccttcttgcggtggaaggaaacacgggcgactgagcagctgagtccaacatcgccgggagagagatggcggagacatcgtcggcggcggcggcggcgcagaccgacgcggagagggaggaggcgctggaccggatgctgacgcggctggccctcgccgaagacgcgcggctcgcgccgctgctcgcccgcgtcctcccctacgccatcacctcgctcgcctccgccaccgcatccgtccgcaagctcgtaagcataccactcctctggtcctgggtcgattgaaatttgtatgtgagacatatgtgtaggtgtgtcattattctccttcggttggtttagttggtctcttggttggtgatgtttacaatgttcctgcttcaatttgatgaaattcgagcaacagtgcgtattatagtgttttagtgatttgttcatgtacacataatcttctaaacgacataattagagagactattgtgctttatgttgcaagaattacttgcatttgttactgtaacctgaacctattcagaggtagcagagtgccagtcctgttttccttcagttctttgcatgattctatagcataatttccatgtcaattagacaatggcatgtaatggaaaataataccatttttggactccattaggttatggaaattctcagccacattaacaaacgggtgaagcacaggcctgagatttcactgcccatgctggatttatggaggatttatactgaatctacttcctccacaatagtccggaatttttgcattgtttatattgagatggcatttgaacgtctgctaagtgaggtatcctattctgcttcgtttgtttctcattttctctaggctgttttaccttttctgcaaagccaacaacatgaagttaacattctgtaacaggacaagggaagcatagcacctgatcttttaatcaacatatcaaatgttacagagcagcatcagggaatcatcttgagacttgtggtgaaggtttgtcacaatttaattaagactgttgtccaccacagagtttacacaatttagtcaagtctataatgatttttgataagttactcatagcttccttttcttcctttggtgtatctgcatcctaaaaagcttgctagtttttctctgtttttttaaatcttgttgtcaggctattggtgaatgtaacacacataaggtgggtgacaatgttgcttcaaaatatcaatccataagtggatctaatgatggtctagtcttcgctgacttctgttttcacacagtactgtatcaaacaccacctcaagggtaggtttccttgctaaattaggtacaagtatgaaacttttttttatttatggagagttgactgctagtattcttcagtgttggatgcccggcaggactttcggttgctcaatcagatcgtgttactggaaagcagccactaaaaggtgacacacttacatcaagaaaggtaatacagaaatgcatgtatcatttattcatgttatgcctgtgtatgcaatcatgtcagcatatacattcgcacattttaagtccttgagtatagtaactgcaccttcttacagttgaatttcacttgtgatatcttcagctaggaatcttgaacgtcattgaagctatgcagttggcaccagagattgtttaccctctttatttagctgctgcttcagataggtacttttttggaattatgtttacaatccgctgaaatgtttgtacggatcattaatcatgaggatcactgtttcaatgaagtcaagagtcagttactaagagaggagaggagttattaaagcgcaaagcttcagctgtgaacctagaagattccaaccttatgaagaaactgttcacactattcaatggtatgcattaaggattttgtagcatgctaactcaagcaaatttatatttcaatataatactgtcactttgttcttatgtattgtcatttttgttgggtggcatatgttattctgtccttgaggtgactaaaatgcattgttgaaatccagttccttacataaagggcaaagctaaaattaaaatcatctagtataactttgcctccacttcaaattatatatagaaggctttatagttttctcgagctttattgttgcatggtcaaaagatgggtgcggatacctttgttgcccctcatcttcataaccctagcaaggtccttttggtacagcacgtgtctattccatgaacatatttcctccagcctagtcccgaagcagtaggtcattgggggtacccctccaacaagtttcatttaaaatatatcactcatgaggatttactgatcctttttacaccatcttctctcaccttgtaattataactaatgttctcactaactgttctcttccgtatttttaactgagataacaaggtcatgtcctctccttctcttgttttcatacccttcttaatacttgttcccatccaaagtaagccttacattttgtaaaggtttgtgtatgttagcaggccagcatttgcacatggcactctcctgtaccaacatgtacacaatgcttctctttattttgttttgtaaaaatctcttgcttgtttttatcagtgcaaatctgaatatttgtggtttctcatggtatatgatagatactgttctcttttgcctcaggtactgcaagtccagaaaatatagctgcagagctgaaagtcgccccagcacatagttcactgcgagtccgccttatgggtgttttctgccgatcgattgctgcagcaaacgcattcccgtacacacttcagtgcatctttggctgcatctatggtattctgtttatatatatttttactttgtgtatttattttagttttcttatttgttgtcatgaccaataaaatgaaattttaataagctgtgtattaacaaatgcactcttttactagttttgattatttacatcaccaaaccacatctttaagtagtacatagaaactgatttggtatgtttgtccttttgtacaataatctttcttttaagcatcttttagagttttatggaatggtaggagcagcagaggatgatcttctgaaaaactattaatatcaaattaacaataatgtacagcatacattacaatagaatgataaaagataaaggtgggcctagaaatttatatctggaacaagtgaaagagttaaaagatatgggctagggttcatggaggataaacaccattaggaggatagcaaggtggcagcggctccctgggatgagaagtaggcatagactgggatgcagaacattgaggacaatggattgatattttttcttgctaacagtgacatccttatatagaggtgctagagcccaaatgatagaaactaaataaaatcataccttggatatagccatctacttccatgaaatatctaacatagaaactaataatccttatccccaaatcaattgcgcagcccataacacatatatgcatgacttcctttaaagagggaaatgcaagatgaggacttcatttgctttttaagtgtctatttctatgatatggaacacattctatgatatttcttgttatgttgcattcaattcattgctaaaactactcaattgacatttcagcaaggcaataactcaacttcagcatgccatgtatcgttactaaactcatatttgtttctgctgtgtttctatgcctgaaggaaacgggactacttcaaggctgaagcagttagggatggagttcactgtctgggttttcaaacatgtaggtgcactttgtatgttttcagttcaccaacattgattagcttctagcattctttacttgtgctcttccaattttagttttttcacttggagcagttctgttcctttctgtcaaccttgtttcatggtctcaaacttttatcaattatcattgtttccttattgatttaggcagcaaatgaccagctaaagttaattggtccagtcattctcagtggaatattacgttcacttgatggttcttccactactgaagcaggttttgcacttgtcatcgactctacttgtttaggcatgcatgtgatttatcttcacatccctttgctttgaattacttgggttttaacacttctttgacttcctattttgccatgtcaaataagttgagaaacagtgaatgatttattgatttcctttatgtccagattcttccagtagggatattaaaatatttgcctaccaggcaattggtttgcttgccactcgcatgcctaatttattcaggtatgcccttttcttactcttctgctttcttgcctcgtgattcatttctgttatggagactgattttttctactttttatgaacattgcagcaacaaaactgacatggctatacgactctttactgctttaagattagaggagcaatctcttcgtttgacaattcaggaggcagctactgcccttgctacagcatacaaggtacttacttgtaggatatgctaatttcctccaaaatggtgctgtactgctgtcctgacctgttaaaaatgttggcaaagatggttgtgaaatgtgtttcgagggtgtagtgatttccctagggtgctgtacttctgtccttgacatttctcattattttgaatggtcagatatttttacgctgtagttgattaatgacttgatgcggaacaaacttactagttttgttgatgaagcacatgaatggattgtgacgccccatggtccaaacatggtacaatctatccactttgctggattaaaccacatacattgcaattctttgaagcttttgatctcgtttgctgcagttgggttaacctggaattgccttcatacaccaagttttgtatgctgcattgtcacactcacacctttcacatccaacatagactgactaacccacccccatccattcacgcacacatgcatatggacctccaagttctggcttggttagatgctaaaagatgtcttgcaaattgcaattttatattcttgctattattttactgaaagaaaatcttaacatgtgacttgaaatagttattcgttgaatgtgttcttcgttctaattataacagcatgtatctaactcatttcctgacatcaaagcgaaaagggtaatgagcgaacgttcgctataagttgatcccgcgaatcagaagggggaaattggaggacacgtattttcttcctttttcagtttcctttttccttcttttacgtgatttttctaatccgttgcaaagtctcaaccatctccttttattttctcacttcggtttattttcagatttcttttttttcgttatagtatttttatagcctttttaatggaaatttttatataaacaatttctgtgaaaactttctatatatagaatttttatatatagagactttatatatgtaaaatttatatacatatatatagactttgtatatgtaaaatttatgtagaaattacgtgtgtagttagaaagtttagtgcatataaattttactagaaataataaaatgctgacggaatttttttaaatgtataatatccgtggaaaatttctatgtacagactttctatatagagagactttatatatgtaaactttatatatatatagattttgtatatgtagatttatatatatatagattttgtatatgtaaactttatatagaaattatatctataactagaaagtttagtgcataaattttattagaaataaaaaaaaatgctgatcatcatcacatatttctcaaaaaaaatccaatccgaacaaacctcctaacagaaaaaaggataaaacgaaacattgatttttttccccatcgcgtgaaatggaaacgggaaacgttttcctccttttttgctgttttctattcgccgctagcgaatgttcgtgcattagacttacccacatcaaagttagtaccgcctggagtgtaacagatacgtgctgaggaagacccttggcaagaagtagaaatatagtgctcaccagttccatgaactgagggagggagggtgggctttgcatggtatggggtagtggtaagtaggtacatgccatgattgtctagcagttgagggaggactggaggagattaccagttcagcttgcaacagagatcaacagataagtccttgggtttggttaagagataagtttaatcaggagataatcattagttgaggtattcttcttaaattgtttgggattcttgctgtctgatctatacatgcagccactagagaatgtattcggcacagagggaagatacaagaaggcaaatgttctgttgagtgttgacatttttgggttttacatacttgtgacttgtaatatttattgctttgtcctgttactgcatcatgtcttcagtcagtgtcgttcatatgctgttatgttactccactttttctggaaatatatttgtgatttccttttttcttaccagggtgcttcggttgtaatattgaaggatattgaggcacttcttttggaaaattctcaaatggtaagttcccattcttgtcattgtagattcttaaatactcgagagcccacagctgcatcaaaattttcctatctacagttgaatttgtgggtgttacttctattattttttctcagactcatctagatatatgtgaaagcaatagtttgaaaagatggaatatttaattgtttatatgttgttgattggcctgatgagaagttctattggaatacaactatatcttcttacttttgtgatagttgaaagttgaaccctactgttcgaggaatgcaagtacttttagtcatttagattttgcatacttttgtgattttacattttttatcttattttttcttcaaggagcaaagtgaggtccgattttctgctgtaagatgggcaacaacactatacgatatgaagcactgcccaagccgatacatttgcatgcttggtgcttcagatgtaaaactggacataaggtttgttagaaaagatcttgccgagttgttgacatcttgtttcctttggtttctatttattatttttaaaaaaaatataattatatgattatgtttgtcatcagggaaatggctttaactggtctgaatctgttaaatgatgaaagggagtcatttgcaatagcaactgattccaactatcctgatattgcagacatggtaaattatgtatacagccaacagcctcagttgctacactgtgatgagcagaggaacggaaaattgcttttcccaacaaaaacatttcttgcaatgataaagtttctaatgaagtgctttcagaaaagtgatggctcggattttcttcaagaagatctatctaattgtccagtatcaaaattgtgtatcattttagaacatgccatgtcatatgaaggatctagtgaacttcatgcattggccttgaagtcattggtcgatatttcctctcgtcaaccaaaggtttctgtcctatattatctgttaaagcaaactatgctttcttcacatgtttaaacttttccttttttaattttagttggtgtcatcgcgctatgtgaaccgtttactttggctaagaactttactgggccatgttgatgctgatgctcgtgaagcaacttcacgtctgcttggtattacttcttcagccctttcaagcactgctgcactggatcttctctctgagctcacttcaacatttgatcaaaatcgcccatcaaggtatggaagagaaatttaaaacacaaatccattttctctgtactgttatgctacttctaattcacgtggatatttgatgaattgcaccagattcgaaaattaccatggattgttatgtgcaattgggtatataactgctggttgtttaaaggaatcttatgtaagtttatgcttctttcatgatactattttttttgcagtttgtttatgtcatttctttgctacatgtgctttacatgaaagtttagtgcattcgctgttcgcttgacaccattaaacctatcttgaatataatttaatggtgttatatcagaacgacttgatgggcatcccattagtaataccatccatgagaatcctttttgttattctctagtactaagaatatgaaatggactagtgtaagacggttcttgtttggagtgtcatgtgagggacagaattgcaggcagggaaagaatgagagtagtacttctctttccataagttaaatgtgttttgagattggggattctaagaaagaaagggatgaattacattataatttacctatgccatacaatgttcagttgttcacaaaactataggacaacacaagaaactatgttgatttttatttttattctttctctctgtttttttcctaatataaatctttagttaattttagggtattcccgtgctggtttcttgggcggttaatgtgccaaagtggctggggtgccccagggaagaaggcacaagggacagtctgtagctaggcagttaa

SEQ ID NO: 8262 - DNA, 23747 bp, Oryza sativa
attcctgcagcccctgtttgttagttagaccctgtttagttcccatgcaaaaacttttcaccctgccatatcgaatattgggacatatacatgaagtattaaatatagacaaaaaaaactaattacacaaatgcgtgtaaattgcgagacgaatcttttaagcctaattgctccatgatttgacaatgtggtgctacagtaaacatttgataataatggattaattaagcttaataaatttgtctcgcagtttacaagcggaatctataatttgttttgttattagactacgtttaatacttcaaatgtgtgttcgtatatccgatgttacacggcaaaaattttcacccctagatctaaacacagccttagttagattagatttcctcattaataatagtaagctactagtatagtaactagtatagtgttttactgtttgatgatcacttatttctagcagtagtgggctgagactaggggtgaaaacggtaacggtaattcctggccgaccgacattcgtttccgactttctagtggctgagccatatggaaatggcaatcgactggaaaaaaaatgaaaatggtaaaaaaatatggaaatggaaatggttttgctgttataccgattgtttccgtatttaccatattcctgtggcaattaccatttcctataatatggtgattactgtatttctaaatatatcgatatttatagggtatgtctgtacttgacccacagtttagagattgactgactcttcaatcaaattcctaacctcaatatacttatgtaaagttaaatatatgtattctatagtttaatgtttccgtatttgttatcagtttccaatatgtactgacatgtttccgtccgtattattttgtttctggctttccaatatttccgatattattttcgtttccgactttaccatttttgatttcgtttctgagaaaaatatgattatggaaatggttgaggctgtttttcgatcgtttccgatcgttttcatccctagctgagacgtactctaaacacacacagtttcggttgaaatttatggaactgctgggtttaggctgcagctggttgactttagttaacagcacacaatttgcctaaaatttaaggaattactgggttctggcagattaattagttctcttacaattgcagcagcaatggtgcctccattaagtttttttttaatttgtatgtacgtaatctgtcaatgggatgtacgatagatgaataatcttgaactacttctactttttttaaaaataaacttcaactaaatatttttaattattattattattattattattattattattattattattattattattattattattattattattactactactactactactactaccatatatatactccagtttggagtagtacatagagtaccgttgaagaagattggcaacaacggcaggtgacaattccgacttggaatggtgcagatatatacatgatgtatacatgatgaagaaatcaagtcagtgaaacctgcatgtcataatcttgagtcaatagttatgcacctgttcactaactttggatggagattcacaaatagaattcaataatttttatgatctttttatgctgtgagttcttattagttcgtgtatgcttttgtttattctagtgtgagtttttgttgaattggtgtaataattggttgtagctctttgagcaaagcccgggattatattccattatctaaaaaaaaggtggaaaagtctattcgtctcgagggaacaccctttatttttatatatcgtttacaaatcataaaaaaaataacaagatgtagatcaatatacaatatattaataaataaaatacaagctcaaatttaactagaaatagaaataataaattgattccgaataaaacatgtcattcatattgaaatttattttttaactatatatatctaattgaatttacatatttgttgagtgacatatcacatatttaataaatcttattatatttttattaaatttattaatgatattttaagatgacatacaccgacatgcacaagtaaagaaacatagcaccgatatatatatagggtttagggttagagttagaatccccttatctctaagaaggaaggcaacactatgatatgccttggtaaggaactaggcataactttgagtgatcaaagagaatcattcgaggagctaagctatgtttacattttcaaaatcaaatggaaaaacccaagtttctgaactgattgatgcaaaagggaatttgaatccatgcttttccattattcaatcacccaagataatgttcacaggttcatgtgaagcctggaataacttgtatgcatgtttcatatcaaggagatgacccatcttggtctttaaagcttttctcgaggacgagtaaaggactaaagtgtgggggagcttgttggcggtccttaactcatatttccaactgccaactctcacataaaatctgcataaacaaacaccaaactttgcaagacttacacataaataactaatgaattccacgagttttggtgattcaccattgtttgcaagacttatacataaatatggtggaattataaagaaaggcacattccgaaaagcataaatgtagaatccgtgcaaaggaacaagatgaaggcccaagtatcctacgaacatgggccaaccaccgacgtaggagaggtcctggctgacgcaacagccctccacgtgaacatggtggtgagggggagcccatagaggggcagccgcacccctggtgcgccctaccttctcagccctccttcgtgtggcagtgcattccatacatgggttttccatgtatatttctcctatataccgacctatttggactataaaagaagagtagaacatccctcatcatcatcaacatccaggaagaagagctactagatattgagcaacactccaaagggcgactgtagcgaagaagagagatgtgagatgcaaagaagagagcgactgtagctgcatgagtcttctactcggtctactatgtacaccaaagggtaaaaggagtgccgggcctgtcggctccctacaacttatacctctgagcacttgtgcttccatgggttctcctgttaagtaagtgttcgtggttcttatggtattgtgtattttgattagctaagctatgtttttgtttgtttgcaggttcatcgttcgttcttgtaacagatgttctagcgtaggactacgatcttctcggactccacgatcaacgttagaatagtaatcgatagcatagatatggtgtctaggctagaggttaccttcgttttcttcgtttccccacggtagaggggtaggcggcaagtggtgacagccctatccgtccctagcactcccccacgtacgggttggaagtagagctataagccagacatctacctagtggactaggtgctggccggtgcatgaagtaaagatctgttcttagacctctaaaaccgtaggaatccatctttgccctaacctttcctacccttgtgttatccttgcatggattagctagaagaataccttcgttccctgtggaaaatacgatactttgaatacagcttggtgaagtgctacgttggtaattccgttacgctttcagattatttctgtttgcgttaaaaaataccaacaagcaaaggttcaaccccattactgactaagtcaagcctgatgattatttagcgtcgaactcggcactaaagtggaaacacttcaccaagaatggagaatttaaaaaaaattacttggagctccttacatccttatggcaagccattgattatgcaattgaagatctatcaagcagtttaactatttggattcccagctaactggttcgataaccagttgaactggtcggatcaccagtcaggctggtctgctacaagtcagcttgctctgaaatgctcaagacggtgttgctcaatggatacaaggcgcttggggactagctgtggagggtataacccccggtacccacaacaaggcgcatgggccggcccaccaggaatggcctgacctagtacctgaagacctgtggcgcacggcagcgctcggaggcgctcggcgtgcactgcaagtctaccataaggcaattagcagatagatagggatctgatctgataagctagatatcagatcccttgattgatgcttatcattgtaaaccaactagattagatcttaaccgacttgtaaaccctatctcccggctatataaggagggcatggtaacccctcaaaacccgataactacacctcatcttgtatcaatatacaatccaccagaacacatgacgtagggtattacgtcgccttgatggcccgaacctgtctaaagctttgtcacagccagattttcgttttaggatttataaattatctaataaattattaatagaatttatattaaatgttcattaatttacaagtgaagttaaatgtgggaaataaaatttcctaaatttaaagcatggatggatttaatttttattaaattctccatgattaattatactctctgaaattttctcggattttttttcagagctcaattcctaaatgatacaaagaacagttcagtaattatttaatcattaatgatctaattataattatgttaagtgttttttttgtttaaaaatccttaatttataaattgttgtctaaaagggaattattagaaatgatcttaaaagcctagaagagaagatctaattttaatttgttaaatctcaatataaaattgggctagataaaattttgttaaatacttctcttgattctttagttcctagatttttctaggacttatttgagccaaggaagtatttttaataaatggaattgcatttcatgaataatttaaatagaaaaatgtttttaaatcctccttttggctttgggccgaaagtcggcccaaaaccgctctctctctccctcggcccaagtcggcccaagccgagccgcccgtgcgcgcgcgtgcgaccgccgctgacaggtgggtcctacccgtcagtcgtcatcttcctctcgccgaaaccctagccaagctgcgctgccgccaccctcgccttagtctctcgtcgccagtagagctctagcgccgtgccgcctcgcgccgccgtcgccgccgccgctcctaccgtgcgctgccgtcgctccagtcgtcgtcgtcgctcggggatgtcatagccgtggtcgccgtcgcgtcgccgtcctcatccgccctttcgccgtccctgtcagccgccggagcaccgtcgccgctgttgatccgaccgttgccgccgctcttcctcgtcgccgtcgtcgtccgttgatcttccgccgtcgttttggtcaccaatgagttcgccgtgctgtccgctacgtgtaggtgtcctccgtttgggccgccgcgccgttgttcgctggcgagcacgcgaggccgagccgtcaccggtgatgacgtcatcgccaacgtcatcgttgccgtctgccgtggtccggtcgtggaccgatggatcttggccgtccgttttggatggatgaatctcggccgttcgttttcgtgaaccgtcgccatgcacccggtcctccgcgaaccctagccgatgacgcaataattcccttttccttttcaaaaataattcattattgcgtcataattcaattaaaatccatataaatgctttaatccggtttaatctttaaaaattcataactaattcattgtaactcagtttaatgtggttcaagttgcaaaagttgtataaaataaagatctacatattaaaattatccataaattgaattaaatttatttaatcctttttaaatgggctttaattagatttaatcttgtaaaattcgtaataaattcatatgaagtcagaatgaggccgttcaagtctcaaaattcatctaaaattatgatctacatgtttgtttactttttatgtattgtttatttggagtttcttagtctttttcctcgttttgtgtgttagcttgtcgtttccgtcgtttcgaaagttcgcgagtgcgccggaagtgttcaagaagattaattgaagaccctttattgcaaggcaagtcacacagatcccaaacacaattcctttgagcatgttgatcctatatttaaattctctatttatttcaactgtgcatttatttttgaatgtcaccgggtggtgtgaacctattcctttgttatggctagtttgcattgattaccctatttcttgattacctcgggttataatttgactggttggatttatatattggttcaactagatgttagacataattgcttagccatgcttagaaacattagcacacaattgggataactaatgtttcactattacttaatgatggatatttaatgatagctcacgatggtcaatcgtgattggttaattaattaatgtgccaactaaaacttgataatggtgggttgtgagcacatggttttgatggtcgtgctcatgacaattaaggaccggttcacgattttcggttgtgaaacattaaccgtgccaaccacaagccagaatgggcaacggctggacacttcgtataacaaggctcattgcggagcaccagactgagaagtggcggagataagcccacgggggtcgctggggagtccatgccttgtttataagggggtgactatgatccgggaacggtgcactgctttgagttgagttatgcgaggggtcttgtcacaatcactcaacatggtgacgtgtctgcgcggacacggtaacatgctggtgggttgtgtcttgtgggtacagtggtacacctctggccagagtaaaactattcgaatagccgtgcccgcggttatgggcgggtctaacaatgtctttcgtgattagtctcacacttctcaccataataaatgatgctataactggtaataatttgattagctcctggtttggaatggtatattcctggtttggagatagatctgtgcagccgggtatggttgttcagaatggttgggcctgtgtagcatgggtgtgctgttcagtgttgattaatattgatgattaattactctattgttttacaaattctcaaatgtttgctaaatgctgtttttgcaaatgagccctatattatgccatcctttggtatccttgtgcacttgcatatttgttgtgtggcttgctgagtatgtcatatgctcaccttgcaataatcaatcaaaccttagttgaagacaagttgcgaaggagaagacgtttggcttataccccagttgagctgcctgtgggagtggagccggagcttcgctagattttattttccgctgcagttttcttcatggtgaggactaagtgcctcttaagtaagtatttatcgttttagttaatttgatgaatctgtatattaaattgtcagtttgtgtacctcggctgattcctggacgaggattttatgcacaaataagttcagaaattactagtgaatttctgggcgtgacaagcttcatgtccctgctcttcgtgttcatcatctggttctgatcatgcacgtccctccacgtagttaatctaccatcgtggttatccccctcagtggactgccgaccatatttagtcaaagtgaactataggagcctttgagcaagtttaattgcatagccaactactaaatgcaaatcatctatagccaatctaatagctcattcatacaatagttatccataaaccattaatacatggtcccacctctcatacacacataacgtattggagtttgtgctacagctggctacgaatctgtagcccgctttccttctctctcttctctcctccacatatgcttacaattgacttgtagcctgctattgtactcactcttatagattactgtaacctgcccttaacaactaattaaggtggaattaaaattccacggtctcataacacagtaacacatgagccaaattcaaataggctgactgtcacctaatttaaggtgactaaataaaagggctaccatgccaaaaacaaaattatagttcttggacatgcaaagctgccgagcttgtcaacatcgattctttggcctgatctgttgtagtatgttgttgctctctggggtagatatgtgtagatttctcaatatcgtcatcagtgacatcatcagtctcattaccctctttgctcttaccccacagcatggtgtaaagacttgcgaccagcaaaattccacccaagatgctgccaataaaggaagagaagaaaaggaaagtttgtttatttcagcgtgtttttagaatattgcacctttgatcagctgacagtgagtatatatatatatatatatatatatatatatatatatatatatatatatatatatatatatatgatttaatttacttgccgaggtgaacaatctctccaagaaagaaggatgagcaaaatattgtgaacacgaagcagagtggcgtccaggaggcgaagaacatggggcctctcatctctaggcaccacgtttgcaggtagtaggacactcccgtcaccataacaccctgaagcaaaccaccagtcgtctaatagtcagatgcgtgtgccgaagaacatgccaatagtgaatacactagtggaagaggatgattgaaaattttatgtgcacaacttaccgagtataggatggcgagcaagctaatgtcgaatcttagcttccatctggagaagtcgcgctctgcgaccaccgcgacgacaaacgactgcatcgtgctgaacaggcaccgagtcacagtcacaaccattttatctggatattccttttgcaccgcagcctacacagtcaatagacaaggagtagagaccccgataaatgtgtcagcaattgcagctgtggatcgatgtagacaagcatgcaagaacagctcagaattttttttggtaaataattaaatatgcatgcatccgaacttgaaaaatgatccacaaagactagcacatgttggcgaccaccataaggaatgtccatttgatccacacacccctcggaactactgttttcgagcttgtgtcagaggcgaaggcacggtgatggttgatagggcttatggatgggccggtgaagaagacgatggtgaagactccagctaggcagagtgctacacttgtgaccttggctatgcctgaagagctcctcagcttcacatactccgtcctgtcctggcaagcaacattccaatcttggtattatctactactccatccattcaaattataaggcggtttggttttttatgatacattacttttattatgtgtgttgatatggtgtatatctaaatatctatatcaaaatttatgtgttcagaaaagtcaaacatcttataattaatattttcacaactaacttgaatctatttatgatacattctcaagttaggctttagtgatatcgatgatgataaacctcaaaagcaccgccaagaagaaggtgatggctgggagtgagctgtctactgcagatgccactgttgcagaggtgaacttgagacttacatggtacagatttaccccaagcgtaatcctgaaaagcaatttccacaagtaaactagggactaattaaactcttaacatggcatgagtatacaatcgattgttttgttttgttttgttttgttttgtaccaataaattagagtttgcaaagatgagcgtatacccgattaaggcacagaagaagagctttatgagcaccccaagtgtcatggcaggccgtgcacttctcctacaaatataatcaaacggacctgtatttctcagctaatcaaacaatatagcaaactaagcgaagtagcaatataacaatataggaaaatgattctatactctcaggagtacgtactccagctttcatagattactatcggatctacactttatacccgttttgtgttttattttttaaaaaataatacataattttccctcattaatcggatcagcaaacggcccaaataaatcccagaagacggcagatcgctctccccagtccccaaccaattcggcattcgcgagcgacggcaagccgacgccagcagcgtgaagtataagcggcaacggtgcaaaatcattcatccagaccttggcgtgttctgcacctcgcatgcactgttttcttttctatcctattttctttgccttctcttgccgatcgagcatatccttattttttcctgttggatctataagggaagagcacatatgttggatgcatagatgtccagtgattttggtggtttgggaattgtgatgtatctttttttcacggtaattcaatttattctttaattagttacttgactgattaaccccctataattgggcatgcagacggctgtcggccggcggcagttctgttatttttttttaatcggaactaaaaataaactttaatctgataaaaagttttaaatctttagtcccggtttataagagaaccgagactattgtaaaatttgacggaccgatcaaagatcgtttctctagtagtggctctcaacccagcggccagtggcactactatctgctgaatgtattgcatgttttgatcggcgaaaagatgtactgatactctccattcagaatttagtttgctgctacagcatcaaatatatattttctagtgattttgtttgtgaatttgtcagtggcagatacttctcatggtgatactcatgtcctaatgtattatgattttttctgagatctagtgtgttctgtgattcatatctaagcaaccccataccaattaatatctttaaaaatagcatatactatatttatactaactaaaaatagataaaaattagtacataccgcaactaacctaaaatgtggagtagtatatactgctactttataaaagcatatactgctattaacttaaaaattagtatataatgctacaaagttaaaagcagtacataccactactactattgtaaaaatatgacatataatgctactggtagaattcagtatatactactactactactaagttaaaaattaaacagtatgtaccactactactctataaaatagtatatactgctagtaactaaataaacagtatatactgcatgctactaacatttaaaaaaaagtatatactgctactaagttaaaaatagtatatatatacctactacattacaaaatagtatatactactattaacttaagaaaaggtatatactgtactaactcttcaaaggagaagaattcagtacatactctttcggagaagtaatcagcataactgattaagaaaaaagtatatgctgctctaattaagtaaaacgagtacaatttatgctgctactacttaaaaaaaaggtatatacttaaaatatttataaccctttttttaatcagtttgaatggtagaagatccatctgtttagaggatggtacgttcattattcaaatttaaactaacagcacactccctacgttcaattgtgcaccaaatgcggtctgtacctgtgcatgcatgcaccatgcagcgattagagaaaaacaatattttcattctcttcccaccagtttaattagatgctaatggttatccactaaggggagagagtatgtactcccgggagtacataacaatgatcctataaattaaaatggttctatactaccgtccatagaaggcagccccgatgaagagcgctattggattcacatgtggacccgttttgatttctattcgagaaaaaaaaaatccgtagtacgacataactatcccacattaatcggtataccggagtgttcctgacgcataaatacctctctctcaaaccatcctattggtaaatcgggtcctcggtgagagcacgatctaccggcggtgatccggacggatcaatggcaccggccgattttacggcgacatcggtgtccatccgatactaggttttccttttttttttaatttcacgatcttgtttgatttgatttcagatgcatcaagcaagagagagagatgggttgttacatacctttgtagaagagctgcagggagcaagatgagggagccaactgcctggcgatagaagacgaagatgtagatgttcatcccgtggttgaaagcagccttggatatcacaaacatgccagtgtagatcagttggacgacgatggcgacaaaataaggcttcatacttgctttcaccatcttgatcgatctagcaatggcaggcgtgcgtggtgtttgtgcgagtgcgttgtcttcagtgtgcagagtgtgtgttgtctacagtgtacgagagcgcccgtttagtttctctccatcaacctggcactatttctatatatttatataaaaaagaagcagtcagtatgccaagtgtaaacgcaagagcacggtaggtactgtagctttgattttgggtaactgatcaacacgccagatccacacaatctgctatttttagtctccacagataggagacccacttcgagtgtacattggcggattcggcggcggccagctcgagaggaccgacgctccgtggctgaccgtgccatgcagatgcctgttcgtaactaaccgagtggtggcctgcgttttctcctctcccgtaactaacagagtggtggcatgcatttttttcttctcccataactaactaggttagtttagaataataacgataattaagaaaatattcttttttagattttgcttactaacagattgaaaagaaatctatatatgaaataaactttcaagtaaaatttaaaactttctatcgaaaaattaagggatttgctagatgtctattagattaatgggtaggccaaattaaatcccaataataccatattggaaatttagtgctatgggtaataataccatattgaaaatttaagtgaagagatcttaatttaaatatggagctagtggagaatctctgttcaccggttgagatggtggatggacagccacactcgtgcacagagctgtgtattaactcgggttaatcgcacggattgaattctccgaatgtaactctcacatgtgctacaaatcctctgcgattaatcgcgtggatgctctccctctcttgttctgtatcggaagatgattaattctggtgtattaactcgggttaatcgcgcggattgaattctccgaacataactctcgcatgcgctacaaatcttccgcgattaatcgcattaacccgggttaatcgtgcagattgaattctccgaatgtaactctcgcatgcgctacaaatcctccgctaacggggttaatcgcgcgaattgaattctccgaacgtaattctcgcatgaggtacaaatcctccatgattaatcgcattatattctagtgtattaacttgggttaatcgtgtggattgaattctccgaacgtaactctcgcatgcgctacaaatcctccgcgattaatcgcattaactcgggttaatcgtgcggattgaattctccgaaagtaactctcgcatgctctacaaatcctccgctaacggggttaattgcgcggattgaattctccaaacgtaactctcgcatgcgctacaaatcctccgcgattaatcgcattaactcgggttaatcgtgcggattgaattctccgaatttaactctcgcatgcgctacaaatcctttgctaacgggatgaacagacacaacgctcgcacttatgttcttcctctctcgcactttctttccggctgttctcctatttcggaactccgtctgcttacgtacttgcacgggtaggcaggcaatcaagtctttggggagcgtctcggtgcaactgctcatgttctgcttcgacttcttcctctacatcgcgatggcttccactggaaatggcgcaccaggagctggagggaacggcgatgctccaggagacaacactaacggaggcaatacaaatgactcaacctccttgcaccgttttctgggtatatggttctatctctaattgatgttcttcatgttacttatatattaatcatgctatccttaggattgcaatcctaggtgaatgttgatgatgcttatgcttatgttatgaaaaacatgcccatatttctatttagtcacaccactagattattactattgtgaatgttatgtttattattgtgttattttagattaaaatataccgaattatgatcaaatttacaaaatgccagcctgagggatcgacatctcagcgagcgagattggtgaattgaaaagtggggacgaagctgatcatggacgtcggcggcaggtagaggcgccgctgctggagaagaagggcagcaccggcatcggcgatgggtactgcactgagaggtgcccgggtgcggcgtcgatcggcgtaaggccgcgagctccggcatcccctacaggagcttcctctttgtctggatcatcacgctctgcacaggtaaccaccacttcattcttctctcttccactcacccacatgcatcatcaatcgcgcgcatctgcacctgattcgcttccccctcctcttaattgatgtccacatttttatcgagttatatcatgagtttgtgtttaatttctcctatatatgttctccattgatcatgccaccttggagtgctatatagaagtatatacatactgatgcagccccttcaattaatcaaaatctttaaattaacaattactactaattttatgaattgctttgagattcgtgcacctcaaccaactattgaatttgggcatgacactaagggcttttttggagagattctgaatagcttctctcataatcagaagctctccaaacaatttagcttttcattgatattctaataagttgtagttgtataatcttaggcaataaaatagaagtcagaagctagaaaatctaacttttttatattctaaaaagactcttcaaatttaatctctggccagatctaggagcggagggagagaaggggagccgccgccgtcgccccgtccatgcggccgccgtcgcaccccctcctctggccagatctaggagtggggaaggagaggggggagccgccaccgcgtccgcgccgccgccgtcgctcccctcctccggttggattgggagggagggaggggaggggaggagagtgacgggccggtgagagagagagagagagagagttgagagggaaatgagtggtggccggtggggaggggtggaggagaagataaggaagacttaaagatatttttttgggtaggtatgatttttgcaggcggaccacataaggttccacctgcgaaaatcaatttttccaagcggaccacttaagaggtccgcctgcgaaaataaagttatttttcgcaggcagacctccacctggaggattttcgcaggcggatgacgaaaatccaccccgttttatattttcgtaggcggatcatatttggttccgagggtcatacccgctttgaaaaataaaaggccaatttcactaaaaatccttttttaagtagtggtggctattgattaattgtagcttaatcaaatacgtgaaatttctatatgttacactaaaccatgattgcaaaagatggctaaagaaatgttagtatacatgagaacattcttcaattgatcagcatacaaagtgatctactgctaactgacgaaaacgagacaacatctaattaagccactaattaaacattattacttttgaccaaggtaaaataatgagtatagtactggtttcgtttacacaaagatcgagggttgcactctacgcgtacctgtttgttaagtagttaatcatgagtgatggagaagccgggagttaatcatatttgccacacaaaatcaatatgcaattattgaattcgtacggacaagctgacgatgtagactgataaataaaatcctgtatgcatgcatgcatgcgccattttgtactccagtaatcttttgtttggcatgcatgtcagcatgtgtgcgtggttcaggcaatgtgatatatagtgaattgattggcaatgtgagagtgagttgattgaagtagcaacaacctgtcgggcctagcggccggccagcctgactgactgacgtaggagctgacgatgccattgcacattgttggtgctactgatgctcaattagattagatatcctcattaataataagctattagtagtgttttactgtttgatgataacttatttctagccgtactgggctaaaatgtatagtaatactgaaattaaggaactgctggattcaagcagcagctggttgactttggttaccagcacacaattaacctaaaatttaattaactgttggttctggccgattaattagttatcttacggttgcagcagcaatggtgttaccattaatttttttaatttctacgtaatctatcggtgggatgtacgatggattaataaacttcaactaccttttaaaaaaaaaacttcaactaaataattgttattactgtcatgtactctgacttatttttcgaggggacaggcagggagttcctacaatttaatccagtttataaggaaaaccggaccaaaaaattttacaacagcacggttaatttatgaaaaactggcgaaaaccccggcattgacatactgaacctaaaaactaagaacagcagtccgacaagggataaaactcctaaaatgaatccttcaagaaggatacgccgacagaacaacgacatcgtccgatcctaacgaatctaaggttttcatccggagaaatctcttgaagtggggtttgaaccagggctccaatagcaacgccttcaagaaggtaaacggcacccaagggtgtcgccgttgctagcatcggcaagttgagcaaggctttcgcctcggagtcccatccaaacatagcatccgcgacggaagccaccaaataccacctgcacaccgggtactgtttaagaagattgacagcaactgcagcaggtggcaattccaacttggattggtgcagctatacatgatgtaacatgggaaagtttattcgtcgctcgaggaaacactcctttaattttttatactatttgaaaaatcataaaaatattaataaaaagtatatcaataatacaatatattgataaataaaatacaagctcaaatttaactagaaatgaaaataataaattaactcagaataaaacatgtcattcatagttaaatttattttttaagttatatatattaaattgaatttacatatttgtcgagtgacacccccacatatttaatttattttattatcttttttattaaatttattaataattttttaagatgacataaaccgacatacacaagtaaagaaacatagcctccaacaacaaaagtccatcatataatcatatactatttggacaacggaaagcctgtttcgacttgtcttctcccctccggcttttctgttccatgcgttttctgctctgcaactgcaagcaagtccctctgctagctgcgagcctcacgtgcccattcactctctttatttattgctgattcccgatcgatcgatcgatcgatcgatcagcaggcaatagttaatcgatctcaacaactacccatcagttattcaatacaatacagccattcagacagaagcaaggtctatcgagtcagagagatcgacatctcggcgagcgagatcggtgaattgatgggtgatcatggacgccggcggcaggcggcggcgccgctgctggagaagaagggcagcaccggcaccggcgtggacgatgggtactgcattgaggggtgccccgggtgcgtcgtcgaccggcggaaggccgcgagctacggcatcccctacgggagcttcctctttgtctggattgtcacgctctgcacaggtaatagcctcccttcatttattctctcttccacccacacccacatgcatcatcaatcgcgctctcatcgatctgcagctgcagctgattccgttcctctctttctcatttgatctccatattttagcgagttttatcatgatgagtctgcttaattagtttctcctatatatatatatatatatatatatatatattctccattgatcatgcagccacattggagagctatatatatacatacagtcccttcaattaatcaaaatcatcaaattaataattactaattttatgatttgttttaagatttgtgcacctcatacaaccgttcaattttagcaatggcttattcgaggggtttctgaatagctgtagcttcttatgataatcagaagctcttcaagcgatttaacttttcgttcgtactctaataagttatagttgttgaattaacaaaataaaatagaagtagaaagctagaaaaccaattttttagctctaagaaataactaccaaggctgtgtgtttagttaccttcatacttttaacttttctatcaaatcaaatatttgaacacatgcatggagcattaaatatggaagaaaaaaaccaattgtacagtttgcatgtaaattgtgagacgaatattttgagcctaattacgccatgatttaacaatttgatgctatagtaaacatttgctaataatatattaattaggcttaatagatttgtctcgcagtttataggcggaatctgtaatttgttttgttattagtgtatacttaaaaaaattttggacggggaactaaacgcagcccaaattagctgattattactactccgtcccataatataacaactttttgttgtctagatttatagctaaaaatgcttatattttgggacggagggatacaattttaagcttttttttttacagtccatagattagatttctagaggttgaaacttgaaaccgccaatggcagggtgcgtgtgcatgtgtagcagacggtcgcacactcgcacatgacctgacctgctgagattaaattcgtgagcttaatggttcattcattgcttttgtactacctatattctcgtttcttgattagcacaagccaaccattgctccatgcatgattagcgcttactcagacttcacttcatccacgttaccttctgtaaatttgttttttactttattaacctggccgtatggtttttcataatgtctcccatattttgaaagaaaaacaagatagcggctcatacgatatttcaatttgtattatactcgtataagtagctaacggtaatagagacagtagcggtggagttcacgcggccgcccaacccgttcgggaagtgcctccgccgttggctgcatgtgtgcaacaataaaatgagttgtttaataaacttgctatattaagggaattgtatactagtttatataaccggctcatgatcgaattgagaacaaaagcatatccagtggagttaaaatttttaagtagaccatcaagttttaagtgaagtctacgtaagatgatatctctactacttaaaaagcgaaccggttcgtttgcactcttttcgtacgtccttacatgtgtgtataagcactatctctttaagaaaaacccactaacatgtgatttctcactgcccacaccctaaagcctgttcgcccataatttcaatcatgttctatgataaaggtgcacttttcgatcggttaaacaccatgacttttacaaaagtctcctatatagaaattccatgatatactttctataatctgttttatcactttttaacatctaattattggtttgtgcccttaaataattattttcacttttcgtggtataatgtgagtttatagcattgcatgctaattccaaatatgcatggagctatatgtgacgtggagctccaaccacccaagtcggatagagtttttgtcgctttgtccaactgttggtggctcatgtgaactttggcgtgtatcacgtactccctccgtattttaatgtatgacgtcattgactttttaaccaacgtttgatcactcgttttattcaaattttgtttgaaaatatgaaaatatttatgtcatgcttaaagaataattgttgatgaatcaagtcacaataaaataaataataattacgtatttttttaaataagacgaatgatcaaacgttcgataaaaagtcaacagtgttatacattaaaatatggagatggtacaatatacgaacccatatgtacatgcatgtgttaagttcgctttcatcaaatatttactattgctcgatctctgaatattctgagtcttgaaatccacagaaaatatttgaagatgattgtgacggtactgtttgtacatgtctgggagacgtaaggatctgaatgtgttcgtgaaaaagttgaaggaaaaaaattcaagtctaaaaaatatgttcaaaattcgaacatacaataggaacatacacagatttgagtatagtgtacatatataggcataagtagtacaaattgaaacacgaaaaatgccaagtccaaaaaaaatattaaatttgaatatttagaaagtttcagaacgagtatgaagttcggaatatgaaaaatgcacaaattccacatcaagccagtgtgaggttgcaaatcttttgttttcttctcatgctgatgtgctgatggaacataataaatgagttgcaaatctgttgttctcttgtgctgatgtgctagtaatcctaatactagtattaataaatgacttccacttccacccacctccatggagctaaacatattcttgtgtgtggcaatgcgcgccgtggaattttagcgacgaccacggcttcgttttggcttcctcttccacctcttcttgttgctggctttccttgttgggttggccattggccctctccttgtttgcctcctcctctcctctcaatctcaggccctccctccctcgccgccgagcttctcctcttttgccgattgatagccgagggtgagggtgagcctccctgtttgttctgggggggtcgcattgcccttgccgggcgggagaggaggggatggaagaggaggtgccgttgctcaagggggactaccaccaaggttgccccggctgtgcctacgatcgcaagaaggaggtctacaggggattgccttacaaggaattcctctatctctggatgatctgcctcaccgccggtatgtatggaacattccccccctttttgcaacctgtgacattcagggtgtgtttggatccttggctaaagattttctaaccagtcttggtttttggtacaagtaaaatatcctagctttcaggagcaagctagccttgatgggctagaaaaaccttgctcagcaggacagccgaattggctctctctctctctctctctctctctctctctctctctctctctcaacagcaacaagcgcatgcgtgaggggaaaaaaaaatctggcaactgtttctcattgtggggtaaaagcaaggaaaccaaatgtggtgcttgggcaagagcagcatagctgaaatgagctagtttgcacatttcagctatagctcaacctagctgaacatccaaacgtaccctcattatgcagaaagttcttgtttttttttttaactcatggttttctaggatttttctttttctagtgtagtacgaatgagttgactgaatatcgccaacaaagagaatcttggtaccacgtaggaacatgacagcatgtcaacattggggatcttggtacctgtaggaacatgtcttctttcttgcaaatgctacatgttactgcaatgtccatgtgcagttccatatgggtttggtcggtgttcagtcatgtcaatgattcctgttcctgtggggaaatcgctgattctctataatagtagattaacaggaccaagttagttaagccaattgcctcaacaagatttctataatagggggatgttgacatgttgttgctgtttttactacgcacttctccatatttgctttcagtgctgcttacaaccgttaattacaatgtgctgtgatgctccgactcatactacacacgacgaccgtttacaccggtcattacgttgtccatggtgttacagttgcaaactagtaatgccacgtcctggttcatgtgatgtgggttagctggggggtctattatgttaactagaaaatttattgtttgagggagatcactgtgcgaacaatattagatacgcaattaattcctgttatgtcatagtgccagtcatccaaaccttattgggcacataattaattcctgtaatctttcattgcaccaatagcaacttcattgataggatctccaatgatgggactgtaggtgatgctgattcagaccttgtagatctttaggttcttcgttgtgtttgtgatcttttttacctacctcggttgctgaaattttcacaacactacatggcatctatgtcaacagtcagcagaagcatacactgaaatgtcctactccgtgttagatacatagcattcagtctgcaatgcaatattgatatgcgaaaatgccttttaactgattttccttaatgatgtaatgttttttaacagatttttttatactgctccaaatcgtgataaaggtcatttatgtaaactgtaaacttggaactgatgcatgacttgtttcccacgtgtcctatataagcatatgtaattgtgcatatttttaggggtgaagttccatgtgctgttctggtgttctgcatgagctccttcatcatggttgcattgaacagtagtctttctcttttacaatagtggaacatgaaattaatttgtctacttgaacactgtgtcctatctgatgttgaggatactgagtgctatcttgtttccttgagagtattgcttaaaaaaatgtgagtggaacagtcaaaatctgagaagcatctagcacttcaaattttcttcatttcaagtgcaactagctctatatctagccataataccttcttttattatccctgttctcaccagcatcatgtagttgtttttagagaagttctcaagtagtcccctgatatcatcatctaagtaataatataataaatattgttatcaccatttgtatctacaaaagttttaaatgtatttatcgtaaccacatatcccatctattcttttttttacataaattttcagtgcatactcaagatttctaattctgtccctgtccttttcagctttaccaatatcatcattgttccccttcttgtacttcatggtatgtctattttcatgtcttcttttgatgactaaaactagattttttttttcttgtgggtagtttatctccttttttgacgactatctctactctagcaattaagtcttcaagacgtgtcttattacacagataagagacttgcatgttgcaaaaaggacagaagatattgggttctatgccggctttgtgggtaaatttctcatgaattgcttgttcaaatttaagattaactctggctctcaccttgactgattccttatttacttaccttataggtgcttcgtttatgttcggtcgatgtttgacttcaactgtttggggaatagcagcagatcgtattgggaggaaaccagttgttgtgtttggcatttttgcggtgttagtgatatttttcctcctctatatgaaataatagttgatatctgg

SEQ ID NO: 8263 - DNA, 765 bp, Oryza sativa
caagaaattgtcttggtcaatttttttattttaagacaactgaagggtgctgatcatgttaacaagccaaaatttgtgaagttacttaagatttaacgattgtctgtttttgtaggtattggtgtcttaaagaagcatttgtcaaagctacaggtgctggcgttggatttgggttgcaacgtttggaattccaccatatgaattggactaatatttctctccgtattgatggagaagaggataggaaatggaggttttggcttttcaagattgatgaaaagcatttggtatgtctgaattttttcacaacatctacagtgcctaaactttggctcttgtacttctagttttggtcttgtgataggttatttgcttacgattatcaacaccattgcaggcatccattgcgaaagggcatccagaggatgctattgacagcttcaggagaacattatctgatgtggttattcaggagggagaattgcatacggcaatagaaattccagaagaagctttcactctattgacagtggaacaacttatacagttacatgattaaatggtcttcttgaattttgcggtgacatattaatgcaggactaaaatcaacaaattgtgagtgtatcctgaaagttaaaatatatacatagcacaccaaaattaggaaaagtatccttgtatttgctctcggtgcttctgcagaaatgagagcttaggggttagggcctgtttttttttttcataacagagaagacacttgatatt

SEQ ID NO: 8264 - DNA, 4907 bp, Oryza sativa
cgcgattgaatgcttgaatcccactcgtacccggcgcatcttctccccggaccagtgctccggcatcaaccgcttcgtcgcgctcttcgccgtcccgctcctctccttccacttcatctccaccaacaaccccttcgccatgaacctccgcttcctcgccgccgacacgctccagaagctcatcgtcctcgccctcctcgccctctggtgccgcctctccgcgcgcgggtcactcgactggctcatcaccctcttctccctctccaccctccccaacaccctcgtcatgggcatcccgctgctcaaggggatgtacgccgccgccgccgacgtcgactccggcagcctcatggtgcagatcgtcgtgctccagtgcatcatctggtacacgctcatgctgttcctcttcgagtaccgcggcgcgcggcttcttgtcatggagcagttcccggacaccgccgcctccatcgtctccttccgggtggattccgacgtcgtctcgctcgccggcggcggtggtggagccgcggagctgcaggcggaggcggaggtcggggacgatggcaggatgcgggtcaccgtgcgcaagtcgacgagctcgcgctccgaggcggcgtgctcgcacgggacgcagtcacactcgcagtccatgcaggcgcgcgtctccaacctctccggcgtcgagatttactcgctgcagtcgtcgcggaacccgacgccgcgtggctccagcttcaaccacgccgagttcttcaacatcgtcggcaacggcaagcagggcgacgaggagaagggcgccgccggtggcgggggccactcgccgcagccggtggtggggaagaggaaggacctgcacatgttcgtgtggagctcaagcgcctcgccggtgtcggagcgcgccgccgcagcagcagctggcgcggtgcacgtcttcggcggtggtggcgccgaccacggcgacgccaaaggtgacgacacctttttggatcatcttttcgtgcactttgacttccctttttgtttgcccgcgtgtattacactgttgtttgcttctgcgcaattaatcactcttgtcttgtgctcttgaccatccgatcagtagaatcaacggtccagatcacactagtctgctcgttgtttggagaactcgacagcgcatacatatttaatactacattcttgaagtgatttttttttcacaaacttactttcttgaattgttacttttctgatcttaacagtgacattgactgttaactgctaagtatagatggatatgcagagttgaattgtactgttaagacaaaatcttaacagtaaactactgatttgacaaaagagaatgttctttgatggatgcacaggagctcaggcctatgatgagtacagtttcgggaacaagaacgagaaggacgggccgacgctgtccaagctggggtccaactcgacggcgcagctccggccaaaggacgacggcgaggggatggcggcggcgatgccgccggcgagcgtgatgacgaggctcatcctgatcatggtttggaggaagctgatcaggaaccccaacacttactccagcctccttggtgtcatctggtccctcgtctcctacaggttaattaagcaaacattttactcacaattttcacattgacatgttcatcattagccatctctgtttgctgcatgtttgttgatcttgtgaacaatgtgatgtaattcaggtgggggattgagatgccagccatcatcgcccggtcgatttcgatcctgtcagatgcagggcttggaatggccatgttcagcctaggtttgtttgttcatctctgatacatatgataaattgctgtaattttacatgcgttccatgtaggactgcaaataactgaattgtgttttggtttttgcaggattgttcatggcattgcagccacggatcattgcctgtgggaactcccttgcttcgtatgccatggccgtcaggttcctcgtgggtccggccgtcatggctgccgcctccatcgccgtcggacttcgcggggtgcttctgcacattgccattgttcaggtaagctgcaagttcaggcttctgcaccaaaatgcatccttaactgcaaaagaatctatcgtaactcaacaattgtcattgaattctcaggccgctcttcctcaaggaatcgtgccctttgtgtttgccaaggagtacaatgttcatcctaacattctgagcacagcgtatgatctctttaccatcttttctttttcagtattggaaaaatgtccccattttgaggtttcttttcttttatacccagaaatctctcgccctgtttcccggttcccttttccattgtatcacatatgccatgcactgaattttctgaaaaggggcgcatcttgcagcttttgatgattcctaatcatattgttttagactaagaaagccattttactcatgatttatcatccacaaaggcagagtccataacactaccattaaccataattgtatgctcatgattttgtatctgacatgaccatgaactcttgttctgcagcgtgatattcgggatgctgattgctctccccatcacattggtctactacatactgctggggctctgaagagctctccaagtctcaactcaactgtgcaagaacttgatgttactgacagtttgattaggatttatggttctgttttagttgctcagattttgtttggatgataggtcagcttagtgatgctagttagacaattatccgaggacttttgggttcaagtgacggccagccacggtttctgattgaagattaggaacatagacatcacattagtgacaacaggcatctaatttgtaagacattgagaaggtctgtttcaaattactgacaatgtagtaagacattgaacagtgcttataagcttatttagcattccaataactgatggtaatgcacttaaaggagctactctgaaggacttttttaatctcttgagagattagctccggattttttccttttggaatgtttctttagtttgagggctctgaaaacacgaaaatagaaaaatcgtaggaacatgatgtcatgctataacaaatattataggaaataaatttattaatttataggattttgcaaaaaagtattgtttattagtagcaccatcggaaaatcaaaggaactttaaggctgcgttctttttagtttttagaaacggctaattagccgcactaaaacttttgaaacggctaattaactacacgtaaaacgataagtgtgattagtatatgattaattaagtactaatatgtaaaagaattgatgaatatatttattagattttttaaacaactttatataaaaaatttttacgtaaaatgcaccgtttaacagtttgaaaaacgtgctaatgaaaatcgaggagtagcatgaggtctagtctcatgttttctttcaaaattcctacacaatgagcaataggaattttaaaggattttggggaagtcatttctatgttccaaaagatcatgttgggaaattttccaatggattttaagggttgtttggttccggttacacttttcatcacttgccaacaaaagttgttacactttgtttaaggtgaggtgaataaattcttagtcataacttactaagcctaagcctaaggaaactttaccatatttttttaagttattgacacgtgagacccaatttgttagaagagaattttattaactatggttaaacacttaccaaattgattaactaatcttaaatatggtaaactgtggtaaagtgtagtttccaaccaaacatcctctaatcttttaaattcctctttttttttctttttatccacttttcctttgtttaaaagaagcggaaagatggaatctttttgccacttttttcaagtttcaatgaagaaaaacatgcgtagcattttgagcatcttttcatactcccaagtataacaaaaagtttggccccaaaattaaaatgctaatggctggcctgtttgctcgaaacaacaggacagaaaatgatagtgttgggagtcagacaaaagtgtttggctttaggcatgcgcacttgaaggttgaagcagcatccgacaattatactccactcttctcgtctgtatgacagacttgacggttggatgtatctgaagcgtataaccaacggtaattttatcatctttgccgagacatatttttattataaaatttggtagtatactagtatatcgaatataaaaaatcttagtgtaaaatttagagtatcaatgcatggatcttctgaacaagattttttactcttcatcacagtcttagatcatccgacatagtacacggttactaatgtttattggacgtatccacggacctgatttgcaaaatgccaaaatcatagaataaattggttgagtttaagaaaaagcaaattcaaaatatggataaaatttctacgaattgtcaacgaaattgcaacagtttttatcattttttgggtttagatcccaacctatatattttggatttcttgtatatctcttctatatagctgggtattcgttttacattactatacctccctcagtctcatagtatagcaatctaggattacagattgaatgtgatatttcaaacctgtttagatttgttgtactgtgaaatgttctatctggtcttagcttggatggagggggtagggtaaaaatgagatggatatttcccgtatgcctgcccgctcgtattattttgggacaatttcgggtcaaaaatccgaataattgggtgcttgtacggatatcgagccgaattttactttttggtggatatgagaatctagttggagggcggtatttgatggatacggagtaccccgataaa

SEQ ID NO: 8265 - DNA, 2028 bp, Oryza sativa
ctgtttctattgttaaggactttttttttcttttgtttaattgctgtgtgattgcatgtcatttgtttttagttaaaagcaagctgcaaaaagaagaaatcctacatgtcaaagaggaaatcttgagttcttctcattgaatacatgtcattctattatgacctccccccaccacacacacacactcacatgtaaaaaaaaaaaaaagaaatcttgtatcaatgcttgtcttgattgctagtgttgctactttattcaatattttcttctgtgtgtggtgatggtggcaaaggtacttgcaatgtctttgagaaagatcttttgaaaggaattgataatgctgtacctcatgagcatgcaattgattaaagtttgttttttttatggtagaagcagacatcgatttcttttgaaaaatagagaagtgattacttgtgatcacattgttgttaacttagtactaactatgtagcaataagcatgcaaatgggtcataccgtcatactcggtgatttttaaaactgtaattttttgaggtaccattatcaacttggtggtctttataaatttgttcccaccatttcattggtgctttatgcatattttttcccctgtaatgatattggaggcttgctgcattgacctaacttttgtttccacttaggcaaataccttatttaagagaatatgcttgaagttggatgcactatctcatttccactttgctccaaagccggtatggaatagtgacaagatattttacttacatttgtaatttctttcagcgaagttaactaacaaggtaaatattcacttttcaggtcattgaagatatgtctatacaagcaaatgtaccagctctagcaatggaggaggtaaataaaatccttcatttctccatgatgtttatacggtgagcatttcatgtcatgatttctctctctttttgcagattgcacctgtagctgtttcagatgctgcaatgcttgctcctgaagaaatttttgaaggaaaaggtgatgttaaagaagaagcagaacttacacaagctgagcgcagaagaagaagagctaacaagaaaaggagatatgcaggtaaatgtccttatgttttttaagatacattccttctagcttttagtataaatattctgacctgacatggataatgctcctacttcctcattcaaaacatttcattgttcattcaaacatggaagtagtttgagcaacccaaattcaattatagctagcaatatttccaattgcaaagttgggtacgagaatagattgaggcctgctagtttttcatacttttgtaccatacaggatcgcataaggagaggccagccaagatgcagaaagattaactcaatactggggaaacgcttacattatgaacaagtagtcagccatttttactgttcagcattacctcctgacccaaggatccattcatgatgagtattgtgcaaatggcaacgcagcattgacagacatggaggcagagagcaggctaggaaaggtagggtgaagggttgggctccaatgcttttgatcacaggatctgtactctggtggcacaacagacagacagctgttccaggtcaaagaccctgacgtaacccatctcccgtcccacaagaaaaggcgagcgaacgtattggaatgtgggatgggtaaaagaaatcttttgtttcttgttacactagtcgtagtagtagtgtagtaatgcaattttacaatatcattttttacactatagagtatcaatggagtgcatgtattcagaggcatatgttctgtttttgatacgttagggcattggtttgcagatgtctgaaatttgcgtgcggtgtattagtatcattttgatcctttgctttttttgccacattgagggattagattgatctaataaaggtgatgcagctatagactatagcatggcaagaaagcaaaataaacatgggttatgggggattgtactatcagctacagtagcaggtagagatgcctgtacgcaggt

SEQ ID NO: 8266 - DNA, 7972 bp, Oryza sativa
gcatgttttatgattaggactgcaatgctttcaaaaaaacgtatcatcgcttttgaaagtagttttaaatgcgcaaaaatatataaaccaggaaatgacatgctgaaagcagtaaaggcaacaaaatcaatacctggtgtaccaacaccaatcgtgtctccgagtgagatctccgagcaacccatgtcataaagctccttagctacatatgctacctttgatggatgaattgtgccttcaacagggcaaccaaccacacatgaaacatacctatgacaatcaaattttgcaaattctcagatcagattgctgtctgttcattttaactttcaggctcgatagatcatcaagcttatgtgacttacccacggattcgtattccatgtttcttggcagaagttacaacatcatggtaccgaacaaggctttccttgatggtacaattaaggtttgacttagaaaaggattcagaggcagatgcgaaaactgcaacttcttttgcaccagctgcaacagcagcctcaaatccctggataagtggagataaggttgattcatcacaatagatcaaaagtcttcaaaaaacgatacgtatagatagtctattggtgctatggtgctagtatattgtagagtctcccaataatagaacagaaccagacatactctgaggttaggagttaacactggaaaccgcacatctggcacatgcttaatcccttcaaccacatcctttgcatctgctagctgcaactccaaattgagtgataaaggttagctatttgaacttgaactgctaccaattttatcgtgtttttgttctgcaatgaattttgcaatacaagttttacaagctaatgtcccaattttaacattttttgttatgtaataaattttgcggtacaagttttacaaactaatgtcatacaaaaaattgatagtgaaagaagttagatggaattatcagtaacaacttctgatgagaaattaagtgctaccagatatgcatgagtttctcatgcagcatgacatgctaaattcttagaaaaggcggttcgtttcttcacctaatctgagtaaatactgacaaaaaacaaatcaagagctatcgtgacaatctctcaaatgtctgtgatttaaattaatgtatgatactagtacacgccttcacctaatctaagtaattacctgtggcacccattttggggacacaaaacttgtggcttcaactactgatagaccagaagccaccaatttgtgtatcagttcaatctttacagatgtgggtacagtattcttctcattttgcagaccgtcccgtggtccaacttcaactatcttcacaaaccttggaaggtcccataaaacctgaaaaccagttaatcatcaattgagaaaaggagtaacttgtggtaatacattacgatcactatacttcatcagcggccattttcacttatttagttataaaggtaaatagagaagactgacatgttgcattgccacagtcataatgctacatgtgagttcattccttctatttgaggtggtctgatgaaacctataacaaggaaatgaaattgaatacacccaatcacccatgagccatttcagttacacatgatcaaactaccttccgtggaagagctctgaactccatatccaccccattgcaggatgaatcagtatattggccttgcatatgccatgaatgagcactgctgtgaaagatcgtctgattgttgccaccattgcgatgcttgtaactgaaagtaagttcacatggtcatatcatacgagtttcagggcatacttcagtaataaaattctactgtcactaaagtaaactaacaagttcctgaagaaaaatagaagtgttgcaaaggtggaaatgtacatgatttgcttaaacctctggaaatactggaaaaacattccgcgtcaaagtaaaaataccgacaaagcaacaactaggaaaggaagaaatgtagcacggtaaagtttgcaacagtagaacactagaacttacttgttggtgttgctgtcatcaacacttgctctgcaggcacttggagagaacctttcaagtctgttaatactcaactttggcaggtccccaagaccaagtggctcctcgaggcttgacattctgtgaagcaggaggcgttacaattttaacaactatgttgagatgaatcttgatatgttaatatataaaggacacgcccggggtgggggagttgaggaacatagtcagaaatggtgcactagtccgcatggaaaggaacgtttgaaatccaatccaatgggactcgcaaaccatgtccattctcccggcatggtcaatgtgcagtgtgcaatgcttgcttgcacaccggaactcgaacttggccagacttcttctttagatattgaattgcacatgagatactcaccctaattaattatccatcaagcaggtctctttaaccattcaatcatgaaatgccatgcttgatgaactaatatatgatgatgcccagtaactagcagcaaaaatggaacagcgccaactgctctgtattaattcattttttttccttgtaaatactcaaagcaaaccaagatactacaaacccacactgcaacctctccatgaaaccaaatcaagcaggccaatcggcaacatacttgctacgaagaacagggaacagaaaggggaaagaaccaagaagaaacaagaaatcacatacctcaatcgaacgacgaattcgaagcaaacccgatcgaatcgcacccgagattgagggatatggggcaccgaactcaacaagccttacttgaatccgacgcaaaggagagagcagagcgccgaaaatggaggccgcggcttgcgcctccgcgtctccgccaagggaaaggaactggtcggcgaggtcgcgcgtggacccggttcacggtgagatccgtggtgcagcgccctgggccccaggtgtcagtgggagttggctcacgggacccggtccagggagttgagtctggcgggctgtgcggacgcagtggcgttggtggtaggtctcgttcccgttttctagttcggtgagcggccagccgaccacctaaaaaccccggactccttatcggattcggtttttggataattgtgcattacccgttaacacttagcagagcctggcattgcatttgcatggtcatgaacccatggtcttcatatgtagtagtagtagatttgtagcgaagaataatgatgatggtgattatgaaaaatattcatggttgtctatatgttcagatcagaatgaatcaatcagctgatacgatctggatttgtggtcttgtctcatgacagcaacgagacccgattcgcaaatttgtatttaatgatctctgttagtgcagacgtggtcagctgagttccagaagaaaaatcggattggaaggagtggtggccatgattttgttgatgtatttcctcctcgtgttttataagagtaaccatcatccgtcctattcaattcaatttatggttgaaatagcaatcgtcattatagcactagataaattatacatacgtgttttgcaacaaatataaaaaaaggacaaataatatcaacgtatatataaaaaaaaggaaaaaaatcaaattgaggccgaaaactttacacacctcaactattattctaaataacgcccctcaactttaaaaccaggatacccaatacccgtcaactattaaaattgtctggctgatttaccctctcaaggttgttttcactagattaaaggggccttcatgcatgaccagtcagccaaatcaaaattaaaaaaataatatggatcccacattcatgcgttggaggagcaattagttatctacatgatttgaaagagctcaagcaataaatctcattgtgcaaattacaattgctgtggaggaagattttcagcgattcgagcattgtcgccagggagaagataagaggacactaccagggaagaaaattacacaggacttctttgcgtgacagctgtataatacgaatctcaaagcaacatgttttcttccctgatttccccagagacttgacgagtaaacgtgttctcctgctgtcgccgcacgccggtcccaagtggtctcactgcgtcccctgcaatccttggcggtgccccctcactctggcccttccttgtgtccttgtgggctgtggccctccgtgcctctcgtcgcgtggccaacggtgctagctgcagctcagtggcttgcacgtgtcgaccagctgactctttgttagactgactatgcaggtggtggggattatcacttagttctcgccaacacttacgttgtctcagatgaggcggaccaggaggttttttcggagctgtcaattggaaagaagttcgacacctaaaagataatagagtaggcatacctataagacttcaccatggtcttggtgatgtgctaagcaatggtggttgcagggctagagattggctcatggcggagccaagagcatctcactaacactagtatcgacaattacgagtttgcgacgatgccaagattgtgcacaccttatcgacaaaatcatcacttgggtgcttgatagagctctcgacactttaatttcctcatccttgtggcatcatttttgcagtttcgtccatgtccgacgtggaggataaggcaaaaataccaaaatgaccttgtagccacctataaggtggtagcgctcttgttgttgctagtccagtctaacttccatgttgctagaggcccaaagggcacctccgcataaacaaagctagagcacagctctgcatggcatcctccctatggctctagttgcctagagtttggtaggtaatctttcctgcacgcccccctgactttgcattgcatccttcggtgagctccgtcccctgcttttgacgtggcatccacctttgagctctccaccgttgtttgcatactcccactgtcccacatctcatcgtcctcgacgtatccaagaataattacatcatgccaaaaatatctacacaaattagatgagttagcaagcttgtcctctaatttgatatgcataagttgatataaatgaaattggatggatgccaaacttttgagctaatctaattacatagtagtagaagggaaaaaaaaagaaataacaccataaagaaatcatcatacttgtttctggtttcaatacaaacttttttcctctaaacttatacttcctccgtctaaaaatgttgctaactaggatgagattctgaacggttaaattcgaggacctatattttcaattttctgcgcttgagaaaataaaagggaaaatgtcatgtctcctcccgttaaaccctagcttaagcccccttcctcttctccgcgcctccgcctccgcctccgcctccggtctcccctcttctcacacgctccggctccgacggacgattcccacccagtaatggcgatggatttggacgagccgctcgacgcggagaagggcgaggcggcgctgcggcggctgcgcgacgccgacccggtcctctacctctccccctccgacgacctcgccgccgccgcccgtgaggcctccaagcacctctacgcctcgctcgtccccttctcccccgcgcagccgcccccgctctccaacctcctcgcaggccccgccttcgacgccgagcagatttggtcccagattgagctgctctcccgccccctcatcccccagctgcgccgccagctccgccgcctcgagaagcaacccccgtctcagccgccgcctcgtacggaatcgaagtccgctgatgccgaagagaagtcagaggaggaggacgaggaggatggtgaaggtgacgaagaattggaggagttggacgatgtagatgatgaagaggagtcagaggaggaggaagaggaagaggaagaagacaaagaaggattggaggataaagcagggaatcaagtggaggacgagttcttcaagataaaggatctcgataagttcatggtaaagggggaggaggcggaatatggtgggggtgccaagcaagggaagaagaagaagaaaacagagaactggatggaagaagatagtgatgaggaggaagaggaggaccttgatgaggatgaggacaatgaggatgaagaagatgacgatgaacacttggacgtaagcatttcgtaatcacatcccttgttaaattcttagagaccagtattagctctcataaagaagattgatatatagaaccactgatctagaagtatctcaggagtagacaccggaatttctgtagtcgcaaaagatagtatctgtattacctcaggaaattgagcatatggattaagttttaaaacagtttcccgcttgagctaataggcttatattgggagctagcattgggtatggtttaatgcaagatgcatgcttgctaaatgtgattcttaagtatcgttttttattaatatagttggaagactttgacgatgaagaagaagaagaagagggtgcagttggagatataatgtaagcctttatgctattttctgaaaatgctcatatcatgattgatagaatcacagaatgcgaaacagttcgggtttccgcacagtgtttttttatctttaagtgattatatactgggatatcaaatggttttaactacatttgaattgcttttttgaagatcggtatgatattcgtagaaatggaaatggtagtcatttataaatttgaattgtagaatcacttgaataattcttcacaaccttttcctattttatcattttcatgctcgacacataatttgatctgtttaagttaactgtcatacaatatgacctgtttagctcagagaagggcatacaaaggcaaatggagtaggaaaacaatgggctccaaataatggcatggaatggactcaattaaattagaaaacattaagtatgtaagacaaacatattacattttcatgtaaattgttaaaaaaatgatgatagcacaagaaaatggatttatgaaaaaacaattagattaagcataaggcaaagaagaagtttgttgaacactaaaatataggtataaccacgtgtggcaatgtgggaatagaatgctgtgaaaaaaactgccacattcgcataactcataggataatagcaaaggatacctacaagtttatatgtcatgtacaaaaaggttgagacacaatatcaccctaaaaaacacagctttttagcatataacctaggcaaaactgagctgtaagttctgtctacttcttagccactgcaaatgtccctggaaggataagagatctgattagacaattccaagatctcaccatgcacataaatgcattacatcattctttcctgccttgtatttgtccagtggagcctttacagaagtttccatatgttgtattgactcagcaaagcttaatcgttatgcccagacttcggttgtatttaatatttgttcatttatagtattatgctttgaccagcaaagatgatttttccaggtataaggatttttttgaggaagctgatgaccaaaaagtaaggaagaaaggtggctccaagaaagttcaattcaaggatgaaccagatgaaccagaagttgatgacaaaaatgatgatggaaatgttagtcaagtactacacttactcacttcaatataaacaagttaggcacatgtatattatcagcatattcttccaattctgcaggatgaacagggtttgtcaactcacgagaaggcgcgcctgaagatgcatgctaaaatagaggaaatggagaaagctaatcttgaacctagtatgtggaccatgcagggagaggtaatatataatatgtttatccattcattagtttctagaacaaaacagatttttaactttgaaactgttctggtattaaatcatcagctcatggtaaagaaaccacttgaa

SEQ ID NO: 8267 - DNA, 2695 bp, Oryza sativa
  unsure (1)..(2695): unsure at all n locations
agctattttcgcaagtggacctgttgtatgcctgcgaaaatggttgatttttgcaggcgttgatgtcacgccccgaactagtcccgaccggaactagcccgtgacgctccaaattaacctgttaatcgataccagtcccaggaaacagtgctggtatcacagggagacagagtatcacagcaacagaggtctctttattatagagtagaagtacagtcatgttgggctgcggacagatcccgagctcacaactgcattacaaaaggaaagcggaagccaggacttagaccaatcatcacaggcgcgacttgggaactaggccgaaaccctaaaactcatcgtagccgacttgctcctggaagaactcctcgtcagcaggatccacttcatcttcttcagcaactgggggggggttatttatatagagcaagggtgagtacgggagtactcagcaagccaggggaaataagtgtttaatgcaggcttcaaggaaaggctgttgttttagtaattgattttgtttgaactcttttctaaaaggtctaagtgagtgcttctcaaacgacacggatgagacagtgcgtctcgtccggtcggagtatgtgcaatgtatcagtctttagatcttgaaacagggttggcacccggccaacagcttttcaaacggccacccgggccaacaacatttcaaacggccacccgggcctagctgatcccgtcagctgctgatttttcaaacatcgaacccagtttcacaacagcaatttcacaagcagtagtcagacaaaactacgctaggaatcacctcacatccgcccatgaccgtgggcacggctgttcgagcagtttgttaacctctgcagagggggtacactttacccacacgacattactaacccggatcacccagcccgtggggatcagccatgtcgggagacctccaagctttcatgacaaggcatttcgaaagccgatacaggtttaccatatgccgacgagaggggtcccagaccaacaacaggttaggtcccagaccatactgtgccaggaagcccaggggtcctccccgacaccaccccggcgaatccacatgtctctcggcatcaagactcccctgataagctagttactcagccaggggtgtcccattccacccatgtggtcgtacttgtcttatgtttggatgaaattccaagggaatcggtccttaagtgcgagagcgggaaaccgtacacccggtacgttccccggtccgcggttttggaaattcatttagttcgcaagcaccgacccaggtgtcgggttttccaagtcttttgtaaaactccagttttacccaagttgtttctcagattttaagtttgaaggcgaccgtcgatacttgcacagagtgcacgaatatatgtttgggccgcttgggaaaggtgtttttctagtagtgtacaccttaaaattgagttaggaatttcaaaaacataaattttgaaacaatttttgtatttatactgggcatgctctgagttgtggagaacgagatcagtgaagatgggttttcaatttttgagtatctttatggagaacttgttggagtttattttaaaactaaaagaaatccaaaatctaggattgggaggtgctgttgggcacggtattgtaaccgaggttcataaaattctaggattgggaggagccatcggttttcgtgttttttttttacgttctgacgtggcgctatttttattggaatttctaatgctttccgataaatcaaaatgtcaaacattaaaattgatcaaaattcagcggaatttatcgaaaagcggtcgaaaatcatgatacggatagagcttgaaggccccctttgaatcaaatgaaaaaccataggaattctagaggattttatcctatgggaaataatcctatagagtcatttgaaacaaaggattgttttctatcaattcctttgaaattcctatggaatgaactttactagagcaattttggaggaaaataagcatgaggtgatgaggtctcacctcatgtttttctctttatgtgtctaaggttcctgtatttttcctgtatgctaatcaaacgatagtttgaagacttttctgtgtttcaaaatcccataggaatccaataagtgtggcatttaattcctacgtttttcctattcctctgttttctcaatcctgcgattcaaaggtgcccgaattctagcggtcagctggtaaggtaaaccctgcttgtacagtacaatagagtaatagacaagccataaccacaaaagtactgtagtagtgaaaaaaaaaccagaaacagccgcaatcaaacactcttgaaaaccctaatccccaaaactcagcaaaacccaactcgtgtttcgttcgcaaagtgcctgtgcaaaggctcaaatccccaaatccatcgaagaaatcttgaggagacttcgtttggacgttttcccagcgcgctacagtgttttgcccccgcgcacgcttttcaaactactacacggtgtacttttttgcaaaaagtttctatacaaaagttgcttaaaaaaatcaaattaatccatgaggcgatgtcacacagggggggnnngggggtaataaaaaaaggccacactagatttataaaaaagacaaaaataaatgaaaatcagattataattataagacacaaccgtcat

SEQ ID NO: 8268 - DNA, 14399 bp, Oryza sativa
  unsure (1)..(14399): unsure at all n locations
agcccgtcacaaatgaccatcatctgtgacatgcaccatcttgaggcccgtttaagataacaactaggcccgttacagatgactcatcagtgacgggctatatacttaatctctatcgggcatgaactaaaacccgtcaccgatgactatttttccatttttcatatgaaatgtttatatttgtaagttaactatagcaaaataattttacgggtagtaaatgatttcaaatggaaaaaatgtcaacaataaagttgtataacttatcaatatttacaacttttagtttggtcatttttcaatataacatttttttgaacaatttgaatttgaatttaaaaatatgacaacttcaaacaacattttcaaatactaatgatttcaattgaaaaagtcatcaacaacaaagttgaataactcatcaagatctaaaacttttatttttgttatttcttcatctgacgaaatgttagtaatattattcacaaattttacatatatgtgttatagtttataaaaccagataagagatatgtcaattttgtgaacaatgttactatcactttgtcgtatgaagaaatgaccaaaataaaagttttagatcttgatgagttattcaactttgttgttgatgactttttcagttgatatcatttagtatttaacaatgttgcttnnagttgtcatatttttaaattcaaattcaaacggtccaaaaaatgttatatagaaaaaatgaccaaaataaaagttatagattttgatgagttatacaactttgttattgatgactttttcagttgaagtcattcactgatctaaaattctatttgaacttttcaaactttgaatttcaaatttcaaattgtttaaatagagtcagatggagaaatgaccaaaataaaaaatttgcatctcgatgagttctacaactttggttttggtgacttttccatttgaaatcatttaataaccccaatttgacatcctggcctagggcataataagattaatagaatactcataccaacatattacaattacttttccggaagccaatctctaaagaactttgacattaagtgtgcttggtctggagcaccgattgagatagctcttcacatcagtgacttctagcctgtgacggacgccatgcccgattgagatggggcttaccgcccgattaagttgagggtatccgttctagtgcatgaagagtattctatgcagaatatatgagcattacagcatatgagtgtaagttgcaagtatctaagagaggagacaaatcccagcagagtttttaagctagctgacactgataaatcaccattaattgattgttaggttgttagcgtctgtacatctgtatgtgacctccctccattcaagaaaaactcaattctgaatatgaacctgaacacattagatttttttctttggatggagagagtatttttcattccttattctctcctctaaaattatggtgttaggttgagaaatttcatgcacatggaattaaattttaccttggaaaaaaaatgttgtttctaagggtcaaattttatcatggttccaataggtggattcagcactatcgtaggatcccattttggtgacaacagagagtttagaatatcgagatgatatcattaggcttttgctccaaatttactgataagaatgttgttgttaacgcaaatcactcaacttaacttcagataaaaacacaaatcacccaactgtaataatatttactactccctctgatttttaacgtttgacgctcttatccaacaatcttaaagttctgtaaattttgctggaccatatctgcaagttgtacgaagaagataatcgtgacacaaaaccaatccacaaagccaaacaaccaaaacaaacacaacttactactaatagtagtagagtattattcgaggcagctttcaataatttcatttatagacatacagtacacacgatgttttcactttttgttttcataaataggcaagaggtttgcatgttttttattaagcagagaaataagtacaataatgagaagatgttcctccacttcacacgtgatcatactcctatagttcgtttaattctctttttacttgtaaaaacggtggatgcaacagcaagccagatcctttaaacttgacctctgtaatctcatcaatcctcctcgccatctccggcgtcaggtgattcctccaatctccaaccacgccacgccggaaggatatgttgtttggcacgtctttcttggtgaagttggtcatccccgatcgattcacctctaaccccgataaactttccatggcacaaatctccacgatctttctgtccactctggcatcctgctcctccgttgtgaatgggcgcccgacgaactcggcgaggcgtctcagatggccgagagtgtcagcggcgagctcctcgtaggtcaagaagagtacctcgcttggcctctcgacgtgccaattccagtagctgaggacgtgctcccagtaaagcccaaacaacgagacaccattacagaattgtcgatgtgcgtcatcaatgttccatggcatgaacctgttccaaaagtgccagagcgagacgaagcaatctttgggatcccggcacaggtacaccaccttgcagcctgaggctgcgacggagtctggcaacgattgagacgggatatgcgtcatcaacagccatggctccggcagggagctcaagtcaggtatccgatctttgacgaacacctgagactcgaggaaagagatgagctggtgggggctatgcgccaggagctcgtcagccctgcggtggagagccgagtacggaagcgctttgatccaagtggtgccggacttggggaatgtgacgaggaagatgtcggtggcgcgtgccgtcaggtggctcttgacgaccatggcactcacgacccccgccgtggtcatgtaccagccgtcggggtggcggctgtatggacgtcgatgccgctcggcgccgtcggaaaggtctccgcgacttgccggagttgatcgtagattttcttgtgggcttttgcttcgtccgccgcttcggttacagaggagagccggaaggaggaagccatgaagagtccacactaaacagcaatgaacaaaattatgtgatcttgtgactctgcagtgtgtagagtagtgcaaatcaatatacatataggtgaagagacacaaattttacgcgttcgcgaaaaaagaagagacacaaatcgggaagtcatgatcagtgttcaaaaactgataatgacattctaacttcctggcattaattgagttgttctcacacctctctctctctctatatatatatgacctttttttagtgcacatcgtgctcagcgttagcttgcacaaaagtattcatgcttaccatgacgtcgtcacacgtagtatactgatcagaagataacattatggagtactcttactccgaaaaatatggatcaagcatgataatagtgtacgttactgtcaacttgtttattagtaatatcggcttctagtttgatatactacacataccgacacatgggatttggcactgatataattattgcaaattgcattccaaaaatgcatcgtgccatcgtgcaacctacttccataaaaaactcaattgttgatttggatctggatgtagtgtatgtccagatttaaactcaagattaaaatttttatgggacagagagagtgtaggatcataaaaggccttttccaccccaaaaggtagccattgagatgaggggctcctccacttatatcttaggtgctttgcccttccacaatcaatgtgggactattcaacggggagtactagtaaacatctattaatttatcaaagaaatagaaaaagaagcctccacgttcgctctcatgggaggaatcttcccatcgtgcgcccgatgcccggaaaaaatcagccggtcaaatgtttctattaactaacgagtaaaacatgttatatatggtgaaaaaaaagcaactaaaacatttaaaaattttacaaaacatggtgaagatacacgttgaaacatatcgctattgcatataattaaaatagctaatcttaatggattgaaacatatgtttttctttaatcaaaatataatcatgcgatatctcgatgtaaagatttaattgtaacaaatacacggtgtgatcggatcatagattggataaatagtttagaagaaaaatcgttttgaaactcgctaaaatgcatgcatgcatgaggtggagagagaggagtgagagtagtggcagcaggtagtttcaagaattttgtgaaacatactaacgacacctattgaaacatttcactatcacgtatgaaacaatgagtgttaatggattgaaacatatatttttttcgccataatataatattgtgatatcttattgtaaagatttaattacaaagaatacaaggtgtgatcagatcgtagattggataattagttgagaaaattcattttaaaactcactaaaaagcatgcatgcatgaatgaggtggagagagaggagagggagaagtggtagatagtttcaggaattttgtagaacacactgaagacacatattgaaacatatcactattacgtctgaaacaaagagtgttaacggattgaaacatatattttccttttgtcatattataatcatgtgatatatctattatattattaaaacagccttgaaagaagacatcacgttcactgtgggggctagaaattcccacattaatcggagaaaaagaaaagaagagtctaactaggaatacaatttaaaaaaagtgaaattcgaaattataaataagcactattgaaagaaaagtcctcataggaacacaatacgagattaattaatattcagcataaaaaataaaataaaatccgaaattagcaaaataaaaaaagaaaaagaagagttcgagtagaaatacaattttaaaataactaaaattcgaaattaaaattaagcaaatttgaaaggagagtccatataaaaacccaatacgagattattaaaatttggaataaaaataaaataaattagaaattagaaaaaagaaaagaaaataagagctaaagtagtaatacaatttaaaattaactaaaattcggaattaaatataagcaatattgaaataagagtacatataagaacccaatagtagatgaattaaaattcggaataaaaaataaaataaaatccgaaattagacaaattaaaaatagagttcaagtaggaatataattttgaaatgacttaaacttaaaatagaaaataaaaatattaaaagaacacattacaatattagttaaagtttgaaaaaaaataaaataaattctaaaattagaaaaagaaaaaatatttcaactagaaatataatttataaataactaaaattggtgataaaaaaataaagactattgaaagaaaaaagatcatctataacacatcacgagattaattaagtaatatgcctataaaagagtagagttgtgacggttgatgggacatctaaaaactattaataaaacaccaaatagaattctaatgacgattaaaaggaaggacgacgggaaggtcgtgaagcaatcggtcaaggcggttggcgggacttatagaaagtaaaaaaaaataaatccaatgataatcatatttgattttgaaaatttcgacgataataaaaatgagaggtagtgagcgggttgtataagattacaatggcagagccgccgatggctggtgggacttctagaaagtaaaaaaaataaattccaacgatagttatgttcaatttttagaatcccaatgataataaagagtaggcggtggatgagtcgtagaggagtacagtggtagagtttgacgggatttctaaaaattatatataaaaaaagaaacccaacgaaacaataaactctgaaacctataagatccaatttttaaaggttcgtgcttctaaagtaaaaaagtaaaccccaatgataatcttgtttgatttaaaaatctcaataacaataaaaagggcaacagcgggtgaaccgtagaagagtacagtgacaaagtcgctgactttttggcggaacttctagaaagtaaaaaataaacctaaataataattatattcgatttttaaaataccaatgacaataaaaagaaaaggcagtggatggttgtagaggagtataatggcagcgtttgatgagacttctataaattataaaagcgaaacccaacagtaatttgaggagcttgcaataatttcatttatagacatacagtacattctatgttttcactttttattttcataaatagacacgaggtttgctttttttttttcattaagcaaagaaataagtacaatagtgagatgttcctccacttcacttgccaatagttcattttattctctttttgcttgtaaaaattgtggatgcaacagcaagccggatcctttaaacttgatctccgtaatctcatcaatcctcctcgccatctccggtgtcaggtgattcctctaatcaccgaccacgccacgccggaagaatatgttgttcacgtaggttttatcaaccatgtcagttgtccccgactggttcacttccaacctcgacaagctctccatggcgcaggcctccacgatcttcctgtccactccgagctcctgctcctccaccatgaacgggcatccgacgaactcggctaggtgtctcagttggccgagtgtatcggtagtgagctcctcataggtcaagaagagtacctggcttggtctcttggtgtgccacctccaatagccaaggacatgctcccagtacgggccaaacagtgagacaccatcgcagaagtgtcgatgtgcctcgttgatgtcccacggcctgaacctgttcaagaaatgccagagcgagatgaagcagtccttggaatcctggacaacacctatcatttacatacgatttaaatagttataaaaaaattaaaaaaaaattagtaacatcaattgtgatgatataagtctacacacaaacatgtaggactaaatttgatttacaactagagaaacaaaaataataaaatcagacagtgaatagtacccgtacagtgcagataaaatttgttatttttgtttcatcatatatcgatcgaatatagacttgcatgtttgtatagtgtcttatattatcatagtctatcttaccaaattttataatttttttatataaatgtttaaattacatacatacacctaggtgccaggtgccatggcatctaggtgtagaaaatactttctgttgggatcccggcatagatacaccactttgcagccggagtcggcaacagagtccggcaacgactgggacgggatgtgcgtcatcaagagccgcggcgccgggagggagctcaggtcagggatccggtctttgatgaacacctgggtctcaaggaaaggaacgagctggtggggactgtgcgccgctagatcgttggccccgcggtggagagccgagtgcaagagcgtcttgagccaggtggtgccggacttagggaaggtgaccatgaagatgtcggtggtgcgcgccgtaaggtgactcttgatgaccatggcactcacaaccccctccgggaacgtgtaccatccgtcggggtggcgactgtacgtgaagctgttgctgctgttgggtgccgtcgggaaggtctccacggtttgtcggagttggtcatagatttccttgtgtgcggctgcttcatcagctgattggggtgcaaaggagagcgggaaggagggcgccatgaaaagtgaatgcagaacaccaaggactaatggttgttagctggtgttgtgatgctgtgattctgtgaatatgtgggagcgtaaagtgcaaatatataggcgaggagagacagattcggaagtcaatagaacatgaatagtgttcaaactggcagtgacattttgacattaactatcttgttagcatctcttaagtgttttcatatgagtctccctttcttttgtcaatgcacgtgatgatcaacttgagcttacaagaatttattaattcttctgaggatcaaattgtatcatgtcgtcaatcagtgagtttagctcttaatagggagtattaccgccccttttcttagcgaggatgacacatgtgagaacgtactatactgattagaagatacctttagaatcttgtcctgagaaatatggataaaaaatgataaagacagcgtgttatatattgtcaacataaaacaccaaactgggtgattgttagtttagcagtaatatcagtttctagtttgattacatagaccgattcatggatttgagagtgagaaaataactgcagattgcatagtgttgcattcaagagatgcatggttgctaagcgcaagaatagcttataataactgattttgcacagaaaaagatctggtatactctgtaacaagacttgagcgattttgggccagagattgagacctcagtgctggaaaggagctccggcctacgtacggcctgtacaaattggcccagacgggactgcggcctcggtgctgcccataaggattggcccagactccagaacagggttacggcactggaaataagtctatttatatccctcaactcatttatgtggttgaatcgcattcctcaaccgcaacaccgagtataacccgtccaccaaatcccaaaaccgttgcaaattgactcctaggatggtttcaaaggcagttttgtcccacatggcatatttggccccgttgatttgctgagtcagcttgtgaaacccatatgtcaaagacaagaataaaaatgaaaatggtggggcccactgttgcccaccgccgtcacaagcgttccccacacattgccttcgccgcctctaccacatcgcatttgccgcatttccccctccaatcccgcaatacgccaccgccgtcgctggtcgatgccccctcctcccccgtcgctgccgtagcagcaatcggggatgacgtcggcggtagcagtaggcagtgccaatcctccaccccacgtgccaaaaccctagtagcaccccacgcggcggccacctcctcctcccactcatgccagccgtcaccgacgtctcttgctgcggcttcgtggaatcagtttggtcattgccgtagcacgcgtcgatgccaccaatgctgtgggccaccatcggccatccatatgtgttgcgtgcagacggaggtgcaggaggaagagggtgacgggagcatgatccggtccaactcccccatctcccgttacatcgtcctctccttcctcaactccggtcactactcactagtcactactccatcctcttttcttctcgacggctggcagcagggtggggtggtgaccaacgagatggtcggctagaggagcgagagaagggcctagagaagaaaaggaggaggcgaggccaagccccaggatagggttgcccatggtggcgacggaggcggctgctgcggcgggagggaaggggaaaggggaggggggaatgcggcgacggcaatgccggagaggcagggaagacgatgtgcgcaacggcggtgggcattgacagtggaccctactgttttcacttttatccttgtctatgacatgtgggtcccacaagctgactcagcaagtcaacgggtcaaagatatcacgtaggacaaaactgcctccaaaaccatgtggggagttaatttgcagtggttttgggagttggaggatgagttatatccggttttgcggttaagggatacgattttcaaccagggacatgacttaagggaggtataatagacttatttcaaacggactacgtgcggcccatatatgttggtcgggaacgtgattatagactacgtgaggcccatataatctgggccggaacagaaagctagcccagatatgacggtgagcgagcggcgagagcgagaagacgccgccgctgtgaacgagagaggatgaggttggcgcgcggtacgcacttcgccatggaggagcatgagtttccaaaccacctctcatcatctcatgccaacacgtcagtcagtcatcagactgagcgtttttttttttttggcagccgtacgtcgatcgagcgatgcatgcgaagtttcttggtgccttcccgatcaaccaactccatctcgttcacgtatgcattccggtcgtcggcacgttaagtttgataataatgttcacattgtacatacgacttacccaatcacgtaccttagtaattacgccctccgtacaaaataagtacagttttgcactattcacgtttaacgtttgaccgttcgtcttatttgaaaattttttatgattagtatttttattgctattagatgataaaacatgaatagtactttatgtatgactaaatatttttaaattttttataaattttttaaataagacgaacggtcaaacgttgggcacggatatctacggctgtacttattttggggacgaaggaggtagtaacacgtattgtacgtgtggtgtgtgcccccgtggtaatgttgatgttgattgctgttgctgctgacatgccatgcatgcgtacgtgttgaagtcgtgaacacagccgaaaatccaagctgcgagatcgacaaattaaactctctcaagttgcatgcagatcaatttgttacttacctgttgcaatcgaaagtgtttattttttcgagagtgaatatttcctcgttttatttatataatctaaataattataaataaaattaaatgaattggcaagatgtgttatatcactccacaggtttaaacttttgacttacacaaattcaaaaaataacaaatatgatatattagattatacatacatgtataagtcgcattatagttgaatgatatattatatattaatctattttactatatatattttcaatatttctactgacatttttagtgacaagaaaaaacgatggaacattcctccattcctcccatagacaaaagacactcccagtgcaatcctcttccttattttagattgatcatcgttctattgtatttgtgacattatataagatgttatatgatataatgatacaatttcattttcatacatacttcctctatctcaaaatattataacttctaatctaaagtttaatttttatcacaaatataacaatctagtacggtgtaaaagaatatttttactactaaaactacccattctattcattttgtttactataaccctaactagtcttgactagtaatatgcccgtgctaaacgctactgtgcaattcgatttatctttaagaacttttaagatttcacgttagcaaagaaatccgtggattgcaacacaaatatatattaatgagctcaaatatattagtatatattatatcacacggcacacacatgtacacatagttgaaatgataatttcctaaaaacaaaattccaccatgtaatttctctagttcctctaaaaattcggccatttactctaatctccttacaacatagacgctaaaacgacaaggctaatagttaggattgacttcttagttcaataaccatacaacggacaatgtgacatcacacaagcatatgtatgtacaatcataattttacaatctcaaacaatcattcgtgtctatatgcacgttgataattcattgaacatgatatgtctacacaaatatgttgccggattcaacaaaattccttgcacgccataattgacaaagggacagagccgtcaacttgaactacagcagttaggaaatttctctgatccaatgtatataatataaaccagcacatttacaaattatcttggtagggttactatgcgagccgagccggctcggtatccaaccctagttaccattgttagcttaaactattatttatcaaatagatctatcatcgatagttttttttttctagcgaactgaatgcgattgattctcgttgcagtacctctcaaacaattttgtttgacaataatggagagaaattggtgcaactacaactcctttaactccctgctattgtatatgaaggccgaaggccatccaagttatgttatcaggcttatcagactcccgatgaatataaagaagttaaaatcacagcgaattttcagacacaaaaccacctcagaaacgaccataaaataatatggtcaacaacaaccttgctccaattcagaactcgccaaaatcaaaagccttcaaatgatcttcaacaatacatttaatgaacacaagggataaaataacagatattagtataacttgtgccaatggataaaatctgcgcatgataaataatgagtgcctacatatacaacaaactaatgatgtcactataacagtatctgttagcatttccatcacagcccattaattcgcaagaactctccatgctttacaccaacacaaacatcactaaataaagctttcgaagagaacaggtgtgcgctaactgaaccctagcatcaaacacaaaaccctaaaagaaaaaaggaaaaagaatcacccagtttggcaacttcattgctgcagagaaaattattattttcaggtgccgttacttgacacatttgcttctttttcttgcagatcaacaattaattcaaaagagtcttgtgtttcggctgggcatttcgagtcttcttttaatctcacgatgaagtacagtgagtaaattgatacacactttgtaaagatcattatcagatttgtgcaacctataataaaaaaaaagctttatttaccattatgttactgcaatatcaaactctcaacctcttatgccatactgaattggcatcaataaattgacccagcagtggacattctcaaattctcacattgacattcaattatcacattcaatattgattcacaatctgaattcacgtcaatttacaatctcaatctcaatcttagctaactatagcttttcttttctagagcaccatatttcatccatctaatataatacataccatatttacaattacaattcacaattatatcaatacaggacaaaaatatattacacaatgaagggtaagggagaagatatcgaaccaaaggcaagacaatatggcagaggaagatatcactattattattctgcttataatcacgcttcttttgattgattgttgatcagtgaccagttgtgttaaaaatcaacctggaatagtttatcaccgtagaaatgtacaattattatttgtctatcacagtataaatgtacaattgttgtcacactgccttcaaaacaaatcaatcattacactacggtaatataataatggcaatgcccactttttaaccatgtgctgcaatgggaatgaaatatgtaccttgcacgggtggctgatgcaatttcaatacatcgcgcgtgtatccagcattttagcctccacttgcatgcacgctacgatcgccttccctcacgctatccagtaaacaacaatttttccaccaaacatgtttaaatttatatgggacaacatatctgtagcatgtagcgtccaaattgatcaaacgcagtggtatagctatattggatcctggaactgcaacgaagaacagaattgcacttaccatggcttagggcgcgttccttgaagaacagaaaattaaacttaccatggcttaggccgcatttggatagggatttttttccagcactcaacacaagataagccattaatatacaattaattaagtattaattatttgaaacttgaaatagtttgtttgattattcaaaaaatttctgtatgagatatttttataaaaaaatacattttttagtagtttaaaaagtatgctcacgataaatgagggagttgcaaaagccaaatgcactccccatctcagtcttattccaagaatcctagctagtatataatggtacattaatttctaaattctaaagtattacctaaccagagttttttgagagagattattttgatgtaaacaaacataacatcctgtaaacctgaataatcaaggctctacaaactacaaattgaaaaagaaaaaggaaaaaaaagttgaaccgaatcctgaaattaaaatcacctgccatcatatatttcattcaacacagctgaacttttacattaatcactttcgactatacgtattttctccatcctttctatttctgctgaaaataaatgcccctttcctttctatttgtgctaccaggctgatagattcataaatctgggaactcacctgcagatgtgaaatggcttccagatgagcagtaaatccaagccaacact

SEQ ID NO: 8269 - DNA, 876 bp, Oryza sativa
aacattgtagctacatttaatacgatttcttttatggcagcctgcagagaaatttcccaatgtcttttcccctgactcactgtttgcaaggtattctttcttgtgtgccaacgcccaacaaaatgttttttatgattcatctacagaatacttacttttgttggaaaattttcaggttcccatatttcttaccctgcttgtgcatatcagtctttgctgctgttgttctcataggctgcatatggatgccagtaagtcagattccattattgctagcttcacaaaatatgcaatcagtgtaatttgtcatatatttagttgtatttgatatatttgcactgtggaagatcttatgacatggatctgaaaaaagaaatcaaaagttttgctgcatgcttagcaaccaaaatcagttactggtaattataacggagataatctgcattttatcctaatgtggttgttccacttcatcaggaattaatagtctcttttgttactttttgaagtcaaatttatatttcctctcttaaaaacttgtgcattagcagaagtatcaatatttagcatgactcatagtgagaaaggataattcttcggtaccttgtattaattctttttgtatagttgtaaagtaacttgaaatgtattttaggagacattacacaagcataaagctgatgcaagtagatcccaaactgttgaagctttggagagccatttgattgatccaaaagaaaaggctgaccaaaatggtagtttggactgcaagaagagcttattgagaaattggcccttgatgtcctccataattctctattgtgtcttctcctttcatgatatggcttatacagaggtatattgttcttgctatta

SEQ ID NO: 8270 - DNA, 20759 bp, Oryza sativa
ccccttagactcgggtagtagcacgagtagcctccctgtagctagccggcgccgccccgaccgttgccgccgctcgccgtgtgctcgccgccgtcgccgcccgagctcggaagcgccgctcgtcgccggcctcgctcggcgcagctccgcccaatccaacgctagcatcggattcccgtagccgcgtagatgctctcgccgccgggaatcggcccctcgtgacctcatcgccgtttcccccttctcccgccgccggttgccgccgccgcaattcgccgccgtcgggcatcctccggcgaatccgagccgttggctcgtctcccctcgtcctgtgcaaccacccggtgtgctcgcttttgcctgtatcgccgtggttcactccaccgctcgccgctgtagtccgccgtccgttccggccggcgtcctcgtctacctcccgccggcccgcgtggcagccacgtaggcgccacgtcggcgccagctcggccaaaaccgggtcgagtcgaccccggttagccgctccctccccgtgcgcgcggtccaccgcgagccgtgaggctgcgcgtgggcccgccgcatccgcgtcctccgcgaaccgcgcgcgtgcaccgcgtctctcccccatcctagcgccgcgccgcgtgctccctccgcacggtgagccgagccgctgacaagcgggtcccactcgggaccacgcgaggtgagcccggtccaccggctctctctctcctcccctcccgcgcgcgcgtgccttgggccggtcggcccatttagctcagccgagccgccgcttttctctcgggccacgccctagccgcccgagggaagtctaatttccctccctcttttcttttcttttcttttctttttcgaaaaggatttaataaatccttttcttttagaccaaaaaaccaataatcttagaaattcaatatcttcccaaccgtaagtccgtttgactccgttcaacttccaaaattcctcaaatctcgagatctatctaatggcatgcttagaggtcattaatagggctttattttcgccgtttgttgagttgtcccgttttgcgtatagtttcggagcccgaagacccgcagtgcgaggatttcgaggatcaagctccagatctcgagcaaggcaagccacctttgaacatcttgagcctatatttgaatttaattatgttgcttgaaaaatattatgcattgataggattgcacttaatctgtttgtcctgtctgcaaggcagattggcggacctacctaatttgttgcatttgatcattcctttgttaattgttatatcatgtccccttgtaaccatctagttgcgcctcgatattcgtgcaccctgtgcgagtatcgacggtcgccttcaaacttaaaatctgaaaaacttcttgggtaaaacttgggttttacaaaaggcttggaaaacccgacacctgggtcagtgcttgcgaactaaatgaatttccaaaaccgcggaccggggaacgtaccgggtgtatggtttcccgctcttgcacttaaggaccgtttccttggaatttcatccgaacataagacaagacgaccacataggtggaatgagacacccctggctgagtaactagcttatcaggggagccttgatgccgagagacatgtggattcactggggtggtgtcggggaggacccctgggcttcctggcacagtatggtctgggacctaacctgttgttggtctgggacccctctcgtcggcatatggtaaacctgtgtcggcatacgaaatgccttgtcatgaaagcttggaggtctcccgacgtggctgatccccacgggctgggtgatccgggttagtaatgtcgtgtgggtaaagtgtgccccctctacagaggttaacaaactgttcgaacagccgtgcccacggtcatgggcggatgtgaggtgattcctagcgtagtgttgtttgactactgccttgtgaaattgctgttgtgaaaaggggatcgttatttggaaaatctgcagctgatgggatcagctaggcccgggtggccatttgaaagttgttggcccgggtggccgtttgaaagttgttggccgggtgccaatcttgatcaattctaaagactgatacatttgcacatactccgaccggacgagacgcactgtctcatccatgtcgtttgagaagcactcacttagttgctttcagaaaagagttcaaataaaatcaattgcaaaaacaacagcctttccttgaagcctgcattaaacacttatttcccatggcttgctgagtactcctgtactcacccttgctctacataaataatcccccccagttgctgaagaagatgaagcgaatcccgctgacgaggagttcttccaggagcaagccggctacgatgagttttaggttttcggcctagttcccaagtcgcgcctgtgttgtttggtccaagtcctggcttccgcttcccttttgtaatgcagttgtgagctcgggatctgtccgcagcccgacttgattgtactcctactctataataaagagacctctgttgctgtgatattctgtcttcctgtgataccagcattgtttcctaggactggtatcgattaacaggttaatttggagcgtcacaggctagttccggtcggtactagttcggggcgtgacacgtcagctcccgccaccgccgcgctccctgtcgccctccacgcagccacgccgccgcccgccgccagccgccaccgcggcaccctctatgccagccgccgccgccgcccgggctcagccgcctgggctcgctctggtatgggaggaggaggaggtggggtaggggaggagaggggaaggggaggaaggggagaggagaagactagccagatcggatctgaggaggaccggaggaggctgagaacttgttgtttaatgagagctagggagtagagagagagagagagaggggaatggggagggataagattatttttgtttataccaaccgggactaaagataattggggcctgaattcgacccgacaactttttaaaccaggactaaatctttactcccgaaactaaagatcaaaaaaattttaaccaggactaaaaaataatctttatgtaacaccccaggtaaccacgtacctagagtgccacatcaaaatacactcaaaccactaactcccaaaattattagaaatttcggcagaatcttccctgtaaatacggacatccacgacaggcaaatgtaagttaaactaataacaacatccttcccacaattcgatccatccttataattccatggaaagaaactaatagatatctaaaagattattacaagaccgaaccataatatagtttaagtatcattatggacctaagcaatatagtttaatactgtgcaaataaatgtgtatataagggtgctacttcccgcccatgcatatcggtcgcaatatgtacctaaaaccaaataaaacacacgagtgagtataaaattactcagcaagtataatatggaactagaaaacacatatacacaacattggcaataaagcatgaacataaggctttctttctttgataggaaacacattttcaaacaccaagtcaaagaagatagtagttcccatcccgggcaggcatgaattgaaatagtagtttccatcccggacaatagtgaatacatcctagcatttgccagcaaagccgagtaagcgtgatcagcgcttacccacaggaatatgaataaagatccaaattgcactcacatgactacacatggtccttgaataattgaaaaccagaatcaaagaaccaaattgaaaccatattgcacatccatggcaagcatggaacttgaattatttacctagaaccaaaatccggaatattaaaacaagaatagcatcgtaaacataggataaacatgaaaacctaaatggcgtgaataacaatatgaatataatcggtcacatgtcacatagaaatatatcaaaaataaatagatagagcaaacaatccatgaatcacacaattagttcgtcatgcacttgcctccaatgaaggattggtatcatgcacgatctgataggccaccacctaatcataaacaaaacctcagcaaacacattcaaacatgcgtataaaacaatgaaaaaagtgaacctactgccccatcccatcaaaacgcaataacaaggaacgccgcttggactatacacaagactactgcttcaaacatttatatcttgaaatatgaaaagtctatgactgaaaatatatacattttgaaaatctacagaacaataaatacaactttgatgtagaaagcatatttttattctgcaatttaaatggtctaatttgcgcttgaaagtagacatcagaatctgtccagaatttcagactgtccacactaagacaaccataactggagttctactcgcccaatcatggtgtactttgccaatatggaaagctaagaaaaacctctacaattttgtctataggcagcctggctgattccactgtttaacccctccaaaaacagttcaatctactactatccaaattatgacacaaaaacaacagtcatactaaaaaaaatatatctcctaaaccacttgagataaaatcgcgccctttggtcagaagatagatccaaacattatctacaacttttatatggacactttgatcagaataaatcattttgaccatgaaattaatgtaaaacagaggcgctataaatcggcccacgcccagaactaccaatccgaatcacaacgtccaaaacgcttctctaacccacctcaaccacgaattaaaccactagaaacaccctagaacaactgatacaacaaggggataagcctcacctagggttcttttagagaacttatgaggagacaataggggagactccggtctaacccctacttctactcctctcctcctactcgttccgtttttccactttgcttcttcatccaagctatgaagatggagatctagggagagcaatttgctgttgagggggagagatgcgaacacaggaggagaggaggaaggaggcgccggctaaggagaggggtggcggtaccacaaggggaggtggggtttggttcccctctctctaggttttaggggagaactaatgggctgagtttatgggccttctcatgttggcccacttctaaagatatttttcttttatgtatttctattaacatctttattttaacaagtcaacccaaactaaaaaaacctaaatattttttttaatatacggggtattacactttagtccccgttcctatttgaaccgggattattgtagtttttgggcgaccgaccaaagatgatttctccaggactactatgataggtaattaatgaatgtagcctgatgatctcacctttaatttgcagccgtcctttgcaatttggctaagtggatgtcatgtttagaagcatgcagatacactcggctattcttcaagtttggtttataaagtatactccctccatactcataaagaaagtcgtttaggacaatgtttaagtcaaaccttgggaatataaatcatgaataactctcaagttgttgagtttaaaaatgtaaaaattatatatatagatttgtcttgaaaaatactttcataaaagtatacatatatcacttttcaataaatatttttatagaaataagaagtgaaagttgtgttttggagaccgtgtcactgtcctaaacgacttcctttacgagtatggagggagtactagatatctctttctgtgtaattaataatcgatcgatctgacctactgttacgcttcgcaactattttcgtatatcttatggagtattgcatgatgtatatctgaaatacaacactatgcaattcctagttattatatcgctgtcatatcggtgggtgtaactaaccaaactagaagtctacaagcctactgctaaactataaatgatcagtacactttggtgctttaggttgataattgataacgcttgtcttatcatgttcgatcaataattttcatcgtaagatcctaatggtatcttctgatcagtgtagtgcatatatactataaaatgggcaagataatgcatcttgctaagagctaatccactcatcaatgtcatagtaaaatacgacgcgttaggttgccagtcatattttgtcatagtttactatgtccaagattatataggtttcactaacttagcaactactccattcgcttcatcttatcaatcgttttgacattttatcaaatctacctataataataattagcaattacactaaattagtttcattaaatataacattgaatgtgttttgatatacatcgttctcacatttgtcatcaatcataatacaatgagcaagataataccaccatctgcatggacaagatctccttctcagctacaacatctccttctcgctttgagtgatttcgtactagttgattaactggacgaaaggggagccctcaatgctccacacgccaccatcttgaagtccaagcaaatctacgagtacttgcatgaagaccgccaagacgaccaaaattggaaaataatttggaaaagtaaatctcctccgaagattcagttcttcatttggttattatccaaagaacgcctccccacaaagcagaacctgtaaaaaaagaaaattgtttcgtccgcgaactgcgatcttttggtgttttagaagaaactgcttttcatttctgtgttgattgttcttttgctcaggcgttctggtcgaccattcagattgtcccaggactgacaagctcagccaatctcgcaagtttaggccgcctagatggcattcccatcaagcacttcagagtcttcttctttctctgcttttgggttctgtggaaccacaggcatgatgttgttttcagggggctgcaaacatccttgcgtagactagtaactaaatgtatagatgatgcaactctttgagcagagcgtttcaattcggatgataggggcattgtttcctcgtggaaggaaacactagcgtctgcttttcaaaactctgtaatttaacatgtaactgcaagtcttccttcattttataaaattcaggtggggaaactcccccgctcccccctgaactttctaaaaaaaaattatacaatggacaagataataccctccgctaagagctaaatccatatgtcacggtaaatttaaccctccgaagcattaacaacttttttcaatctcaagttgagcatcacgtgcattaaagaaacaaaaagagataaaattaatctacataactagagatgctattgttcaacgaaatcttcaatgatctaaaaaagatgctaacacctagacataataacaagttaatactaattaatgtcaacttgaatactttattattacttccggactactctcctctccgagatagtactatatatttgcacttcagctcccagtggatcaaaaaaaatacattggtcattggtgttctgctggattcattcttcatggcgccctccttccggctctcttctgcacccgagtcggccgacgaagcaacagctcataataaggagatatacgaccaactccgacgagtcgcagagacctttccgtcggctcccagcctcatcggcctcccgtgcagtcgccacccggacgggtggtacacgttcacgaatggggttgtgagctccatggtgatcaaggagcacctgacggcgcgcgccaccgacatcttcctcaccaccttccccaagtccagcaccacttggctcaaggcgcttctgtactcgactctccaccgcggaactgacgagctggtggcgcacagcccgcaccagctcgtccctttcctcgagtcccaggtgttcgccaatgaccggatccctgacctgagctccttaccttcgccgcggttgtttatgacgcacatcccatcccagtcactgccagactccgtcgctgcatccggctgtaatgtggtgtacctttgtcgggaccccaaggactgcttcgtctcgctctggcacttttggaacaggttcatgccgtgggacatcgacgaggcgcaccggcaattctgcgatggcgctcgcagtttgggccgttctgggagcatatcctcggctactggaggtggcacgtcgagaagccgaaccaggtgctcttcttgacctacgaggagctcgtcgccaacacgctcggccagttgagacgccttgccgagtttgtcggatgtccattcacgacggaggagcagaagcacgggtggataggaatatcgtggaggcctgcgcattggagaacatgtccggattagaggtgaatcggtcgggaacgatcaccatagtcgatagcactgtcccaaacaacacggtcttccggcgtggcgtggtcggagattggagaaaccacctgacgccagagatggcaaggaggattgatgagattacaaagagcaagtttaaaggatctggcttgttgttacatccgcagtttttacaagtaaaaagagaataaattaaaacaaactaggagtatatgttttttctttcaaaaaatagtttgtgtgccgttttcggtgtttaatagagatacaatctcttgcgtattcacgagtgaagaaatacatatatgtactggaaatttgtaaatcaaatcattgcaagtaatataataaaatgttgccggttagccgtgagttgggttgttaggttgtttggctttgtggattagtttggtgtacgtaactatcgtcatacagttttcagatcattcatcaaaattcactaataacgttcaaatgatccacactgtttcttgatatgctaaagattattaaacatcctccgaaacatttctataccaccatgtgacactctaataaattagaaataaaaataaaaatactgagggaaaaaagcaaaaaacattaaaccattgattattacttgaaccgaaggaccattcaatgtccaaaacaatttgtttaagagcagtaaaacgagctacctcaattggcatagggaggcaagcaaagagaaactgcgattctagtccaactgtccaaggctataaggatgatatgctacggacctgctaatctgctcttccatttgttttcctccaaattattttttcgagtcacatctatagttagctgaactgatcttacacttagcaactaggagtatgtcgtatatatactttattgagatgattgtccatttccttctagtctagaaagtagtttgcatgatttcatctctgaaaagaaagactgtaattcacaattacatcactaccaaacccttgtttcggtgcgcatagttaattaaagctgatcttactactagacaccatgataaatttgaccctcagaaaaaacaactttttttgcaaggtaaagtttaacccccatgttcatgaaatttctcaacctaacaccataatttgagaggagggaattaaggaatgaaaaataggtcacataagtacggatgtacagactctaacaatcaattaatggtggattatcagtaccagctagcttgagaactctgctgggatttgtctcttctcttagatgtatgtttgcaagttacatctcaatcatatattgtcaggttcacgggactaagactcattattgttttcgtaggactacacacacttcatggcttcctcctcaactgccgaagcggccgacggaacgtctcacatggaaatctatgaccaactccggcaagtcgtggagaccttcccggcggcagtcagcggcatcggccaaccatactgtcgccaccctgacggatggtacatgtccaggcggggggttgtgagcgccatggccatcaagaggcatctgatggcgcgcaccacggacgtcttcatcgccaccttccccaagtccggcaccacatggctcaaggcgcttatgtactctgctctccaccacgacgcccacgagctagcgtcccttttctggagtcccagttgttcgtcaacgaccgcatccccgatctgagctcgctcccggaaccaaggctcttgacgacgcacatcccggccaatcgctgccggactccattgccgcctccggcagcaaggtggtgtacctgtgccgggatcccaaggattgttttgtctctctctggcacttctgtaatagattcgtatcatggaacattgatgtggctgtccggcaattctgcaatggcatctcgcatttcgggccgttttgggagcacgtcctcggctactggcggtggcacgtcgagacgccaagccaggtgttcttcttgacctacgaggagcttgcagctgacacgcttggcctattgagacgtttggccgagtttgttgggcacccgttcacggttgaggagcaagaggctggagtggataggaagattgtggagatttgtgccatggagagctcgtcgaggttagatgtgaatctgtcgggggcactgactttatcgagaaagacgtaccgaacaacatattcttccggtgtggagtagtcggagattggaggaactatctgacaccggagatggcaataaaaattgatgagatcaccgagatcaagtttaaaggaactggcttgttgtttcatccacagcttttacaagtagaaagagaatagaaggaactatcatgtactaatgtttgacgcgaacagccggacatgtgttgtattcatgaaaatgagtgaaggatatgtgtactgtaattctatgaatcaaattattgcaacctgcttcgagtaataacaggtcgattagcagtataagttgggtttgtcatttgtttggcttttgtatcacataattgtcttcttcgtgccccctgcaaacccaccaaagtgtaagactacttgaagttccgtaagcatttcgcaacgtcttaatcacccatgaatattaccaaatatgggacaaggagacaccttaatcttgagaaaaatatggagataagccaacgtgctcaattgggtgatctaccctttgggctcgtggctgacgagtgtgacatccttgtaccgagcaagtatgtttgcttctcaaatcagcttttctggcattacttggttgcccatatattggcagaaggaaaccatgcacaattataatatacatatggaacacattattactcagcaatcaacaaatgccgcagtaaggaaagttagtaaaaaccacatatttttacacgagcttcagtttcagatgtaagttcaatagaattgccatagcatataatttagccacagggagtgagcttcttgttgcctgcaccacgagggttatcgtccttccagtcatcccatcctctcgctttctcctcttcggcgtcctcgtcctcttgggctgaccgactgccatccttgtgccatgcggagtttgattcttgaatcatcttggcagttctttcttgccatttctccatcattttcatctcacgtaagccagcttcttctatgctcatcgttggcaacctaagaattattggatcaaaggatagtctcatatgcatattttcactaacttttaggactgaacaatgcaagatcactttaatagagatgatctatagctcaacacttaattgctgcaggggaaatctaatgttttttatgagcaaatgtagaaattgcagcagaatagtatcatttcttggaatttttcatagattatgactaaacataaggtcacacctacgaatcactatctcagcatctatacgattgcaccaagtgttcgtagtcacaacagagtacaagacaacagtttattgtcagtgaatctagtattgcactgaatagcaaacttaacatggtgccttttcagcttgaaaaaatgattaatttaacagtgtaaaccacgaatttgtcacggacttatggcagaacatgcaccaacaggacaaggaaacacctacgattgaataaacatggtcacatactaatgtggtgaagcaaatacaatgtaaaggaccactttacaaatttaccaagaaataatttgctcatcgagtaatgctcaacgaaaaaggaggtcaaagttcctacaaatatatcaaagtatgactagtatgatgcattaaaggttgccacaaataatgcccctccacattctgccataaccgaagttcaccatcacaataaaaagaagcagtgcagtttcagccaggtatgtagtagtattttaaagcatacctataacttggctgaaaaacttgtgctgccattctctctctttcactggttagtcctccaccaacaagacttgcagggccaaatatcagcggctggtgtttgtgctcatgtgcttgtgaaacacttgctctaccttcaatgacatcttgagcaaatgttgcacaagtgattggatcagctggtttggagtatggtgcacggttggcagcattatggtgccatgcttcagccctttttgtacgttcatcaagcatttcacgagcaaatgcattaccatcctaaaacatcatgagcaggaaattatttcattactaaaggaaacctccatgtaagtgcagaatttattgaaacagacatgcaacacaaaggaagcaaagataaaaaaaaatctaattgtttttttcttacggtagaacatctaccatcgagtgctataaaaggatcatgaaaacaaaatcaaacatctaatattacttgcatgtagtaacaacaaaacactcagcactctgcagacactgagagagagagagagagagagagaagtgtgatgaaatacttgcaatggcaagttattatcatattatgacaattaatttaattgtatctcctaactcagaatccggtgtataatttttttcaaacagaattactgtatacaactatccagctacctacttggtcatggtctacttggtgaaggtaagctctactacaacataagctcaaggcaaagcgaagttcaataattgtatcagtaaaaacacaaccagaaatgtacagaacggttatagaagaaaagttaaaaggccaatatgatactggaaaggatcaaccaaagatactattgacgagaaattggcaaactttattcatttgttttaccttcgctttcctttcttttactgccggaagcatttcttcttccttctttaacatgtcaagaaggtcaaaagcctataaaatgaagtagaaatgagtgcgtctgatgatcaggataaccaaagcgagcacagtagcttaaaagaatgcaaataaacatcccaagcagtataagagaatcattcttgcccataaaacacaaaccttgcatagagccaatgagatagtagctaaccatgcctgcaacatagaacaaaaaaaaaaagaatcaaaaccacggcataaccatttatcatttgtacatcaaagtgagttatgacaggcatggcatggaacccaaactttggaagcacacatcgacagatcccaaaaggttgattgcccacaaaagtaagagatcgtatataaaaagcacaggaaaggcaatgagcatcatattgttacaggaaaaagattggtggtgacaatctgccagtacagaataaatacgctgtgtgtttcatttgaacaaaaatgggtcaattcaggaaatgtgatcagttccctatgggattttttaaaacttatcttgaatcatcaaatttgtcaaattccatcttttattgaacagaacaaagcctttcctttccttctcttttctggaaaaagtaaatattcttcttccacttctagtacattgtagctaattttagtttggggtattttcaaatatgctatgtggtaatttaagaatatatcacgatgtttccatttggtaaacaagatcagatttgctacgtaaatgggttctaaatgcctggtgctaactgctaacctctctttcttcctctccatcatcctcaaaagcatcttcctccccagcttcaataggagctgataaagcagctgctctcaatgaccgcctacgcctttctttcctctccttgatttctaggagctttgtttctgcagccttttggcgcttgaaccgtgcaacctaggttcggcaaacaagaaaattagagtggaaattaaccgactttggaaaaggtcaagcagattatgagtcccagattttgcagtctcaataatagatttggatcccagtttattgtgttcgtaaattgcagaatgattgatgacccctttaacatatttgagaaaaatatttcgtcaaggctcaccttctgtgctcttcgatttgccatggtatcaggttgcttctgcctagatatttcaagctcatcctctgatataagctccagtgcttcacagatagaaatgaattcctgtgtaaccgtagtgattaaaacatgagaaacatgagtgttgtgatgacagagtgctcccaattgaaaagggcataagaaagacatgacaaatatgcaccaaatcaactaaatgtgacaggacaaactgatataaccttcaaatgatcctgcgacgccttaaggactgggatccgatcttcctgcgctaccctttcagtcatttccccaaggtagtacggtacctgaagaaaatcaatcggaatcacagatataaccacatgtcgcagatgcacaaacatgatacggtaagagaaacgaatataaacgcagatgtagtgcaggaaacaaacatacgagtaggtatttgaggttggcggtggagatgtcatccttggtctcgttggaggagaagaggccgaccttactgaccatctcgtcgcaccgccgcagcaggtcgacccccttgcggatcccttcctgcaaatatcccaaaccaagcaatcacagtgagcgctcgcacaaaaccgccacgagagggttgatggggatgaggagaaaggggggtgaatcgaaggaaaacctggtcgagggaggagctggaggcgagggagtggaggtgggacgccttgtcgaagagggcggggagcgggaggtcggcgtcctcctcctccgccgccgcggcggggtggaggcgcatctgcacctgcatcttgttgctgacttcctccacctcgaccattctcagtcgccgagcgcgcgagaggggagagatcgccggctaaaaccctaccggagcagcgccgcgcgaaaggaagggaagcgacgcggaggaaggaaggaagggaaactggaaacgtcgggaagggcggaggcggccggatttgttgacggggaggcggggctcggccggaggtgctcgatgggccgttgatgatcgatccaacggcagaaatcgctgtgttccgcgcactgacgggcggcaataatgtttacagaaaaacccctgtttcgggctatttttttcacaaaggttatcctaattttggagacgactacggatcggacgtccgatgctattgttttcgtcggacgcctgttctactattgaatccacgtccatcccttcatgtccatccgattaaaagaactattacatgcgcatgcagagaagagcagcaacaagaaaagtttaactgtgcatgctcagtaccaaatgagagaggtacatggatagtgacatgcttcaaacttttttctcaaaaactatttatccaatttacaatccgattgctctgttgtattcgttgtaattaaatctatataacaagatatcacatcattatattctaagaaaaaaaataaatgtttcaaccgtttggacttggatctttcacgtgtgagaaataaatgtttcaattggaatttaactatgttgcacattttaagttttatgttgcagtagatctttataaatattgcacgtgatattatttagatgtttcaataagtattttctaatgtttcactaatttaacgtaaatgttgcaccggcgtttttttagtgtctcaataaatagttacggtgttgcaacacttataactcgatgtttcatatatagaataaaaatgtttcaattaggatttaacagtgttttgttcttcttatttattttttatcaaaatgtaatcaactaagatcttattgtaaagatttaattgcaacggatataatagtgtaatcagattgtagatttaataaatattttaggagaaaaatagtttgaagttactaatgcagtaatgcatgcatagcccttttttttacatacatgcacacttatatgttagagtgaagagtgaagtactaaggagaaaagtaagagaaagagagagaaatgtgcaaccataaactaggctaagagaaaagataagagagcagacatatagtatgtaggtcgtgagcagatcacgtccaattttgtttggtgcgtcagacgtttgactgcaagcattttcccctagtttttgcaaaacaccccttgtggtttgttttcaccctaaggtaagtaacacaacagttccactaactccatttcatgttatagatctttttaactttttttcaaactaaatttatataaaaacttagcaacatctataatgctaaattagtttatgacattaaatatattttaaaaatatatttgttttcttacaatatttctatatatttttataaattaatcaaactttaaaaggtttaactaaaaaatcaaagtgacttacaatataaaatagatgaagtattatttttgttaaaaacccccgttttagcatcgatcatttcaaagatcatcgttttttgcgagagaatatatgtgtgtggaagtttttgtgtatgtgtgtgcgtgtgtgtggaagagtgagtgtgcgtgcatgtgaacaacacttttttaaggaaagtgtgaagaacactatgtgatgaatctggtattaacccttgaaagttgtgaattcacttatggttaacatattaatcagatgaaagaaaacttatagttatgagtacacttgcacacaaatttgtgtttaatagttgtaataaaatttatgttagtaacatagtatgctagtaacacgtactgtactaaactctttcatctagttatgagtatcttttattagcagtagacacgaattatcaatttatcagtggagtatatgttagtactaacatgctactagtacatgaattctatgtttcacttgaacaaaccacatattcatggaacttgaaagaaagaaagaaagaaagaaagaaagaaaggaaaaaagcaactaacttatggtgatcacctttacaacgaaatggcagcattctgcttccattacccaaaaacaaaatgtttcaaacaacatgaagaaactttctttccatagactaacaggaaaaataactcaaacatctctttacatgtataattgttcaaactgctaagtattgccaactgctccagacaaaaagatcacaaggattcatttctcatccaatctttcaaactactaactaagaagccacattctattgtgtggccatttacactattatgtaaagagatgttcttttctttagggtctcaccatctacttccttggtagccctcaatctggtttctctgtctactgtttctttgctgaatgtacccaccactattccttttccttccagatatgctgcttgggtcctggtatctattcctgttgatcccattgaagctagccctgttatttgatgaatgatgattgttactattattccaattgccccaactagaatccgccaaggcactaccccaaccagagcaatttttactccactcattccaagattcatgctttgttccccagtccatgttggatcttgaatcttgctcccacttgttaacttcggtgggcttttctacatagatgtcccagtttctagattggttctgcctctgctggcacttgttatctgtatcagtgctgcccaatccatcagctgggagtaactcatcatccatctcgaatggtaaccgtaccatattcaggtcagctatcaactcagggtcgatcttgctattgtggtcaaccttgtcaatatacatatcagggtctggcaaagatatgtctgaaggttgaccatggtaattagcccagaatctagcctttgcattcttaaaattatcaaaggcttctgagtcatcccattgctctatgttcttatacatgcagacatatctcttgttgtcacagaacctgtgccaagaaatgccgccaacataaatgcaaaattccctttcccataatgggattgggtggcaattgtgtcctgtaaatacgaaagcaatatcagattcattgtagcagcataaaaatgcagggagatgatgaattctaaaatgtttatacaaacaaataacatatacaaaaattttctggctagattgcttaagactactgtacagattagaaatcacctgcagattttggacgggtcaaatcccaaaataccagcatcccttctaaaagtatgggaaacaaagacaccaaagtacccaacggttactttcctaacaggctaaacagaagaaccattcaaggtactggataaatgggttcagtactaaaacactactccttctaagggatgctcctttgtcgccacacaactgcgcctttcatgactactccctccgtcccaaaaaaagacaaaccctggtttccgtgtccaatgtttgaccatccgtcttatttgaaaaaattatgaaaaaaattaaaaagataagtcacgcataaagtattcatcatgttttatcatctaacaacaatgaaaatactaattataaaaaattttcatataagacggacaatcaaacgttggcacgcaaacccgcggtttgcctttttttgggacggagggagtatgtcagttatctaatagtttatttttaatagaaattaataatgtctccttacgcatatcatggatttaggatccggctgcttgaggaaaaaatgtaatggccacataagaagttatcaatagccaacttaacattttgtgtcccctcattttttctgaagatatgcgcacacaagtgctccctctttttttttatttgacgttgaactaaccaaagtcaaataaaaaaacagagggattagtttgcttattgcaataccattacagttcaaactatgaactgatacttggtagtcaaataaaactagcattttctgacatttgggtaccttttcaaatagtaagacaaattagaccaacaataataagcctaatggtaaaggaagtcgcagtagcaactctggttctaagcttaaattgactgcatcacacagtacaggacagtccaccatctacgacagttgtgtcattcttagggtggcaggaaacaaaatgatattcatgcccattccgagaactccaatccacaggaaaatcgtcagccaacaagaaagtactagacctagatatctagatcgaaaattttccaacccgagtcttccctaacaaatcaccatctgaacaccactgtacagatttagaaatcacctacagattttaaaaatcgcctgaaatagcagcatctcttctaaaagtatgtaaaaaaaaagacacccaacagttactttcataacagactaaacagaagaatcattcaaagtactagataaaagggttcaatcctaaaatactagcattccttctaatggatgctcctttgtcgccacacaattgcacctttcatggctatgtcagttacctaatagtttattttaataccaagtaccaacaatgtttcctcaagtatatcatagatttaggatcctgccgcttgaggaaaaaaatgttaagcccacataagaagttattgatagtcaacttaatattttgtggctcctcatttttctaaagaaatgtgcagtaagtacagcgctttgttttctttctccattaagtacaacctcaaccagatggctgtgatatggctaatgcaaagcaacgccattacagaggacaattcccttaatctcctatccttgacatcctcaaaagacaagccttctttagtaccaacatttattgtacttttttgcattgtgtgttaatgtggttttactattttgaagcttctagaattatcctaattttagagaaataacttgtatgatcataataacataactccgccttccatttcctagggtaagcttactcagatcagcttaacttttgatgagtcaaaagcagatagagtaattcactgttaaatatttttacaaagatatgaaaataagcattcatttttcacataggaaatctggaaattcaagatccccttgaaaaatcgaagtgttcctgtggcttattttgagaaacagtatactaacgaaagataatttaattagaagaggttggtagaagggggataaattttgtcaattatatgatacagcagaatcaatgcaacacctttttatcgaatgccgaattgcaaaactgatctggaatgttgtttgtagcctttaacttgaaaccttttagagacataaatcatctttttggtagttggatgtagagctttcagaaaaacatgaaacatctcatttgggttggtgtggctgctattttatgggtcatttcgaaaacaagaaattctgcttgttttaagaaacaacttcctggagatcccacagatttgatttattatgcgtcattggattacatgttgggctgatttgcagatgcaggaggaagagcgaagaaggctgctgtgggggggggggggggg

SEQ ID NO: 8271 - DNA, 37195 bp, Oryza sativa
ggttggaaaaccaggactataggtgggttcccacccgggagtaaaactcgtttatccaccagtgagtggaagcctctgatatatatacttgcattgcatatagtagcggattctcactttctcagttgatcttcattcggtgcacgctgacagaatattttacatgcacgtacacggctgtcttaattagcacactactacagaacatcatgtcgccactatagtgtcgccagtataggttccggtaatgctaaaacctgtatttatagacctttttccatcttcgtgggttgaaatcgtaaaaaactgacactttaagtaattataggtgacacaaaatataatagacgtcggtttttatttagaacagacacctttaatatattataggtgccggttaattaaaaccgacatctataatatattataggtgcactacaagaaaatgctttgtagagacatttttctagtactatagagacacttttcaaatgcttttacaatactatagaggcgttttaaaaaatgtctaataaatgtcttatggtgaattgtctctacaaatgaagaggtattttataaaatgtctataaagtggtagaggcattttctagagacattaaattataccacaaccatatgaaaccaatgtaaaaatgagaataaaatattttcccttgtttttgccaatccttgaactcatgatctcttgaacaaatcattcttatcttcaagacactaaccaactcaacccatgtcattcattgtatatgtttatgccttaagttacttatatttagccatttagtatacttttattgtaagaagtgtctctacagagtttaaagtgtctcaagcaaatgtctttacatgttagacacattttaaagtgctgaaagaatgcctctacaagataaaatctaataaaatgtgctgaaaatatttctaaagtgtctctagagtaaaattttctagacaattttgaaagtgcctctataaagtgtctctacgctataaaactcctgatcttagaggcaacttgcaaaatgcctctacaaaagtgtctttatataatgtttttgttgtagtggtgcccgtatcttttaaaaaaaccgacgcctattgaaatcgagtcgagccggcatcggatgagccgaccggcgggccccaccaagacgaggcgaggaggagataaggttcgatcgtcgtctcactctcttctctctctccctcccttctctctcgtctcactctcttctctctcgtctcgctctcttctctctctccctcccgtctctcccgcgcactccgacggttggccggcggaggcggcagtggtgaccgcgccctcccctccgccagatccgggcatccggtgggaggggaggcggcggcagggagctagaggggagcccgtggctgcagctgcccggcggccggacgggaggcggcggcgacaccctcccctccaccagatccggccggaggggaggcagtggtgcctccgctccaccagatccggccgggaggggagtcaacgacgacaggaggggtggcagcagcaagtggcgtggctcacgggcggtggcggcgacgacctcccctctgccagatctggcgggaggggaggtaatggcggcggcggagccctcccctctgccaaatccggcgaggagtaggtagcggcaacgacggcggtgggctccccacgggcgacagtggtgggctcccttgtctctcctgccaccagtgagcacccccaaccgtctccttcgcttgccggctgtgccattgttgatgtttgattcgatgatttaatgatgtttgatgtttgattcagtgatgtaaacttgttgatgaatatttgattgtgtgatgcatgaatttgttgattatgtgatatgtcctttttctagatttttgatttattctgtgagatgaatattgccaaattttgtgattgtgtgatgtgttcgttctgttcttgcggatgtgggaggagggactgcgatcgagccagctttttttttattcgtcgaaaaaaaggtgccggttctaaggaatcggcaccttttttatttttaaatcagtgccgcctcccttatgccggttggaaaaaccggcactgaaggggtttcccaaccggcacttaatccttttctgtagtagtggcacccaagcctggaaaagatcgacgaattcgatctgtgcgtgatcgattgccaacgttttctgaagatcgatctttcatttcaattcgcatatcgttaggtcccgtattttgattaattgctactactagctgctgctatacaagctactagcaagcttgtccggtcgtcagtgcaaaagtatatacgtccatgcaaagcatcccggcatgcagctgctcagctcctccatgcctccatgctcgctatctctctgcaatctgcagctatgagaattatttatttttatatatcgatctgaacctgaagatagctaacagcatgtatgctggtaatactttgaccacagttgaagtgtacagaagaccaacagccttttattagtggtggttcaattcaattacttcagcatcttatttgccagagagaccagcaacagtggttgatgtcaactgtacagtagcacacatgtgcagacaacacaataaaatgtacagtataatacactgcgaaagtatagactatatggatgtatggtcatggataagtagctgctactgcaattctacaacaccactcgctggccggccatgcttcaacatttattaattatatgtcgttagccgcttttgtatgtattaataatccttgttaattactagttgttagtgtaactatagctgccatgaattactggatagtgaaagtaacatctcatttagctgaacgcacaaagttagctagtgaaagtactacttcaattcagtactgctgttgttcatcagaataatgctattgctagctagctcggtccattgttcatgcatattatttgcaacaacctacctatcaaatcggccaatatgaaacagtagagatctctgtagtaatgtatcggagagcagacaaaaattaagcatgttttgaagtgccgaggcctaatgaagcaatgatcagtcaccagtaatgcatctgcagaaagatatacaatcataatatcatgcatgctagggtagatgctgcagagcagacaaggttgtattcgtgatgggccggaacacaaagaattcttgggccaggccgaccgtccgtttgggtttgggttaggttgtctcaggctctcagccagtaccagcagcgttcagtattggactatgtcttaaatatatagttacatttttttagataatgacatactagtatatagttagataaatcttcaaaacatatcattcgatccttagtccaaggagattggccacaaagtaatctgttctgtttcttcctagtagatgagctagacatgtaccaagaagacagagatacccaagtccattggaaacagagtaacaaacaagtatattccaacaagaaatgcttcagtgcaaacaaatgatgaacttacaaggctacaacttggctaatgtacatccaaaatcctgaaacccaggtcataatttataagcaacaaactaatacctttttcttgttctcttcgaatcatccaatgacaagaaatgaggcaagcatacacgcacgcatttttttttctcctataaattcaacagctgccacaacattgaaaccctgctcctactgagaccacctgatccaactatactagctgctggtaagtggtaagtgatctctcattaattacttggcatttttatcagaggaattagttagcgttttttagcaatgttttctggtacggacgcatcgtcgccggagctgtcgctctgctcgccatatgggccgtggacgcaaggccgtagcccaaccgaggagctgggcctagctctgttggagtgtgcggcccacgtagagactgggcccatggagaaggccacgcgttgcctcgcgcgcgccacgggcctcgccgccgccgccgccgccggcgacgggccgcggaagcgcctcgccgtggcaatggtggactgcctcgcgcggcgcctcctccgccccgtccaggccatcaccgacgcgctcatcgacccctccgtctacctcgaccggcgttccgtcagggcggcgcgccgcgggttctttgaactcagtcccttccccaaggtggcgttcgtcgtcggcaaccgcgccatcgtcgaggcggtggagaacgagagcttagtccatgtcgtcggcatgtccggtccatttacccagccatgccagtggatccagctcctgcacgagcttcgccgtcgcccggaaggcccgccacgtgtcgttcggctcaccgtcgtccacgacgacggggagttgcttgccaagatggaagagttggtctccgacgaagccgaagagctcggcatggagttccagttccatggcgtcgtcggccagctcgaggatctggacttcagtaaccttcgcaatgtccttgagataaaatccggcgaggcgctcgtcgtcagctgcactctgcaactgcatcgtcttcttgctgctgatgacgatgcgatgtatagctctcgctctgcccatctcaaccaaatggcgagcatcgcgcagctccagcacatggcggtgaattcgtgcccgtcgagtagcggcggcggaagcgtgcagtacaaagacgatgacccttaccgaagcccggccacaccgctgacgttcgtctcgccaccggtgtcaacccctcacttccagacgccggcggcgctggcgagcttcctgtcggcggtgcgcgcgctgtccccgaagatcctggtggtggcggagcaggacgcggaccacaacggcgtctccttccggaagcgcttctgcgaggcgctccaccactacgccgccgtgttcgacagcctcgacgccgcggccgccaccacctcggcggcgtcgcgcctgtggtctcccgacgaacgcgcgcaggtggagcgcgtcgtggtgggcgaggagatcaagggcgtcctactccgggatggcgcgcaccggcgggaatggcacgaccggctgcggcaatgggcggcgcgcatggagatggccgggttcaccggcgtgccgctcagctacgccgccatcaagaaggggaacgacatggtgaggcgatgcggattgagacgctgcgagaacaaggaatgcggcggctgcctcctgctgtgctggagctcgaggcctctctactcgatctcggcatggcggccggcggcgagcagaggatctgggtcaggttcagagagaagcgagtacgtacatgtcggtgccgagccagatgatcgatgactccggtataggggtgggcattcggtcttgatcttcggtgtttcagtcatttcggtctttgaaaagtgtagatcgaattttaacgtaaaaatgtcaggaccgacaaattcggtcttggttttttcggtctcggtcttgatcttggccgaaattcaataatatttttataaactcaaagaaataatgaaaattttcaacacaaaaatcacaaaaaatttttgtaaacacgtataagtaaagactattattagattgcgtgcctagaagtaggatgttgaaattagagtttaatcttattgaaattagtggattgtgtgttgcatttagacattttttttaatttggtctattcggttaaccgagaagactaatcgaattgaccgaataaaattcggtctttcactgcctagtaccgtattgttgacggaatttctcattatcggtctcggtctttcggttcggtttttttctgcccacccctactccggtacatagctttgatgaccaaccagacgaaagagcatgcatttgtaatttagttttcaatttgtaacttatttctttttttttcatttttttgcgagattaattaatctgtataagaggcagagagttcttgagttgcaattatgtggagaggagagattcgagagaatggttagctatgaaaaatctaaaattatgatcaaactcattttttttctgagattagagtgtggccattttgatttgtttgaaattctagttagttttgggccgaatctaacaaggaaaaagtgtaccgaaggtccctcaacttgttagcggtataaaaaacatcctcaaaccacaaaccacatatgaagggtcccttaactatacaaaaccggtcaccagaggtcctttggtggtttgaccggtcatccgacgtccttcggtggttttgacaccggttttggtctacgtggcggctgagtcagtgtgggacccatgtggaccccacatgtcagcgtgccacgtcatcaccctgtatttcccctttcttttttctcttctccgcgggggtagaacggaacatgcggcggcaagcggtgctgagcagcggccggcgaagcggagaggagcggaggcgcggagcgccggtggcggcaggcgggtgagcacggtggccagcgtcctcctcctccatcgccgcatcgacggtgtgtgccctgcttctcccggtggtcgtcggcgtcctcctcggctcctcctcctccgccgccgcatccgcggcgtcaccggcaccggcatcctctggccggcggagcccgccgctccgttcaactcgcacgcgatgctcagctcctccacgagctactccgccgtttgcccatgagcgccacgatgctttccgccgccggctgcgcgcggtcgacgagcacggagaggagcagcgaaaggttctgcttcagcgtgcggagcgccgggcggatgcgggcgtcggcatggacagctcgaggagctgctcgtccattgcgccgtcggggaagctctcgtcctccacgccgccgcactcactcggctcaccattgtagtcgtagcaaaacaaatctgtttcagacaaaagcaaactccaaatctttgatcgaacaatgatcttagccacaattcagtgtgatcttgatctgaatcttgattgttcttaccccggtactgcacattgttgatcaccagcgtcggcaagatggtcacatcccctctagcgccatgtccaacctgcatcaagaacagcaatggcgaaggtgttcgccagtcacacaccgaaaatcctgcatttttcagcatcaagctggtcagttggtctaacaacctgaacaatctgctccgtcttgagcgcgtcgttctcgatgtagtcgtagcacccgacgctgctgcactcgggctccgtgtcccagcggcagaagaagtagcggtcctcgtcgccgtagaacccgggcgtgtccagtacagcaggggcgatgcaggggatgaggcagagcacccgcgccgacggcgtctcctcgatcgagtactccggctcgccgtaccgcaggcgctcgctgcggccgccgccgccgacgacgccgaggcccacgccagcgcgccgcaggttgctgaacaggcaaaggctgtgcaccgcgctgcccttcctcgcccagagcaccgccaggcgcagcagtcgccacgctcgcctcccgatcgacgccttctgctgcttctgattcgccgctgctgccgccaccaacgccattgccgcaaataccagattcagcggaagaaaacggtcgcaaaatgctcccctgctcccgcgtcgccggctgccggacctcctctcccgcctcgccccgtcagtctcctccccacccgctggttgccctgcccagagccccagagagaaaattgagagagagagagagagagaggaggaagggagagaagagggggaagagagagaggaggctgacgtggatatactgacatgtggggttcgcgtgagtccgcgtgagtcccacgctgactcagcagccacatatgataaaatcgggatcaaaaccgttgagggacttattgtgaccggtttttattagttaagggacgccggatatcaggtattgcggttcgaggacgattttgtatcccgctgacaagttgagggaccttcggtgtactttttccatctaacaatgccaagacgggccagttcttatgggctccaagccccaaaggcccaatcaaccatacgcaaaggcttcggccaccttctccttcttcccagtccccacactgatccgccatgtcgcgtcggccgttcggcggcggcggcggcgatgtccgccagtctccaccggccagccctcgcttctctactccagatcgaggcgggaggctgcggagtccttggtgtatttgcgcctggaccccggctcccctgtcgcggctatcacccgtgcaggagtagcagcactctgggttccgcgtcattgacaccgcgacgctggcatatttcccctcccggactccggatcagggacgttctggtagcagtttgtgctttcctttattgcacctttaaatttgcaatgcgaaatgttgtggataagttttaatttagaaaaagaaagtgagtatttactacagtatgtcgctactgtgctaagtgcctttgtggttgtggatgatgcgtaccatgtaacaagtaagaaatcacttaagctgttggtactaagcgttaccaattttatcgaattaacaaaatttcattctgatcaaatgctagttatgatgccattgggctaaccggctaaaccctagtgaaaaggaaacacaatgcagctatactaataaagaaaaacagaccaatgaaatgtgcatctgcctgaaatgtagaatatataacccggctgaaatgtagaatatataatgtgattcttcccttgttaaacccataatctttcacaacaaatatttagggtctggccaacagggcagttgggtttgctagaacctgtgtcctaccttagcaaataaggatgctaaccgcataaaaattgctaagatattagtatcacttaacagtatgtactgcatatattttctcattctaagtaggtaccacatggtccacatctcttctttctatattatttttttaaaaaaccataatttaataagcttgccaaaagttccatgcatagtagtattccatagtccaacgagattgaccccaatgtttgtcagttgctacctggtggatatgaagaaaccaaagggacaaattcgaacagaacaaactgaacattcctatattattcctttcattgcggacatgccaacatgtaaaactttgcctataccgtgaatccttccaaattgcctaatgtaattctatataaaaccaaaaatctttattttgttctatcagttaaagacatgagttagagtgctttccttatgtatcacatatgtagctgtgcataaaattggagttactccagcaaactcagccaaacaatacttcctacttgaccgcgccaatcttttcctagagagcagaaaataaaatgatgcatgggctatgggtgcaagatcagggtgtggtggatcacttagcgcagctcgtccctctcttgcatgagtgtgcttcccatgtaactgagggatcttttgagaaggctgacttcagctttaagaagatcagaatgctcaccatagctgacgggccattgcagcgcctatccacgatcattgttgacagcctagctcaccgccttctctcctccatccagggccttcctggtgcccttatcgatccatctgattactttgagaagtcaaccctccgggctgcacgccacaacttcttcaagctgaacccctacctaagcaccggttttgtcactattaactgggccattatggaggcaatggaggatgaaaaggtcacagtatgatttgaatgtgcttttagaaaaaaaaaagttttcaatagatatgcagcttacccaatacattgggatctgtcattgctttgtggttgaagtatgtatttttgtcacctgcttaatttggatgccaagtcttctttttttggctaatttatttaattagcaatttagcatggtgctagaatataattctcctttccaggccatataaactttatagcatgctgacttcccagaacatcaatgtttgtcactattgattcaagaactagagttgatactgttcctttctacttttctaataatgctgggcagtgtagatttgttaagatttcttcccgaaaacatgccgaattttttggagatcaaagtaaagaccaattagagatgcaatagttattaatgccattttaaaactttcccattataactttaaaactttacaaggtgcaatttatgttgaaaggtcattaatgtttaacatggtaggtaaaattgatatacatttgcacacaacattctttaagaacaaagtcaggacctgcagaattgttggttagcattagcgagcattactgagaatttgagattatttgtaccatgcttgtaatcttctaacgcaggtagatttgcaggttgccacattgttgacttgtcctgctcagctgctcatccatggcagtggcttaagctcctcgatgacttccatggacggcctggcggggcacctgaattataccttactgttctccatgatgacaatgatttcttggcgacatgcagtcattgctatctaagaaagctgaatctcttggggtgtccttccattttatttctgtgataggcagacttgagaccttggatttcagcaatctccgtagcacctttcagataaaatttggtgtggcagttgcaatcagctgcgctctacaaatgcatcgcctcctcttggttgatgacaatttgagctccaccagcattgctcagctccagaaaatggccaacttcactcagcctaagcaaatggccagctctgtgtgcagcccagcctccacactgaactatctgcagacaccatcccctcgtacaccaaaattgctggcaagattactgtctgccatccgagcgctcaagccaaacatcatgttgattatggagcaagatgcagaccataacaccctgctgttccgtgatcggttcaatgaggtactcaactactatgctgccctctttgactgcttccatgcagtggctgcagctaacccagggaggactgatgaacgcttacgtgtggataggatgatcctgagggaagagattaaaaacatactggtatgcgagggagtccatcggcacgaacggcacgagaggctggaccagtgggcaatgcacatggaggaatctgggtttcacaatgtgcaacttagcttcagtgccatcagggagggtaaagagaatctgctgagctttggattgaaaaactgccagaacaaagaagacaggggttgccttctactgtgctggggttatacgaatctctactctatctcggcatggaggcaaaatagaggttcatcctctgggagcagagagcatatgttagttcaacgccaaataatatggccattccagtaggcctctctgtccgtggcaattagagagcagcagactacatccaaatttcccactctgggtgctctgttcagcatatgtctggcagctcaaggtacaagctgataatgtgtgtttgcagcaagatttgactcctgcactaaagatatgctaataagttcacttggtgtaaaaaaaaaaggatggtataggtaggacatagaaatatcttttggtgtgaagtatgtaaagaactgaaaggtctgtgttttttttttctctttgaaaattggaaccaacgaaatgggattggcagagatgcttaattcatcatcgatccttgaatgattacccatcatttcgtagttttctctgtttgcaaaatgattatgtttcttagaaaatggtacttatgtttcggcagagtaatctcatatccaaagtttatgcgcctgattaagaggctgagaaactcctatggttatgtatgcaaattaatctcatattcctagcttttcctgcaaaaatagacgagaaaattaggtttggaggtaaaagaacaacaacagcttgggtccaaatgcgaacgtttgctccaagaaaggccccttgcaatcacctacacttcgacgtttgcaacttcagacaaaaccaggttttgtttggactaagaacgcagattttggagctattagtttcattgatcctgtgcttagtcatggactgcaatagactgggagcacaaatagaaaaaaaaaatcgtgactgcaatagactgggagcagaagaaattgatctcaaaattgtcagatagcatctgatccaaatgctggagataaattccaagggaataattccaagctccttagttattccaccaagatacagacgacatctcttagttctatccgaagaagcatccacttcttctttgtcccttcgtcgtcccatgacaacttcgtcgcacaggaacacctgaccttgcaacatttgtctcaaacccaacaatggcgacatgccaatgatgccattgcttgataagcttcacggctctgaaaactggtagcagttgaggctgtgctgcacggacaggggcatgttccaggacgacatgctgtcgtcggcgacgtcatcgccggcgtcgtcggtgtactcgccgtcgccgtcgccgtcgaacgggtcgtgggtgcaggagctgagccatgaccagcagagcgttcggctgatcggcctgctttaccagtgcgccgccgaggtgtccgccggctccttcgaccgcgccaacctctgcctcgagcacatcacgcagctcgcgtccctggacgcgccgcacgcgctccagcgcctcgccgccgtcttcgccgacgcgctcgcgcgcaagctgctcaacctcatcctgggcctctcgcgcgcgctgctgtcgtcggccaactccgccgacgcccacctcgtccccgtcgcgcgccgccacatgttcgacgtgctcccgttcctgaagctcgcgtacctgaccaccaaccatgccatccttgaggcaatggagggggagaggttcgtccacgtcgtcgacttctccggcccggcggcgaacccggtgcagtggatcgcgctgttccacgcgttccgaggccgccgggaaggcccgccgcacctccgcatcaccgccgtccacgacagcaaggagttcctcgcgaacatggccgcggtgctgtccaaggaggcggaggcgttcgacatcgccttccagttcaacgccgtggaggcgaagctcgacgagatggacttcgacgcgctccgccacgacctcggcgtcaggtccggcgaggcgctcgccgtcagcgtcgtgctgcagcttcaccgcctcctcgccgtcgacgacgggaggaggcacgccgccgccggctgcctcaccccggtccagatcatcgcgcgctccagcccgagaagcttcggcgagctgctggagcgggagctgaacacgcggctgcagctgagccccgacgcgtccgtggtgtcgtcgctgtcaccccactcccccgcagcagcaacggcggcgcacccgacgacgtcgacgccaaagctggggagcttcctgtcggcggtgaggtcgctgtccccgaagatcatggtgatgacggagcaggaggcgaaccacaacggcggcgcgttccaggagcggttcgacgaggcgctcaactactacgcgtcgctgttcgactgcctgcagcggagcgcggcggcggcggcggagcgcgcgcgcgtggagcgggtgctgctcggggaggagatccgcggcgtggtggcgtgcgagggggcggagcgggtggagcggcacgagcgggcgcggcagtgggcggcgcggatggaggcggccggcatggagcgggtggggctgagctacagcggcgccatggaggcgaggaagctgctgcagagctgcgggtgggcggggccgtacgaggtgaggcacgacgccggcggccatggcttcttcttctgctggcacaagaggccgctctacgccgtcacggcgtggcgcccggcggcgtcgcgacgcggccacactcggtcgtagctgtgcacgcgcatgtgttctctgtgtgaaattgacagcttgtttggattggatcatttgagtggagagaactgaattgatcagcttaattgtgttgttttcactgggagattgttgctatttgccagcatcatcatcgtcatccaaggtgctgcacggttgaatttgcaacctggttgcgatgttgagtatgagtgtatgacactattaatgtgacagtactactgtgatcgatgcttcacagtatagatcactttggatcataaagatagtttgtgaaaagtgaaactcagtgtttagatcactttgtcctgcagcttgagtgcttgacctcttgtctttgtcactgaaaaagtgcagggctagtttgcttttgaccggaaagttgcactgcatctcgctggaattgcatgcaccgttggtaagttgccccgcaattgcaacgcactgatgtctccggtctcccgcgcgctcaacatgtacaacgcatgcaaactgttttccacgggaagattaattaaggccccgttccaacgtgcctatcgggcaggcaattagctgcttggctttacttggagaaaacactcaattgacgtatgtttaactaagattgaataaacttaaaaatatatttacttaaagtttttaagaaatttctatagaaaactttgttttaaaacatcatacgtttagcggcttaggggttagaacacagctattaatatatgagtggattacaggacttctactccctccatactacaagggattttgggttacatatatatgaagtataaacatccaataataatgctgaggcacctatgatatgatgatggaatcataaccaagtgtgggagtatggtgttgcgtatatagagatatgtgtgcttgtgtttactgtaagtctaaaaattaaaaaaaaagatcaatggctggtgtatatgatggtatgtatgtgcatcttacgtataattaatttatactccccccatccataaaagttagacatatttcacatttgagtttttctaaataagttatttctatttgtattctttatgtatttaagacttaaatgaagagataaatttaaatgtttgattagaatttaaggagtcttctaaatactcattggttgcatacttgcattcactccatgattttgaaacatcaaagatgatttaatttctcattggtcttggtgacaaaagtaatatgtacaacttttgtggatggagggagtataactctaaatgttgacagtagtggtagcagtgaataaggccattcacaacccaatgactaagtggtgtccatagcattaaataagctgttaactaggatgaaaaatgatgcggcaagtgaataaatgaaaaaaagagaaggaaaccatgtcttgcatgagacatggtttctacacaatatccaagacatcatgtgaaataagtagcattaaatttaagtatggaatagtggtgtttgcattggaagagtggtgtctagtactagtttcttgatgatgtggagtttatggaaactatgtctagtgttttgggttgggaatggccttagaagagtagtgtgatgatgtggagtttatataaactatgtttagtgtcttgggttgtgaatgaactaagctaccatcactccgtatcattgacgtgtgtgcctctcaacatcggtgaaacttgtgtactcgctttcaattcccaatcctcaatctgtcctttgattctattgcaatgcacgggcaaatcagctagtaaaggaaaaaaacgttaccgatctaaactgaccgttctgttcatttcttctgtgaaactcgtactacgtacaaagagaacaaaagaaatcagtggagacaatgaacagcagatgaacgacacgtacatacaggagacgatcgattaacatgcattacgtacatcgatcaaaacctagtaaccaatatataatcacgcgcagccatacatcatcatgcgggcgaactcgtcgaagcagacgaacccgtcgccgtcggtgtccacgccgccgatcatgcggcggcagtcgtcgacggagcagagctcgtcgccgagcgacgcgagcacggcgcggagctcctcggcggagatcctcccgtccccgtcggcgtcgaacaccgcgaacgtctccttcagctcgccctcgtccgccgccgcggccgcgatctcctccagcacgagctccccggcgcactccgcctcggcgagcatcgcggccagctcctccttgctcgacacgatcctccgcagggccacctccaggtcctcccgcgtcacggccaccgccgccggctttttggtgccggaggaggacgccgccgccgacgccggcaacacggatctcggcgtggtggcggcggaatcatcggatgatgacgccgccaacgacgacgacgacgaagacgtggtggagccgaaggagcagctcttggcgccgctcctcctcttcttcctcctcttcttggaggaagacgaagacgaagaagaagaagagccgaacaaatgtgcaagcttcatcatggcgatgtctttagaaatcgagagctgaggaaggggcgaggaagatgagggggaagacgaggaattataggggaacaaggcaaggtgagcttccacgaagcttcgtgcgcgggaaaaccgaatcgcgcgggcctaccatttctgctgtttattcggctgggctttgaaggtttcagtatgtcctttgaggaggatacggcatgagcgagattttgtaccaaagttcacatacaaaattacacagacaatgactaccgtaccccttcatggtgcgtagtccactagcttgtgagttgtgagacaattcggaaatgtgggcctgtttagattccaccttaaaattttacaccatgtcacattgaatgtttaacacccgcataaattattaaatatagattaaaaaataactaattacatagattgcgactaatttgcgagacagatattttaagcttaattgctccataatttgacaatgtggtgctacagtaaacatttgctaatgacagattaattagggcgttgtttagttcccaactttttcttcaaacttccaacttttccatcacattaaaactttcctacatacataaacttctaacttttttattcaaacttccaattttggcgtggaactaaacacaacctaggtttaataaattcgtcttgtggtttacggatggattctgtaattagtttttttattagtgcccgaacaccccatgcgacatcctatataatacccaatgtgacacgccagaactttacacccctggatctaaacaccccatgtacttcagatttcccatcgaatgcaacttaggccctgtttagttcacacacgaaaactttttaccatgtcacatcgaatgtttggacacatgaatagagtattaaatatagacgaaaaaactaattatatagatcgtgtgtaaattgcgcgacgaatcttttaagcctaattgcgccatgatttgacaatgtggtgctacagtaaatatttgctaatgacggattaattaggcttaataaattcatctcgcagtttacaggcggaatctgtaatttgttttgttattagactatggttgtttggttgatgcctaagcttgccataactaagcttaggcaagttgtggcatgtggtaaaagtatggccaagaaatagttagccacaagtgtggcaatgttaggtctagttatctgagtatgacatgtgggacctaagggtagaaaagtgtagaatgacacaactgtggcattgaaacaaacatacgcctaaaaactgtggtatgactgaagtgtggcgtggcaaagtgaagcaatcaaccaaacaccccctataggtgtccatatatccgatgtgacacgccaaaacttttcacccctaaaagtaaacagggcctcaataccaaatgcatatgcatgcataggtgcagccagtgtctaacccataaaaaattagtgaggttctagatatacatataatctaattattgagtaatataatggttaatatgactataacaacagaaaatagacaagctacccgatatccggggactacaggaaagcttcaagtaggaacgtcattgggtgtagcatcatatatatgtgtactacttaactacccttcattttaaaatataataagttttagcctttgacacctatgtaagaaaatgagtaaataggcttggttgccttctcggaactggtgagttatagacctggactagttaagactatagtaaacaaaatgaatagaatgggtagttttaatggtaaaaatattgttttacaactagattgttatatttctgataaaatttaaacttttttcagggaaaaaaactttagataagattatcatatattttgggaaggaggaggtacgtatgaaaatgaagtttgtatcattatatcatatcgcatcttataatgttatgaatacaatagaacgatgatcaatctaaaatacaagaggattgcactgggggtgtctttttgtctattggtgggaggaatgttccatcgttttttcatgtaactaattaaaaatgtcaatggaaatattaaaaatatatagtaaaaatagattaatatataatatatacaataatgcagctcatattcgacttatacatgcatgtataatttaatatataatcatatttgttatttttttgaatttgtataagtcaaaatttaaacctgtggagtgatataacacatcttgccaattcatttaattttatttataatttatttagattatatacataaaacaaggaaatattcactcgaggaaaaaaacactttatttggattgcaacagataaatgacaaattgatcagcatgcaacttgagagagttttttttatctcgcagcttagattttcggcgccggtgttcacttcaacagttcaacacgcatgcatggatgtcggcagcaatcaacatcaacattaccacgggggcacacccacacaatacgtgttactcctaattaactaagttacgtgattgggtaagtcgtatgtataatgtgaacattatcaaacttaaacgaccggaatgcatacgtacgtgatggatttggggttgatcgcgatcgggaaggcgccaagaaacttcgcatgcatagctcgacgtacgtacggctgccaaaaaacgctccagtctgatgacttaactgacgtgtggacatgagatgatgagaggtggtttgaaaactgatgctcctccatggcgtagggcgtaccgcggcaacctcatccgctagctcgttcacactcacagcggtggacgtcttctcgctctcgctgcgcgctcaccgtcatcgctgagatgaactcaacgtacgtaggctggaattctgttccggcccaggttaattatatgggcctcacgtaggctataatcacgttccagcccaacatatatgggccgcgcgtagtctgtaaccccgttctggggtctgggccgaggccgcagtcccgcctggaccaacttatacaggccgtacgtaggccggagttcctttccagcacatatgccgctcgcctccggggcaataataagccggaatcactagttagcgtcgccggcagcgtgcgttttaggcccataaggcctagcatcgctgcgccggcgcgcgcgcctctccacgcctttttatcttttttttcgttttctttcctcactttttctgatttttttaatcttttagcatgttttgagttttaaagttttaaaattttgatttgaaagttttcaaatcttaagtttaaagttttcaaatcttaaactgaaagtttttaaaatttttaaatctggacttgaaagtttttaaatctcgattctcgagttgaaagttctcaaatctgagttgaaagttttcaaatctcaagttgaaagttttcaaatttttcaactctggacttgaaagtttttgaatctcgattctcgagttgaaagttttcaaatctgagttgaatgtttttaaaatttgactttaaaatttaaaacttaaatcgaaagttttcaaatctaacttaaaaaattttcaatctgttagaaaaaaatctcccaaaaaatctccagaatatattcttaattagtatcattagtgttaagtatattgactaatatatgtagttaagactaaaggggaggaagtgctcgccaactccctttcttggcgcgcacgcgcgccgtagcaacccccataataagcacgttggattaactccactttacgtctctacaattttcttttcatcgagtttaagtcacatccctgagccgcaatacaagaaatttttattatcacctaacttaaaccgggttaaattaggtccttcagcactggtttcgctgatgtggcaagttgaatacagtcaacctgtcctgtttgattcagcttaggattattataatctggattattaggagtaagctgaaataagcagataacttattatgatagattattacaatctataagccagattactataatatgataatccactctaaaggtgcttttttagattattgggtggctaacaactaacaaccaactaataatccagagaaacaaacagctaacagcttatcttatgtcggcttattataatccagcttaaaataatttggcttaataatctagattacaataatcttaagctaaaacaaacaacacctgagtcagcataggacccacgtggaccccacatataagtcacatgaaaatatataaaaaaagaaaaaaccttctctctccaccccccggagcacacggtagggacgacacacctctcttcatctcgagctttggcccaaagatgacacctctctccatctcgagcttcggcctcaggaagtaaggaggtgaaagccgacgatgacgaggttgaggcggggcatgggggaggcagagggccaaggacagcacggcccgccgtattaaagacgagagtgaggaccggcgtcacccaacctcgcttagcgcctaatcgccatcctggttgtccaactgtcacgccccgaactagtcccgaccggaactagcccgtgacgctccaaattaacctgttaatcgataccagtcccaggaaacagtgctggtatcacaggaagacagaatatcacagcaatagaggtctctttattatagagtaggagtacagttatgttgggctgcggacagaacccagctcacaactgcattacaaaagggaagcggaagccaagacttggaccaaacatcacaggcgcgacttgggaactaggccgaaaccctaaaactcagcgtagccggcttgctcctggaagaactcctcgtcagcgggatccgcttcatcttcttcagcaactggggagggggggattatttatatagagcaagggtgagtacaggagtactcagcaagctatgggaaataagtgtttaatgcaggcttcaaagaaatgccgttgtttttgcgattgattttatttaaactcttttctgaaacaactaagggagtgcttctcaaacgacacggatgagacagtgcgtctcgtccggtcggagtatgtgcaatgtatcagtcttttgaattgatcaagattggcacccggccaacagctttcaaacgaccacccgggcctggctgatcccatcagccgcagattttccaaacatcaaacccattccacaacagcaaatttcacaaggcagtagtcaaacaaaactacgctaggaatcacctcacatccgcccatgatcgtgggcacggctgttcgaacagttttaataacctctgcagagggggtacactttacccacacgacattactaacccggatcatccagcccgtgcagaacggccatgactagagaccttaaggctttcatgacaaggcatttcgaaagccgacacaggttcaccatatgccaacgagaggggtcccagaccaacaccagattaggtcccagaccatactgtgccaggaagcccaggggtcctccctgacaccaccccggcgaatccacatgtctcttagcatcatggctcccccgataagctagttactcagctaggggtgtcccattccacccatgtggtcgtacttgtcttatgttcggatgaaattccaaggaaacggtccttaagtgcaagagcgggaaaccgtacacccggtacgttccccggtccgcggttttggaaattcatttagttcgcaagcaccgacccaggtgtcgggttttccaagtcttttgtaaaacctaagttttacccaagatgtttctcagattttaagttttaaggcgaccgtcgatacccgtgcagagtgcacgattaccgaggcgcaactaggtgggtacaagggaacatggtataacaattacaaaggaaggatcagatgcaacaagttaggtaggtccgctaatctgccttgcagacgggacaagcagattaagtgcgatcctatcaatgcataatatttttcaagcaacataattaagttcaaatataggctcaagatgttcaaaggtggcttgcctcgctcgagatcttgagcttgatcctcgaaatcctcgcactgcgggtcttcgggctccgaaactacacgcgaaacgggacaactcagcaaacggcgaaaataaagccctattattgacctctaagcgtgccattagatagatctcgagatttgaggaattttggaagttgaacggagtcaaacggacttacggttgggaagatattgaatttataagattattggatttttggtctaaaggaaaaggatttatttaaatcctttttgaaaaaaaaagaaaagaaaagaaggagggagggaaattagacttccctcgggcggctagggcgcggcctgagagaatggggcggctcggccgagcttaatgggccggccggcccaagaaggcggcccaaggcgcgcgcgcgggcggggaggggagagagccggtgggccgggtccccatcccgcgtggtcccgggtgggacccgcttgtcggcgactcggctcaccgtgagcgaggtgcacgcggggcatgctagggtttgggaagggaggcgcgacgcatgcgcgcggttcgcggaggacgcggtgcggcgggcccatgcgcagcctcacggctcgcggtggagtgcgcgcgcgagggggcggagggaagcggcggaccggggtctgcttgacccggtcgcggccgaggtggcgccgacgtggcgcctacgtggctgccacgcgggccggcgggaggtagacgacgacgccggccggaacggacggcggacgacagcgcgcgagcggcggagcgaaccatggcgatacaggcgaaggcgaacacaccgggatgttgcacaggacgaggggagacgagccaatggctcggattcgccgggggatgctcgacggcggcggattgcggcggcggcaaccgacggcgggagaagggggaacggcgatgagttcacgaggggccgattcctggcggcgagagcatctacgcggctacgggaacccaccccttgcaccggattaggaggaatcgcatcgagggaggccggcgacgagaggcgcttccgagctcgggcggcgacggcaacgagcacacggcgagcgacggcagcagtcgaggcggcgccggctagctacgggggggggggggggctactcgtgctactacccgagtctaaggggaggagatggaacgaggagagagaacggagggaggcactaccgtgtgggggtgatggggcgcagtgacaatgggccgacggcacgggagcgatctctccggcctctggccgggggagaggaagaagacgagcgcccggagtccccttccgcgtcctaacgcgcaccggctcctccggcacacgcgacggcggcggccggcgagagagacagcaatggcgcgggcgagaaacggggaagattgggaggggaaagaggaagggaggcgcttgggtttatagggcggcgatgtcggtttggaaaccgaccttgggcggtcaagggagcgagctggcgctcggcgctcgcggccaaaacggcgacaggagggggggggggaggatgacgccggcgggagggaaaagggaaaaagggggagagaaagagggcttgcctccttgccgctttggggaaaaggaggagggagagagggcgacgcggcagaggagggagctctgcctccgtcccttggaggcacgcgcggggagaggcggggccgagtcgatgacgacggcgatgacggcggggcggtttggagtggagcggcgacacgggcggcagacgcggggcaggcgcggcaggcgctgacggcggcggtgactggccggtcggccaccacggcgcgcgcgcgcgcgcgggcggcgcggcgatttgggcggcatcggcgggaacggccgcgagagtggagagggagagctcgacgcggctcacgggcagagcggggagagagagagagggagagagagagagagggggagatgggccgagagggattcggcccatcgaacccgagggaagcaaaatagacttttgcggagggatttgatttgggaaggatttggattcgggattgaactcgacgatagatcagagatttgagatctgagatgacacggacactagacaacaagcaaagaaacggatttcgcaaataaggtttttaagagatagttttcccgctagacgccacgacggaacgggcgctacaccaaccgcggtatacacacaaagtttatacatatatatacagagtttatacgtatgtatataaagtatatacatatgcacatacatatagagaggagagtctaggggggaaatccaccgcgcaggcgtgcgaccacccgcacagtagcttacagacacacatcttgtagcagcgttctggtgccatcgccgcactcttttcctacaacaaacaccttcctctcctcctgtcgcccggacgatgcccttgatccgctcgacgcatgcaatacacgacgaagaaacctagcccattgtttctccatcacaacgcgtgtagactcgcgcttgctggaggatgcactgaactactgaaagtgttcgatggtatgccttaagagatatctgatgtcctgaaaatgctgtgctggacttcaggagttcgtctggggatcggaagcaggatcatatgccttcaggagttccttcggatgatatataggtaatgaaaaaagctcgatgttttcgcctctgcatctgtccttcgcgatttggctgagtggatggcatgtttagaagcacggagatacacttcgatcagttattctcaagtttggttatggagtataccagagatctttttctgtgcaaaatcagttattataagctattcttgcgcttagcaaccatgcatctcttgaatgcaacactatgcaatctgcagttattttctcactctcaaatccatgaatcggtctatgtaatcaaactagaaactgatattactgctgaactaacaatcacccagtttggtgttttatgttgacaatatataacaggctgtctttatcatttttgatccatatttcttaggacaagattctaaaggtatcttctaatcagtatagtacgttctcacatgtgtcatcctcgctaagaaaaggggcggtaataccccctattaagagctaaactcactgattgacgacatgatacaatttgatcttcagaagaattaataaattcttgtaagctcaagttgatcatcacgtgcattgacaaaagaaaagggagattcatatgaaaacactttagagatgctaacaaggtagttaatgtcaaaatgtcacttccagtttgaacactactcatgtcctcttgacttccgaatctgtctctcctcgcctatatatttgcactttacgctcccacatattcacagaatcacagcatcacaacaccagctaacaaccattagtccttggtgttctgcattcacttttcatggcgccctccttcccgctctcctttgcaccccaatcagccgatgaagcaaccgcacacaaggaaatctatgaccaactccggcaagccgtggagaccttcccgacggcgcccaacagcagcaccagcttcacgtacagtcgccaccccgacggatggtacacgttcccggagggggttgtgagtgccatggtcatcaagagtcaccttacggcgcgcaccaccgacatctttatggtcaccttccctaagtccggcaccacctggcttaaggcgctcttgcactcggctctccaccgcagggccgacgatctcgcggcacacagcccccaccagctcgttcctttccttgagacccaggtgttcatcaaagatcggatccctgacctgagctccctcccggcgccgcggctgttgatgacgcacatcccgtcccagtcgttgccggactctgttgctgactccagctgcaaggtggtgtatctatgccgggatcccaaggactgcttcatctcgctctggcatttcttgaacaggttcaggccgtgggacatcaacgaggcacaccgaaacttctgcgatggtgtctcactgtttggcccgtactgggagcatgtcctcggctattggaggtggcacgtcaagagaccaagccaggtactcttcttgacctatgaggagctcactaccgatacactcggccaactgagacgcctagccgagttcgtcggacgcccgttcatggtgaaggagcaggagatcgaagtggacagaaagatcgtggaggcctgcgccatggagagcttgtcgaggttggaagtgaaccagtcggggacaactgacatggtcgataaaacctatgcgaacaacatattcttccggcgtggcgtggttggtgattggaggaatcacctgacaccggaaatggcgcggaggattgatgagattacagagatcaagtttaaaggatccggcttgctgttgcatccacaatttttacaagcaaaaagagaataaaatgaactattgacaagtgaagtggaggaacatctcatgattgtacttatttctttgcttaatgaaaaaaaaatgcaaacctcgtgtctatttatgaaaataaaaagtgaaaacatagtatgtacgtatgtctataaatgaaattattgcaagctgcctcaaataatactcctactgtaagagattgccaattactagtaataagtcgggcttgtttttttttttgttatttggcttcattgattggttttgtgtcacatgattatcttctttgtacagcctgcagatatggtcgagcaaaatttacggaattataagaccgttggataagagcgtcaaacgttaaaaattagagggaatagtaaatattatttcagttgggtgatttatgtttttatctgaagttaagttgtgatttgcgttaacaacaacattcttcaaaatgcttttttctcataaacaacttatccgatctacgatccgattatactattgtatttgttataagagtaaattttacaaaactacatgttttgtggtctaagttgcagaaaaccacacacactttgacacttggcacttgagtacatatattttggttgtgtagtttcacaaaactacactatcgatgtatagattcacccgcgagatgatgcgactgtttcacctaggacggggacatagcatcctattaccagccatcgcatgaaattaatatgatgccacgtcctcatcctagatggaacaaccacgtcatctcacgggtgaatccattcatcgatagtgtggttttgtgaaactaaactaccaaaatatatgtacttaactgccaagtgtcaaaatgtatgtggttttctgcaacttaaaccataaaacatgtaattttgtgaaatttactcttgttataatataatctttataacaatatatcacatgattatattatgacaaaagaaaaatatatgtttcaatccgttaacactctttgtttcatacgtgatagtgatatgtttcaatatgtgtctttagtgtgttccacaaaattcctgaaactacctaccacttctccctctcctctctctccacctcattcatgcatgcatgctttttagcgagctttaaaacgattttcctcaactatttatccaatctacgatctgatcacacattgtattcgttgtaattaaatctttacaataagatatcacatgattatattatgatgaaaaaaatatatgtttcaatccgttaacactcactgtttcatacgggatagtgaaatgtttcaataggtgtcgttagtatgtttcacaaaattcccgaaactacctgccactactctcgctcctctctctccacctcatgcatgcatgcatttagcgagtttcaaaacgatttttctcctaaactacttatccaatctacgatccgatcacaccattgtatttgttgcaattaaatctttaaaacaagatatcgcatgattatattttgatgaaagaaaaacatatgtttcaatccattaacattagttgttttatatgcaatagcgatatgtttcaacgtgtatcttcaccatgtttcgtaaaatttttaaatgctttgcttatttttttcaccatatataacttgatgttttactcgttagttaacagaaacatttgaccgactgattttttccgggcatcgggcgcccgatgggaagattcctccccatgagagcgaacgtggacattttctatttctttgataaattaatagatgtttactagtactccttttgtcccataaaaaactcaatcttgagtatgtccagatttaaactcaagattgagttttttatgggacaaagggaagggagtaggttgcacgatggcacgatgcatttttggaatgcaatttgcaataattatatcagtgccaaatcccatgtgtcggtatgtgtactatatcaaactagaagccgatattactaagaaacaagttgacagtaacgtacactattatcatgcttgatctatatttttcggagtaagagtagtataatgttatcttctgatcagtatactatgtgtgccatcagtataacgtcatggtaagattaatttgaccctcataagcatgatacttttatgcaagctaacacgctgagcacgatgtgcactaaaaaaaggtcatatatatagagagaggtgtgagaacaactcaattaatgccaggaagttagaatgtcattatcagtttttgaacactgatcatgacttcccgatttgtgtctcttcttttttttcgcgaacaaaatttgtgtctcttcccctatatattaatttgcactactctacacactgcacagagtcacaagaacacgtgttttgttcattgctgtttagtgtggactcttcatggcttcctccttcccgctctcctctgcaaccgaagcggcggacgaagcgaaagcccacaagaaaatctacaaccaactccggcaagtcgcggagacctttccgacggcgcccagcggcatcgacgtcccatacagccaccaccccgacggctggtacatgaccacggcgggggtcgtgagtgccatggtcatcaagagccacctgacggcacgcgccaccgacatcttcctcgtcaccttccccaagtccggcaccacttggatcaaagcgcttctgtactcggctctccaccgcagggccgacgagcttgtggcgcatagcccccatcaactcgtccctttcctcgagtctcaggtgttcgtcaaagatcggatacctgacttgagctccctgccagagccacggctgttgatgacgcatatcccgtctcaatcgttgccagactccgtcgcagcctccggctgcaaggtggtgtactgtgccgggatccctggattgcttcgtctcgctttggcacttctggaacaagttcaggccatggaatattgatgaggcacaccggcaattctataatggtgtctcgttgtttgggccttactgagagcacgtcctcagctactggaattggcatgtcgagaggccaagcgaggtactcttcttgacctacgaggagctcgccgctgacactctcggccatctgagatgcctcgccgagttcgtcggacgcccattcacaatggaggagcaggatgccggagtggatagaaagatcgtggagatttgtgccatggaaagtttatcggggttagagatgaatcagtcggggatgactaatttcaccgagaaagacgtgccaaacaacacggtcttccggcgtggcgtggttggagattggaggaatcacctgacgccggagatggcgaggaggattgatgagattacagagatcaagtttaaaggatccggcttgcggttgcatccacagtttttacaagcaaaaagagaattaaacaaactataggagtatgatcacgtgtgaagtttcattattgtacttatttctctgcttaataaaaaaaatgcaaacctcttgcctatttatgaaaataaaaagtgaaaatatcgtgtgtactgtatgtctataaatgaaattattgaaagctgcttcgaataatactctcctactgtataagaaattgccaattattattagtatgttgggtttgtttttggttgtctggttttgtgtcacacgattatcttctatgtacaacctgcagatatgcatggtccagcaaaatttgtaagactgttggataagagcgtcaaacgttaaaaatcagagggagtagtaaatattatttcagttgggtgatttgtgtttttatctgaagttaagttgtgatttgtgttaacaacaacattcttatcaacaaatttggtgcaaaagcctgatgatatcatctcgtcagcaaaatgggatcctaggatagtgagcctgctagaagctaaatccacctattggtgctctgataaaatttgaccctcataattcataaacaacatttttttccaaggtaaagtttaattccatgtgcatgaaatttctcaacctaacaccatataattttagaggagagaataaggaatgaaaaatactttctccgtcccaaaaaaatcctaatatgtatctatctttgtcttcagattgagtttttcttgaacggagggagggagtaggtcacatacatacggaatgtaaagacgctaacaacctaacaatcaattaatgatggattatcactgtcagctagcttgaaaactctgccggaatttgtctcctcgatctcttagatgtttgcaacttgcactctcatatattcatatattatcaggctcatcgctcacgggactaaattccattgtgttctgtgtcgcctcctcaacagccaaagtggccgacggatcaacgactcacgaggcaagtcagcgacatcggccaccatactgatactgccgccgtcctgatggctggtacatgtccaggcagggagttgtgagagctccatggccatcaagaggcatctgactgcgcgtgccaccaacgtcttcattgccaaccttctctaagtccggcaccacatggctcattggctcagggcgcttctgcactcggcacacatggctcattggttcaaggagtcaaggtgcttctgcactcggctcttctccgtggaactcaagagctagctggtggcgcaaaagccccaccagctcgtcccagctgttcgtcaacgaccgcatcctcagcctgaataactagaaaaacatagattaactagaaaatacaaaatacgagatgccgattatgtcttgcgatttggattcacctacgtgtatagtcattctggcgtaacgatggttccagcccagcctgcatataagtggtaaacccgttccggcacaacttcttggaggcagctccttctccttttgttatccagattgaaaatgatagacaaaaatgtagtcatgagctcgattagtttgttgtaattttcttttcagacccctttttctttattaataaagttttccctaacagcaggtgcctcccttgctgtgttcctttttttttaaaaaaggagccggatggaagccgatcaacctatcatgggtctcatataggcttcagtcacattgaggaacaaaaagggccctcacggaggtcccagtaccgtttcggcccaacttataatggtccaagcacacgtttgctgccatcccattttggttccaaagtgtaagatccgcacatttgcagcaaagttcttgagccgctgcctttctttttttttttataacacgcccttcggccctagatctgctcgacgcaatccacgacgaggaaccttgggtcgtctacaccgaggatatggtgacccgttgcggcggttgtctctctcaaatgatgcgttgctcattgtgccggcaaggtccacatactctattgtttctccgtgtttgtgacctacgatgggctctgtccgtaggtcgctaggctatgacatgagggctagattccttgcattgggattggttttgtcgaaactcgtgcaaagtcgtgtttggtggtgttcggcagtacttctaagaacgaatcgggatatgtatttatttagattcatccatagaaatgattcttttttttggaacggagggtgtatgccttaaagatactaggtgattccccgcactttgctgcggaaattcctaagtaacttttaatattttttaataatcgagctaaaaataaaaattatattagttattaagaacaaataaaactggtttgtcaaactatgttcagagagatacatttagtagactttatctgagattgtaaatgaaatatgatattccgcactttgattatatggatgaatatgtattaagtatctattatatattaaaagtccattaaacttcctacaaacgctactaagctgccacatggcactcctataaactctcctaagtcgccatgtggagttttaatatattagaaacatctagcccttaattttcatttaaattagtgggtccattattttacatcattggattagatttaaaacagggcctccctccatgtggatacatatgcctccctcactgcctgcaagtacgtacgtacacgtactaacagatataccccccaccctttttcccttcttttattttttttacctaggaaacatccataatatatatgacgtttgaacatgtttatttactataaaaacatgtggcgttttaatatattagaaacatctagcctttaatttttatttaaattggtggatctattattttacaccattcgattagatttaaaacagaccctccctccgcgtggatacgtatgcctccctcactgcctgcaagtacgtacgtacacgtactaatggacataccccctcccccaccccccaataccctttttttcccttcttttattatttttttttacctaagaaacatacataatatatgacgtttgaacatgtttatttactataaaaagaaatatgtaattatcatttattttgttataattcgttaaattttctacaaacgctctcacgtccaaacgctcctacgtcaccacgtggtgctataataaattagagaaaattatagaaattctaacagaaaataaaacatctaaccgttgattttcacttaaactgatgtatctattgttttagaccattagattattagatatataaaaataataatctctcgctcctaatatcccgttcacatacaagagaaaatccttgcgtattattcatccggagaaaaggcaaaagctatacgtatgtacgatcgaaataaaaaccaaagaaattaatacgtataattgaaaaaacgaccagccaagattaattccaactaaccatgcataatcagctcacggctcaagcacgtatgtgcattatctgcactccttttttaggttgttgagtgatttgtccattaaactttctataaacgcttttagatcaccacatgtcactctacaatcgctactacattgtcacgtggtgctataataaattacataaaatcataaaaattctaagagaataaaacatctaaccattgattttcacttaaactaatgactaatggacctgttattttagaccactatattagattattagatctataaaattaatctctcactcctaatatcttcatcccgataaaaggcaaaagctatgcgtatgtacgatcgaaataaaaaccatagaaattaatacgtatcattgaaaaaacgaccaaccaatattgattccaactaccatgtaccatcagcttacagccggctaagcacgtatatacattatatgctctcctttttttaggttgttgagatatctaaagcataataaaatctaaacagcattgatttatatctccaattgaatatagactttcatggttatcccggtcagtgtcctcttcatgaagggctccacgcatgtattaacttttgaaaactaataaactatatgttggttctatgatcagtttagttctttatattcctgacaactataaatcaataatttaaatccatgtattgatgttttattatcaattaaaaaaatagtgtgagccatacctatctattattgacctatagtagttagtgctaactgataaatacataatgacacataataattaatgtcataatatttttttaaataattatggtgtaaaatatcacctgtcaaataatttgaatctacatatgtaaaaatgaaaaattgaaacaagggaatttagttatatttttttcaagtagatcttatctaattttaatgtgtgagattaagattctcaaatatgtttttgatttttttcaggactattttattggtatttgaaaagtgagaagcacacatgatacacagacaagaaaaaacttattaaaaatacttccagcgagtgatatggctatactacaaccccatagtccatcatgagaactatggtcatatatgtaggttttttgtttgtcatatagttttggcaacaaataaataatctaataacatgtgcattaaactacccatgatatattttcttttacttgaggaatttcaatgtgtcgggcatagttgatggatgtatgtcatacactacactaacatgataacctcactctctttcaaataataatattgtatatgtattattgaaatttgagtaatattgatatttacactataaacaaattgtgtctattatataccacaaaaacaactcaaaactttcaaaatgaatattttaatcacctccatcttctctttttccattctcaaaagtgtgccaagcatagataataaaccttgctatgctgccatgatatagcaaaggcatacatctggctgagttgagccaccatgggtggtcacccttagcaatagagctcaacttcctacttaacaatgcaatcctttataaaggtgctaattgtgaattaggcgttaaaactgctctccacgatagtcttgacggatacggctacacctatatgtgacccatgtttcaaggtatcgaggaataaagccttggtagctatgtttggctatgggcattcatatctaattttaacagtattatactattaacacgtataagcgatactgttataacatatttttttgataaaatattattggaatatttattcataggtttggaaataagttagatcgacatgaacaattaggtaagtagtggagataaactttttagtcgattagtgatgtattgtgcttattttgatggtacaaatacagtttcatctattaaataagcactcaggtttcaaaagaacgatattaagtatccataaaaaattcaataataataagtagtggtgacattaggcaaatttatatataaccgggaaatagtatttttgtttgaatctaggaaacatttttgtcatttattatatataagtctatggtcttttccgtggtctatatatttctttttgtattttcttataaacaataaacaaaatgcccacgcatctgcgtgggcttcttttctagttataaaaatgatggatacatatatattaaaaacattgtgaaaaataatgtgaaggaagataattggatgttgatttgtagaatttaatgaattatatacgatgttgcatgcttgcataggtacattttgtatgtaattattgctagtggatgatgaggtggcatgtttgcatgttgagctttaggattagtgggttataactttttggtaagataggatatgatgtcctaaaatgttgcgctggcactggtggagagatggtttgtagttccggttggtaacccctctgtagtcccggttggaccgggactacgaatgcgggactaaagatcactatctttagtcccgattgaaataaccgggactaaaaatacatatttaatcctggttgataacaccaaccgggactaaagatggcagcgccagtcccagttggtcaccatttttttctctttttttattttcattgtttctttccaaattgagttgctccttcccaaatctccctaaatatccccgaatcaaagtatcatcccaaatcaatgaatcattcacatcacaaattctaaataaatacaactcaaattcttaaagaaatacatcacagatccaaacatcaaatacatcacagatccaataaaccacaagttcttagatccaaatgtatcacaaatttggaaaaaaaaataaagttgtgcttccgctgccgcctcccctccggtagaagggagggcgccgccggccgccatgtagcgcccattccgtcgtggcgcctagcggaaaaattatctctttaaaactctatttgcgaaatctgtttctttgcttgttgtctagtgtccgtgccatctcagatctcaaatccccgatctatcgccgagttcaatcccgaatccaaatccttcccaaatcaattcctccgcaaaagtctaatttgcctccccgggttcgatgggccgaatctctctcggcccatctcccctccctccccggatctctctctctctctctctctctgtctttccctcttcttcgctctgcccgcgc

SEQ ID NO: 8272 - DNA, 9814 bp, Oryza sativa
cccaccactcaccggcgtgctgcagccagccgccgtctcccgccgactagccaccaccgagccgcgccgacaccaccatcggcatcgccgtgtcgatctccaccccggcccctactccattttcccatgccacctccgggacgccgccgtcacgcgcaccacctgtatccgtcgccattgccacctccagccgcgtcgcaacaccgctttggtccacgccgtcacctctctctgctccacaaggacaaggagaacctcggccaccttttcccatcgccggaaactctctggacgtccgttttcccgtgcgccggtgagcccttccccccttcctttctgctccggccggccacgtcgccgccccgtcctccctaacacctcccctcccatcctagcgtgcagctgccgctcgccgcctcttcctgagcgccgcccgtcgccagagcgtcatcgtctccgtccgccccgagctccgccgtagccgcctcccgttgccatctcgccgccggccaccttcttccgcgtgtgctactcagtgagctccccctcccctttcccaccgctctccgccgctctcccgcgcgtgccgccgtgccggtggtcaccgccggcgaccatcgggccgcacgccgccgcttcccggccggccggtcggcgagccggctcccgcccgcctgtggccgcctgattcaccccgggtgaatctgggccgtccacatggccgttcggcaccgccccatgtcagtgccctcgtggcgccatgtcggcgccacctttgccgcctgtctgccgtggccgccacgtggccgtccatgtggtgcacccgcgcctgtgccgcggtggactctcggtccaccgcgggccgctcctcttgcgccgctgactcgtggggccctcctatcggcgccggcctctttgatgacgtcagcgcgtcccttttcctttgagaaattaatcattaatgcgcaataaattcgttaataattctagaaattcatttaaacggctcaaaacttctaaaatccatatctaattcattcgaactccaaattgagccattcaacttgcaaaattcatctaaaattgagctctacatgtttgtttacttttcatgtactgtttccttggtttttattagagtttttccttggtttgcttgccagcgtgtagaatctgtcgtttcggaagatcgcgatcgcaaggataagagttcagaagattgtttgaagaagcaaggcaagtcacacattccccttaagcattttgatcctaatttacaaatgttttatcatttgcaaataaaattgcatgtcttgctaattacatgggaatagggtttacctatctgctcgcttgtgccatgtttacttgatatctgtcctttgtcaatattgggtaataaatcgactagctcatattacttatgtgacctagctagaactatatgcttagccatgcttaattaccactagctcagttgatgggataattacagtattagaccttttagtatcagaatgagctgcgtgctcgagacatctggacatgcttcatggtcgtaattatccaactaaaatacgactgaatggtgggctgtgggtgcatggttttgctagtcgcacacatggcaattaaggaccagttcgcgggaaaccctggaagaattcctcgtacttaccacaagccagcgtgggcaacgactgggcttgtagtgtagctttcctctagctgacgcatctaggcaagggtgggcgtgatggagcggggcgggccctgcgacggcctctgtcgcttccggattcacctaggcacgagaggggactgcccgttgcccgctggggacgggggtgaaacctgaggtgtggtgtgcttggctagagggggttatgcgaaaggttctgtcacggcctctttccggtatgtcgtggtggcatgtcggcgcacgggaacgtgtcgtggagctgtgtcttgtgggtaccgttgtacacctctgatcagagtaaaactattcgaatagccgtgcccgtggttatgggcggtcgaccagattcaccatgattagtcccaccttaataaaccgactcaatgcactgtagttcaggtgggttggttgggcctgttcaacgtggcgtagcattgatcagtggagatttaatgttactttaattactctactgttttactatttgctcaataaaatgtttcacaaccgcctttatgcaaatagccataaaccgtccttgtatccccttgcacgaatgcatcgttggtgtggcttgctgagtacggtggttgtactcagccttgctattattcccctttttcagaagtgtagtgcttctgagctgaagacgaggttagaagaccaagactcagacccagttgagttttgcctgtggagtggagctgaagccccactaggattgcctttttccgctgctgttgctttcgtttcggtgtgaggactaagtgcctcttctgtaagtatttacgcttttatttacgtttggaactgtatattacttgtcgttttgtgtaccctggctagtcctggacagggatttaatacacaaaatagtctggaaatttgggctaaatttctgggcgtgacagctaccgagtgaagcggaggcgcaacagctcaatatgtgaagcttggtgaagtggaggaagacgaggtggaggacccctaggcggcggctgtggaatctggtgacgggggagaagccgatggaggactggagagcaatgatgatagcaatggtcctaggtccgtgcgtgggtgctggagacccacgcgaagctaggggcaagggcaagctcggctcccaggctcacctccccccccaccgcagggcggtcctgactttttatggccccggtgcgaaactaaatttagaggcccttatcatactatataataacaatcaatagatacatatactaaattaatgttgtaaacatttaaattgcattcagaaataatatttaaatataaaacattgtacatgttacctcaaaagtttcttatgggattctatctaatcatctacccttttcttttttttcttttcttgctactcgatgcatactttctcgacaacatggcctggtaattgaaaaaaaacattattatagtagtttaactcataaattacaatacaaaattacaaatcaaaatttaaaatcgtaccaattagtttatcacaagcgtctagatgcacacggcaagtgagtcggaaatacacactagtgccttcgtcggttcgtccacctatcggaacaactgaataaacctaacatacgactatacattaatacacgggtacatggctatttacatattaacagataaaaatcacaatggtacgaaatttcaatttttcatatgacgattggttaacggccaaagcttgttatagcaaactctctaatctgatgactatacataactgaagcgggcgaagctaatccagctgctaccatgtaaatgcacaaacacataggatcctagctaatagtaatacctgaatcaagattcaagaggtggcaggcggcagtggctgcgtccaccgggcggtcacggagtcacagctgcattgcgcctcgtgccttactgccgtcgactgtcgtgcggagcagcagaaggaaaacgagaagccggcggccggcgtgcttatgcgtcatgcgtggccttgcgctgttgcgccgcgcgatttcggtgccgtgaggaggagaagattagaagacatgggcggcatcacaggatcgcgttctgttcgcctttcgcttccggcttccgtgcacggcgtgtctgttcaccttcttgttgggcctgggttggggggggggggtttcaagcggttgcactgctctgggcccccaaatcgcagcccccatcccacacacacccgagggccggccctatgcccccctctcactctcaagctccgcacattgccgttgttgtcgctgccgagggacaccgcccgccacctcctcctgtactcctccaatgaaagtactcccttcgtttcaggttataacactgtgtctagattcattagtatctatatgaatatagataataatactagaaagttttataacctgaaacggagaaagttatactcacatctcaaaaagcatgtggattgggtgatgaaaatttagaggcagacgaatcaagtgacatgtgctcaaatttctttggcttaatggccttaactgaggaatggaccacttccaagcaggaagcatgcgttcattggatcatccccgtattcccgtgtgccagtcgaccaaacgcgtccccgatgcttcgtgccgtgctcactgctcaacctttggttcaagaacgaataacgaaacatgcagcgccaaggtaagccgcacactcaattcggcggcggccgcgcggccgtgccgtcgctgcccacgcgcatcacgccctttcttctactaccttcgacccaactatacgtgacacatgttccggtgttctcacaaatacgacggagtacacggtgtcgtcgtttcacaactcacgcgtacaccgtgtgtcctcaccatcttcaagcctgcaacaaccgcatctacttcccacgtcatcatcttcatcattaatataacccgtactaccctccacagctttcttccattttgaatttcgaaacacacaaaatatcagaggacgcagacagacttgataaccctcgttccccaaattcgcaatccctctctctcccatggccggctacccgccaaaccccggctccggctacccctacggcggcgccggcggctacggtgccccgccaccgccctacggctcctcccccgccccctccgccccgccctacggcgagaagcctcccaaggaaggtaagacctcctcctcttccgccccttactacggcggcggaggcggctacggcgccccgccctccacccagccctacggcagcggaggcggctacggcgccccaccctccacccagcggccccagtcctacggcggcggctacggggctccgccctccagccagccgtacggcgcgccatacggggccccgccgccctcgtcggcgccgtacggggcgcccggcgggtacggcagcccgttcgcgtcgctggtgccatcggcgttcccgcccgggacggatcccaacgtggtggcgtgcttccaggcggcggaccgcgacggcagcgggatgatcgacgacaaggagctgcagtccgcgctgtccgggtacagccagagcttcagcctccgcaccgtccacctcctcatgtacctcttcaccaacaccaacgtccgcaagattggtaagttcatcgtttcatcgtctcactctcacccgcgaattgagtagttctggccttggggatggtgtgcgttagtctgatcgcgccatggttgctatcgtgcgcgttgttctggtcagcggcatacgtaatggtggttgtgcttcgggcgatgtgtagtcaaacgagtggcacgcgattggcacgtggctctccgcgggattatcaagcttcccacggtatttgcgatgccagtatgcgacttttggcttgcgatgtggagatggagtcttccagccagggctgtagtcagtgtttgcatcatacggctaggacttgtcgtttgggaggaagacgggggaacgtggtggggcaacgatgtagtggcaacttgttaaaagctggagtttacttttaggtgttgggatgcgggttcttttaattaagtttcttaaattgcatcaatttctttgtgggataggattcaatagaattgtggaaaatcctagctcatcttgtgtggttatcatggtgtggtctactttggtacagcatagacacatatactactagtttatttgcacaatgaacttgtaagttctcccggcttgtgatctagaaagaattttgggtttactccagtaaaagggcatgctactttggcacatagtttatacatgttaccttgtatacttacttttgttagtcagttctatttaaaatttcaaattactgctaaactgaaaactagatatttgcaactttaatcaatgccatttctcctattcttttgtcatctgttttctgtgtagagaactagagattgaatcatgagctttgaattgcttgagcagtgtatactctgaaaccagtgctatgtttcaggctatcagctagtgagcttgtatatggaattttggacttttagttctaacctgtgaaatgcacctgatttaacaaatactggattgctagatactgtactttgaacttaagcatttcttatattattcgtttttatgtaaaccacattgaatatgtgtctttgatcctttcaggtcccaaggaatttacctctgtgttttacagtcttcagaattggagggtgagatgctacagcttcagctttccttttcttctgcgcggtggaactaatgaagttactgttgaaactgaatacgtgcattttctgcttgtactgtgcagtccattttcgagaggtttgatcgtgaccaaagtggtaaaattgatgcaacagaattgcgtgatgctcttctcagtctgggatattcagtttctccaactgtgctagacttgcttgtgtcaaagtttgacaagactgggggcaagaacaaagccattgaatatgataacttcattgagtaagatgactccttcaattatgttttgcagattgctttcttagtaattgttcaagctattagcttatccaatcatctacttcctctgttttacaatgtaagtcattctagcatttcccacattcatattgatgctaatgaatctagacatatatatctatctaaattcattagcatcaatatgaatgtggaaaatgctagaatggcttacattgtgaaatggagggagtaatcattttctaaaaaaaaaatccaatcatctcaaacttggttagcatatgtttatatggtcagctaattataggattggttcaaattcgtttcagccttatttttaacattttatttttgaacatttgttgacacaaaagtagtctttgggatcaaatggctggttaaagatgatatttcctatcaaatataattgttaagatgtttcttgcacattttgaggcaataactaaaaggataatgtatgcatcaactagtctttctacttctgttttctgatgcaaaactttgaatccatctagttgttttctcatcgttctatttttcagccttggattttaaaccacttaattgtataaatataaaagacttttgttgctttgatcacgtgtcatggcttattataagccccagccaagcaagtcctaacctcaaagttaatattggatatagtttaaaatcttgatatcttctatcattccaattcggcctatattacagtcctaacactattttgtttgcctttgcagatgctgcctcacagttaaggtaatgcactaattccatcacagacgctgttaagtcctagcacaatgttctgttttcactctgttaacatacatttgtaacaattttacagggtctgactgagaagttcaaggagaaagacactgccttctcgggctctgcgacttttacttacgaggctttcatgctgactgtactcccttttctcattgcataaaatggcagtgtgctgcacagtcgacctttcaggagaccatgcccattgtgttgaaacggttctgtaacgtgtgttcatcgacttgtttttaactgagtttattgtttggatttgaaatgatacaagtgcttccctgatcgggcatgttacaatttacaacgctcatgtatgtgaggatagctccgaaaatgatgtaatgactcttccgctagaaatcgcatatcgatcagcccacaaattcaatgcatttgtgaaatgactcatagaaaggactaagccgagtgaaatgaaagtttcgaagtgctttgatatcgcttgaattatcagttgtagctgatgtgtagtccttcagtccgggtgattttggcgttaacttgaattgcagtgcagaattccatcgcagcagggcaacggaaacaaaaatgagtagcgtattccaggtcttggttgcatatctcacatattggagagttggcaaatgttctttttgaatagattttgcgttgttggtagcctttcttttgtggatttggatccgatggaccgtttgatgtaaattcaagggtctaaattatatgtagtactattcacacgcggagaaaactagaggtactgtaacaataatacaactgtagactgtagtatcagatctcaactatttgctgaaaaaaatggatggttgaaattacttgcagcaaagttagtactgcactgaatttcaattcatcttttccgatagccacgcaaagaattgctactctattaggaaggagttccgacaaataaagtgctagataggacatgtctgtattgagcttattttacccggcatatgttggtttgggggtgggggcgcactgatgtgccaggctgaagatgtcatgagataaactgcagaaactgtattttttgcccaatagatgtctgaagatgtggccaaataaactgccaatatctgaatatatcaatgttaagctcatttttggccgatagatatatgaagatgtggtcaaataactgcattttctgaatttgtacaaaaaaaaaagatatggtcaaatatttttttaacataaactgaatataaaaaaaggtggtggtgtgctggagcagtcgctcggtctaggagtgaaggcgacctccggggcaactccgtatagatttgtaatgtaagtctggtttttcacacaaggcctaccgaaggctcccacgaggggaaaaaacttatcatcaggcgcctgtgcctactccaccaaccgcggcgcatgccgctgcaaggccgtcactctcgagaattcacgatgtgtcctaactccaacccacacacccaccttgtcccccgaaaacttgggttacgacgccagcgctatctggctctgtgagaatccatggatgtagcggtgtatttgtgcccgccattctcaatgtcactaaacagtgcggtactaaacgaaatggaacggagaacacagcttggctagccagtagctgccgactccgagagtccgagtcggagactttcgaaatggcaaccctgtcgttcttgccttctcggactcgagatcttcaccgattcaaactcgaacgaacgagattatgccaaataaattcaacaccaacctgtgctcttgcctttcacagcgacacgaatcgatcgagcgcgcgaaaacagccgcatgcgtgatctttgcatgcggctagggcgaccgcatgcgaaaattcgattttcgcttgcgggcgcttaagccaacagcatgcaaaaataaaaaatcacgaaaaaaaataaaattccaaaagaaaaaaaaaaacctacccgccggcgcccgagctcaccaccgcgccggatccgccaagtggaagggcggcaggggcggcgccggcaccgccggccggatcaaccgctgcgtcgagggcggcggcacatggcacaactcgcagcgccgccgccgcccgctgccgtcgtcttcgccgcgcccgagctcgccgccgctgtccgccgtcgtcgtcgtcgccgcggtggagggcgccgcgccggatccgcgtgggaggagggcggctgaccccggatccactcgggggagggccgccgtgctctggccgccgccgccgccgccccccttctcggactcgagattcttcaccgattcga

SEQ ID NO: 8273 - DNA, 4840 bp, Oryza sativa
ccaagcctcccggcgacgggccttcactccactacggcgggagttggcctttattaagtacaaatgaatttggatcacaactcaacagcgcggcggcttcgagggcggcggcacgtggcacaactcgcagcgccgccgcgtcatcgagggctacggcgaccgtcaggcgttcgagtaccgcgcccccgggaacaagaagacggactggctcatggaggagatcgccagcaacctgccggcggcgatcaccgacgagggcatcatggtcatctgtaaggtctacctctcgccgagggccaaggaggcgacggccaacgaggaggaacgccaagaaaccaacgtggttcccgggcccaagaggctccgagaggcggaagccaccggctacgacgcgccggcgccgccacagcccgacgtcggatactcgtactccggcggcggcgagacgtctcaagcgaccgcctcgatggactactgctgctcgacgacgacacacacggcggacgacacggccaatgccgcctactaccacggcgacgctgatgccatcaagccagatgcttacgacggcggcgactacggcatcggcttcaacgcagacggggagctggttctctgcggcaacggccacggtggcatcgggacgcagggacagacgccattggcaatgcagaacaccaacggggagatgaccttgttctcaccaatgaacggctatggtgttggcttcaatgaggaggtgagacaagaaccacaagtagaaggtgaggtggagatggataatttcttcaacgatttgttcgtcgacttcgacggcgccggtgatctcaatcccaatcctaacgggggtggagacagccacggccacatactatgtgaatgaattgaatcgctggggtagagtagtcgatgattctttatttatttatttttctttgagacgatggaagaacatgtatctgatgattctttgtcaacgtagttactgatttgtagacagatcttaggagattgttctgttcagttcatgaatgatacttctagttctttatttactctgttttatgaatttaactcctgttcaggaccttaagggtgctaatatatatcagtttcaaatggcatatatggcatcaaaagattatttcagtgtgaatccaaaccacaataacttgttgcactaacaaccgtctatcatatgaattcactgatacaataaagtctgaagttgaaagcagagtggtaaaggtgcacatcagtaacgtgtgatgtagtaacaattacatgacaggatatagtgcagtttggcaaaatttgaacaaaatcagtggatggttagtgtattccaaaacaactgaactgagctgggcagctggatgccgtattgcaccctggattctactttcccttattagtgattattcttcagctatatgtcatcagggccattggcaagtggcctgtatccatttggagttgcagaggtttcacctgaaccaactggtatacacttcaagatgacaccaacaatcaggctgatggagccaaggccgacgctgagcagccaatgttgccagttgagcggaacagtactggcgaaagtgccaagaaactctatgatcaccacttgaaatgctacggttgcagctatgactgcaatgaagatccaattgctgatgataccacggaaaacattgatcttctgcatttctctgctgtttatttcattgaatacctggtacaacgtttgccagaacatcatcattagaacaagaaattcccttgccaaatcatgattatttttttttaaaaaaaagatatatctatcagttcaggattcttaagcatgatattggaaatataagctgtgaccaaccaaacacatattgtggcagacttcggaaagacctcagtttcaccataggtcttaaggccaaaaaagaaacaccattttatgtgagtggtttgtggaaatactagcatggttacagtgttccataatgcactaacctgacaaaacacgaaggagttgaagatcagtgtatttatgatggatttggaatctgcacccttgatgttcagaaggctttctccaccaaacatgagagctccaagtacaaatagctgatacaaactttggcccatgatatttctccacatgaccttggtaatgaaactttccccttttcggacaggtggcctcttcatcatttcatcatttggaggctctgttgctagtgctaaagctcccagtgtatccatgatcatattgacccacaatagctgcacagcagtgagaggagcgctccctgtgacggaagagagaaacattagtactgtgttggagatcatggggaaccacttaatggaaatacatggtatcagatgaatactataatgttgccctcacctgtgatgcatgctgagacaaaattgataactaaagcaacaatattgacagtcaattgaaactgcacaaacttttggatgttaatataaactgcacgaccccatcttgcaacatttattatagtagtgaaattgtcgtcaagtactatgacatctgcactctccttggcaacctgcacaaataaaagacaaaattactccatttcagaagatgaaaaagaaaatacaaagtatccaaaatgggttatcagggtcaacttatttcagtaagaatgaatactgacatatttgtcctaaatatctgacttttttaatgtctattgatgctacatccataagttttgaactgcataggaaacagtacctctgttcctgcaatgcccatagcaagcccgatatctgcttcgtgtaatgcaggagcatcatttgtaccatcacctgtcacagaaaccacctcatcaaacatacctcgcaagtttgtcacgagtgtatgtttatccaatggtaaagaacgggccataacctgcaaaatatttccagatattaagtttggtcaatatttgagtaaacatatagactgaggaaaacattatgaacctgaatattcggtatcaggtccctcatctcttctgggctcttgctatggaattctggtccttctattgctacaccatcttcagtcaatattccacactctttagctatagctttagctgtatttatattatcaccagttaccattcttactgtgataccagcagacatacaggtcttaacagcatccttaactccagggcgcacaggatccttgataccgaaaatggctattagagtaaaaccacttgttggactatctgcattgtcatcaatatcatcatccacttccttatatgccaggcacaacgtccttaaagcatctgaagcaaatgagttgatagtatctaagatgttctttctctgagcttccgataagggaatagcatttccatcgccatcaaccatcatgtcgcacatctgcaaaataatttctgatgcacctttgcaaaaccatctggacgtgccactgggtaatgaaatcagcactgccatcttcttcttgactgaattgaaaggctcaaccttaaccttggtgcaggcactatactcagcatcatgaactccttccaagcccaagccaaattctaatattgctctttctgttggagttcctaagacagtttgcttgccatccttttccttgaccacctcagcgctagtattctcaaaaattccctgcaaaagcagactcaatgttctagaagaaaccacagaattaagttctcctgaaatggtgttactggtaactgactttgaaacctcagatatccatattttgtcaacaaccatatagttagtagtcaaagttcctgttttgtccgtgcagatggtaccagcagatcccattgtttcgcacgctgaaagatgtctaacaagtgctttatcattcattaactttttcattgcaaatgcaagactcaaagtaacagccaagggtaatccttcaggtacagcaacaactataatggttaccgctgttgcaaagtagtttactatagtcaatgcatcggtagaataccatttgagcagaccaaccgtcatgcctttgtcaatgaggaatctaaccagcagaactaaaaatgttaatatggcaaataccagtccaatctttcctataacggtcgcaactccatttagcttaacctgcagtggtgtctcatcctctcctccctcactcaatgtgctcatcaattttccccattcagtgcgcataccgacagcagttactatcatcttagcagatccatcttgcactttagttcctgccaagatgaatggtttgtcttgagaaacatacactgggtcactctcaccagataagctggactcatcaatcaaaagggagtacccatgtatatatagtccatcagcaggtacttgatctccaattgacagatgaactatatcaccaactaccaagtcatatatagagatcttttgtcgacgcccatctctggttacatggataaatatctttttcttttcattgtctagctccttaaattggagtgactgcttataatcactaacagcagtaaccataacaactaagaaaatgctgagtattatacccaagccatcatacatgccctttggccatccttctgttgccaaaccaactgcaacagatagcaatgcacataccataagaattataagggtcatgtcctggaatgcatcccaaacaaacatccagaaacttcttgaaggcttttctgcataacggttgacgccatatatgttctgtcttgtatctaagtcactagcacatatgccatgatcaaacgatgaacggacttttttagatatcccatctaccccaccatgcatcttt

SEQ ID NO: 8274 - DNA, 11825 bp, Oryza sativa
  unsure (1)..(11825): unsure at all n locations
aagcggctggaaggcttcactctggagtttgatttctaagcatgatgtgctctgctttcaattcacctgaagcattgaccccattcttctcactgttgacaaaaaactggaagtctcttagtagggtgggcttttgatctgggttgagcttttttgctgggttctgtttggctgagtccctagagtggctccctgtgtctttactttgtgctggctgctggcaattagggggttgtgtgttgacacccaacccaaattgaccaatgtaaactctatcaggatagttggtggtttccttttatgttttcccgaattctgtagctgcatttctgttaatggaaatgtgggaatggcccttgctctaaaaaaaattttctaggctaggctcctagtcatgccacattaaggtccaggtgagttggaaccccccatgtaataacgaaatgagctagggcaatttagtagtgttcaaaaaggtgctaagtgggtgacggggtaacatggtggtgtctagttcctagttagcaatagttggcctgaatggcaaccgtgctaggtggcaggttggcgtctagcaagattcaagtacagaagtggtgcaccctggctatgtttcagcatttatatttcctctagtggataaggagaggcggtgttttaaattttagtgggaagcaaagaccatcctaaattattactatttccattaggccgttgtatattattttggcgggaagcggagaatatcctaatctagaaatacatcaccactatttccgttacatattcttgtcggaacagatgacacactgtgcttactgtgtggttggatcaaatgaccaacttgtatgtacaaagtttgcacattagtagttggcaaactgccataccattacagctcaaacgacaaattgatacttggtagttgaacaaaactagaactttctgacatttaagcaccacattttgaaataccaagacaaattagacaaacaataagactattggtaaagaaatttgccatagcaactctggttctaagcagacagtccactatctacgacggttgtgcattcttaggatgggtagaatgatattcatgtcgattcctagaattccaatccacagaaaaagattagccgacattaccagacctactgacctagatatctagatttaaaaatttctaaccctattatcgcctaacaaatcaccacctgaacttaatcgaatcatacaaaaacgcaatccaatccatagaaacaaagggaacagaacaagcaaatcagtcatccataccgagatcaggaggaggggaaggcggtcgtggagcgcggtcgtggcgggtcctcctgtaccatggccgccgatggtgattccaattccccatcgccgggaggaagaggaggaacaccagactcaaaatgattcgccgatgctctctctcgctcttgacggcaatctcctccggcaaaccggaatgctatctcgccatggaactaggcgccgcccctgcaccgcgagattgggcgccgccgccgcaatttccaaacagtgagatgagctgaggcgacggcttgccggagaaagctatagctttaaatgaagccaaaagatgaagctgcttgcgtcgcactgactcgtgggcccccggcccatcgaaggctatacgtctcctcgcgggcgtgtggcttcttctccctttgacccaagcagcagcgtctcttctccctcttctccctccactcctccatgctctgcgtcgccatggccgcgcgccccgtcagtagcaccacctccacctgccgcccatgctcccggcgcaggtttctgcttccaagccctccacctcctcgtcccctggtacgggtgtgctcgtgggtgtccccgcgagcgcgggagctcggtttccaaggcagcgattcgtggagcgagattggaggccgcggcgaggtgctctctcgtccgccagcgccccatgctgctggcgaccgtggcgggtagagtgttagctgttgactgctcccttcatgtgttctatcgctggcaatctgtttgatgaaatgtctctgacgttagtgagtggtgtttcttggtctcagnnnnnnnnnnnnnnnnnnnnnnnnnnnnnnnnnnnacagaaattggggattctctggtgagggagcactatgtgccttcgaattttctgtccccttcttgctgatcacaaaagatttcgtgatgcctgtgtcaagttgtgattttaacatgtcaaattgtactactgcgtagaaacaattgtgaattgtagtcagcagtgtagttatctgtcataggaaagagcaatatcgtatattcctttttattacattgtgagggcatatagctaatacatgcataaaattttattgtgatcagctagggtcatctggacttgctttggctgaccttagcgttggagattggtttggaaatttgctatattcagcgggtcagcaagccaacgaagctgttcaggatcagctgtctgctcttagtttcactaggttagcttttcggcccctgcagtcaattgcctatagacagaatctgtttacttactttctttcattatattttatgtttctgtccatctcttttctgacatgtttctctattagcttggctgtaattttcggtgctggacttgtaactagtttgtctccttgtacactcagtgttctgccattgactctaggatatataggtaagtatagcgactaccttttgagatgctgtttttttgttgcccgggatcagttataattgatggcactgatctgatgacacattctttaaaatctttcaggtggcttttggctcgggcaaagatcgatctgaggtatattctgttatttataaaataacttatagaaattaaatagaacatgtatacccaaaacctcatagtatgtcataacatccattcaccatgtagaaaaaacaaacttcatccatgttattcttgatgtaaattgatatgtttccattctatatattaggttgttggaaattcagttgctttttcattaggactggcaacaaccttagccatccttggtgttgctgcttcttttgctggaaaggcctatgggcaggtaggacaaggacttccagtggctgcttcagggttagcagttatcatgggattgaaccttcttgaggtaaattcatgatccaatgtgaaaactcataaagcggagcatgccaattaatttttcaagctaacttgttgccacaattcaaatcaagtatcggttgatttgatggttttccttttataaatagttgtaaatcctttgctgcgatggtaatttatttcaatgaaatgtgtatcactcctgttatagtagatattagctcactgccttaaactgttctctatgctggttatcttgtatttacaggtaattgagctacaacttccctcatttttcagcgattatgaccctcgagctgctgcagctaacctcccttccagtaatgctttgacataattttctattttgtatcaaagtaccatatgcctcattatgtttatttcagttacggtaaatgatatcttgctgtttccctataggtgtacaagcataccttgccggacttacgtttgcattagcagcatcaccttgcagtacacctgttcttgctacccttctgggatatgttgccacttcaagagtatgcataacaggaacattcataagttacattaatattttattactttttcttaaatttcaaaacagtaaaactgtcataaattttaccatagtgtctttaattactaaagttagtgaatcacataccttatgatatgcagtaatgttgatttctttgtttctaatatatgttacacttgacttagcaatctgtcataattgttggcaagaagtttatgttcgcctaatttattaattttctgacatgctgattacgatacattttctgtcaggatccgattgttgggggaagtttgttattgacttatacaactggctatgttgcacctcttctcattgcagcttcttttgctggagcactgcaggtataaatgtcttctgatatacacatctgttaagtatagataagatagtgccatcaaatatggaactttaaatctcacttagacttgactaacagtttaacagcgcatatcctagaacaacaacacctgttcattttaagtttagtgcctgataaattatttgctttctgtagagtttgctttccttcaggagatattctgcatggataaacccaatcaggtatgtgccttagttctttctggatcttgagaggttcctggtttgtaatttgattgcaaaagacctgcacgttgcaattaattatctgtacgaatagtaataattttttgactaccttttacaaaggaaacactgaaaatccatatttgttaattgatagcattcgctacaatttcactgtcttggttcaaagagcttgaaatcacatttgtttggcatgcttttttgggagaatatagcacatcaaatttaccttatcatccatttaatattcttttgttaagatattgttctaaacttcttgccacaattctgtcatgtgctttgcacagttccaattcctcagaagcattcgtgttctttcttttttttaaaaaaaaaaagagaaagatctctaaaaaaatataagccattccttctttaaaaaatctgccttttatactttattttttttggattaacgccttgcgctaacatttgccatttgcttggtagtggtgcatttctactgggtggaggggtttataccctactggacaggctgtttcctgcaacatcaatggtgatgtagaatgcatatcatagtcggacaagagctgcagtacgaggatcgccattgttgaacatgcgaattatgtcagagttgaaatgtaaagtaggtaatgataaaatgctaacgaactatcatcagctcttcgtagcttacataggtatatatgatatcttagtctcagcaatctgtatagaacgagataagttgatgtttaccccctacacccacccacaaatgttatttagcttccgttgcttttaaagaatacgtggaattttgtagacagaggcaagagcagaacagagaaatatatatatgcccttctacttcaattcacaggctgcacaagtcgatgctaaacacgatgaccaaaattgctacggataattcatttcggtggatgcattaatgctcttggaatgtaacgaattctttagagacctcacaaagtcacaaactcaatacatttctgctaagacaataacaggcactaaggatacttcatcaaaactgtaaccctcgtttggttgtattgcgctccaatcatttcattcatccactccatactcttttttttagataatgatccactccatactcttagagcattacaaattcgttctattatttacagccacattcagaacagtgcgattaacaaagagacagaggtgcctggttgaaaatggataagattttacttgctcattgccctgtcctatttgtcgctcttgctcttgctcatacccaagaactttgtagtaagtgctaagatttcaccgtcaaaattataattaggaactgtaaacttctatatagtgagtgaaacatattatttccctacacatatattcccaggccaacttcctttggatcagtctctatcatccaggaaggcctgtcaatcaaaatttacggtattgtgtcagctagcatactcagtattgattattagcttactaatgggtgttgaaattgagcagagaggacatcacttgttcatcacgaagatcgttgttccttgagacgcccgctcaagaagcaccttccttgattcaattgctactccctctggctgcattatgaataaaagtggtgattttagaaaattaaaacaatatattgtgtcgactagtgtgttattttgtcctcccattagtgcaccactaacctcctctggaaaccagacgccaggctgtgtgctgccctcaagaactgctaaaacaaacgctgctgttgcatagcccaccgatctgaaaatccaataaaaattaatgctaagatgcaatgcagatagttgtaccaaatgattttgtttgttcttaaaatttaaaactgcaaagtaaatcggaacttctcaaaacaaccatgtagtaagatcgctccaagttttgagtatgaattcctaggatttagggtgttagcattacaaaaatgctgcatcattcaaatgttaaggaataatcactctgggaagtagataccctgttagcttttaaatgaggacaggtttacatggttttctcaggaatccctttttgaataaaaggaaactcttatacatagcatgtaagtttttgaaactggggtctcatttagagagcacctatgtgaagcttcctgcgatctagggcaaaaaatgtgatagttattttttaaaataagtcttgatatttgatgactaatatggtaaatatcaattaggtaatggaccttgagaatgctcaactgcttgtgcagaagtgtctacttacacagatagttttctatgagaaaataatccaatagtattctttccatttgaacaatctaagtctacctgcatataaatgaaataaatttgatcaaaaggtagtgatcagtagctacatatacaactttggacaaagtttgagtataattaatttactcttactccaggtatggcttgaggaaaatactagaagtagtatgcttttaggctgctaacctggaccaaggaaacaaatcttggccagtaactagtaaaaacaatagtctcagtggaccaatattttgtggaaatcgatggctatattgagagttacatggtccatacttcgctccctttttgaagaagtgataaaatcaaatcttataattgatcaaatcaaagtttagaaagtaaattattttaaaaaactgaagaaaaattggctgaacaaatattttaaaactggcattcaaatacctgttctggccacagcttgaaagagtatgcagttaactctggaaatagcttgaagccttggaaggaactagtacttctaaaacacacaggcaaaaattttctatacaaaagttgctttaaaaaatcatattaatccattttttcaaaaaaagtaaataattaattttgcgtgtgcatgaggtgagttcccaacctcacctcgagaacacagctttaggtacttactctcatggaaacacgctctccagcaataccatcgatagctcggacaaaaggatcaacaaatccaaccaattttagaaccttatttttatccctcaagaattcctgaacacgaacaagttgcagtcaggtgtaatccgcattagcaccaaatcaccagtttaatattatcccatttttaagatttcagcagaaaacaagcaaaccatgttgctttaacagtaataatagtattagttgatttcaccaactacataattaaataataaaataaaatgtaagcaattggttgcttaaaaattaaaacttctatttttttagtagagtttactagtactagaatactaatagcaccggttgtgtctgaaagaagtaacttgatagtgcataatttgagaagtaagacatacaacaggtaaaaagtttgcgaaggcctgcattacccaattccagaaaaaaggagcagtaccgaagcgagcactgacagtaggcacacctaaaaccttataagcactcttcacctcaggcaaattcctggaattagtggcataatataaaatttattagcttccattttgaattctaaccaaagtggtttttccttattgtggtaagatctcaaaaagtaattaatgttcagtgcctacagtaagtaaacatctttcttcctaacccctttgccaaaatcaatgctgagagctccactgtagggcttcaattttatttcttctcctgaatttgtaatgagaacaaaacttagattttcctcatagagaaatcctataagtgcactaataaattattgaaaagtacctttgttatatgcgattacatcctccgcaagaagcagaaaactagttgttaatattgttggcccagcaccaccagtgcctgcagtataataaaagaatctagaaaaaggatttagcaacatactagcatagattctgatgaatacgacaacgctttccatacttcatgactagtttgacctttaatttttccaggaaataaataactcctaaccttaatctttcaggttcaccagcattttcacttctagcagcatgaacaagctcagcagccatcactgttccaaaagaagaaaacagtgtatttctaagcactcaaaaaattaagatatgaagcttacctagctagatcaaaacattgtcttcatagtttactgctagatcatgtctctaactctctattatgtatttgatatcttcaatcttcatattaatacatgacactaatcaagttggtgattttacacatatgtaaactgcctcaaagagcaatggatactatccatgagtactgatggaaattgtgaaagagcacatgatgatatctggacagtgtaacttgaaaaatatcaaagtaaactgatatgtttgatagaaatgcgaagtaagaccattgctcactccaggatagatgccggcagttgtaatagctgggataccgcaatcttttgcttgttcatggaaaccctttgctctccacgaatagtctgtatcatcacaaacatcaatatatgccgtctgtaaaaaaaaaaaagttaaggatgtcactaatttcaacgtgttattaaacttatgcatttgatgatcaggcgttgcacatttctaaccttggtcgctattgctgcctgtaggacagtgcactcattctccctttggaaaggtccagcagcatgaacaactaaatccacatctggggcaaaaaaagaaaaactagaatggtcaaacatcagaagaagtttgtggatgacttttcaaaatatttgcaacaatcttttgaaatcatacggccggtgttccaacttaaaagcacaacataagcaggtagttccattactaaccctgtagcacttcctccagcatgttcctgtcgcgaatatctacttggacaaactctgattcatccccgagtttagatgccaaagattcacctttctccctgaccaaaaaaaaaggatactcgacaaatggtcatgctactataatcgtctcattgtacagatggaactgcacaatattgcaggcatccagccaggatgctattgacagaagaaagaaattgttcccactattgaagtgaactacaaaatggctacttggctaggtgtggtttgcattcgttcaaaagtaagaaattgcaacacaagtgaagtaaattcattctgcagattaaaacagacgaggaaattgagtaacagactagtgcggaggaggcatagcatatagggggcaccaacaggttcctgccggcgatgaggatgttgaggtcggggcggagcttggagagcgcggtggcggtggacccgccgacgcggccggtgccgccgagcacgagcacgcgcgcgctggaggaggaggacctcctctgcgcctgcgcgtccgtggagggagcggcggatgaggaggcgacggcggcaggtggcagcggcatgcatgccctcaccacggtggccattggctctttgctcgctccgctccgctccggcgacatagccgagtggtgtcagtgctctgtgctgtcagggatggcgcaaggcaaggaggtgcttgtttggttgggtacgtggaagccggtgggccgttggttcggtcgcctatcggattatccatccatctaaccgctgtttcctccctcccttcatatcgcttacgatgggctgaattagctctatcttgggcctcagtatgaactatgggaaggtgagatggcaccagggtttcccaaaccgccgaggtcggggttaccgcgccccggcggtaaccgtgaaaaaccgtataaaaccgcgcaaaatttattaaaaattcaaactatttttaaaatttatttgaatttaaggaggttaccgcggtatttatattaccgtgcccccgcggtaagcccggtaacttttaataatcagtggtagtttgaaactagtccttattgctaaatcctctcgaggtaaactaccaataatctcacaaataagcatcttttattttattttgaaaagatgggaaatcacaaactgagtacgcagtctggctacaatctttggattaaggataggaaataaagtaaaggtcaagtatttaggtattgccgtattgcaagacctaccaaggccatatgtgtttcgggaccgtggcctaagaaatttgaggatatgccatctgatttgtgtgcctttgaattcttgccacccaatctgtgtgtctttgcaaaagtgtcactggaggtgcgaaacttttggtttcgtgccacttttgcctagggatgaaaacggtcggaaacgatcggaaaacagcctcaaccatttccgtaaccatatttttctcggaaacgaaatcggaaacggtaaagtcggaaacgaaaacgatatcggaaatatcggaaaaccggaaacggaacaatacgaacggaaacatgtcggtacagatcggaaaccggtaacaaatacggaaacattaaactataaaaacatatatttaactttacataagtatgttatatatatatacataaattcaagcttatactatataaattataaattaacttcattttagccatgtacaaaagttagagattttattgaagagtcattcaatctataagctgtgggtcaagtatagacatgtcctataatatcgacatatttagaatacggtaattaccatattataagaaacggtaatttccgcgagaatacagtaaatacggaaacgatcggtataacagcaaaaccatttccgttttcatttccatattttttaccatttccatttttgtttcggtcgattaccatttccatatggctcggccggtagaaagtcgaaaacgaacgccggtcggccggtaattaccgttaccgttttcacccctacttttgccgaagaagggtaggaggcagtgcgcgggcggtgtctcttggcggtgatgccgcgacggcaacgataatacgacagtcagctactgtaacgccccgatttttgatcggaattaaaaatcattaaataatacattttctatgaattaaataaaagttaaatcaatttaatcaagtgaactaatgggagaattaaaatttccttttaaaaatcattggccggaaatattttgtaatattctttgtgccctaattcactctccggatttttccgtaaattttcggagctcaagaaataattttaatgccacaaagttcgctaaatcaatttaaagaaaaagaaaaacaaattaaatccctttcctccctttttgggctcggcccaactccctccctcctccttcccggctaggccggcctccctttcccctccctcggcccgctcggcctccctcctatcctccctcgcaaaaagtctgttttgcgtcccttcctctctcccttcgccgacaggtgggaccggcggccccacctgtcatccccttcctccggctccaaccgctgccatggccgcccgagcctccccacgacgccgccgtttccgcactccttctccaccccgcgcgcgagtccgccggccgtgggaccccgccg

SEQ ID NO: 8275 - DNA, 5506 bp, Oryza sativa
atcttatgtaagtttatgcttctttcatgatactattttttttgcagtttgtttatgtcatttctttgctacatgtgctttacatgaaagtttagtgcattcgctgttcgcttgacaccattaaacctatcttgaatataatttaatggtgttatatcagaacgactaagttggcctcccattggtaataccatccatgagaatcctttttgttattctctagtactaagaatatgaaatggactagtgtaagacggttcttgtttggagtgtcatgtgagggacagaattgcaggcagggaaagaatgagagtagtacttctctttccataagttaaatgtgttttgagattggggattctaagaaagaaagggatgaattacattataatttacctatgccatacaatgttcagttgtcacaaaactataggacaacccaagaaactatgttgattttatctttattctttctctctgttttttcctaatataaatctttagttaattttagggtattcccgtgctggtttcttgggcggttaatgtgccaaagtggctggggtgccccagggaagaaggcacaagggacagtctgtagctaggcagttaagaattctaatccactgggttaagtttggcttgcattcctaactagagatgaactgacaaaggcgatctaccatgctggcaaaataagtccatagctcagtaaaccaacgcattacctattttgttgtgtccttcctcgtgtttagatggtggcaagaatggtgctttttcatcagtcttcgataatcctttgcactgtaaaaatatatgtaatgaatgcaactgagggctactgtgctgttattttttatgaatatgtacagataactgaagaaatagtgcagaaatcaattgatgttcttgtaaaagttgtcgagtctgagggttcagcattggcatccactgcgatggaagctcttggtcatattggtctccattgtttattgccttctattaatcgaaattcctctcaaggtaaaatgtgtttcctcgcacttctgatagacgtgaactgtgctactcaccagcttcctctactatgtatttgtttaagctaatttcgtttgtcttgcagctgcacttttaacaatcctgaatgagaagctggctaagctgctttcagaaaatgatactaaagctatacaaaagattttgatatcgctgggacacctatcttggaacgagttgtcatttgcacacctgaataatgcattggacttaatttttagtctttcacgctctaaggtagttcttttgataaattcaaaatttgtggttgaaaatattctgtatttgacaatattctattcctaaatatcattattcaggtggaagaagttctttttgcagccggggaggccctatcttttatatggggggaagttcctgtgaccacagatgtaatactagaaacgaactttgtctccctttcccaggccacaaactatcttactggtgatgcacccgtacttgtctcgagtaactctaataaaggaagtgattgtgaagaagcacacgcaatggctcgagaagaaattataaaacggttatttgatacattaatttatagcagtagaaaagaggaaaggtgcgcaggtactgtctggttggtctcacttacaatgtactgtggtcagcatccaaagatcctggaactacttccacaaattcaggtctgccaatcaataataacatatatttatcattgtagaagtactatatcttaggacaaacaagagtggtgcactccaaagtttacattagaattgatacaccataggttgttgtgtgaattattaatctgtcctaaaattaaaacaatgccagtatgctggacagggcacagaagccaacaactgttaataattgtgtacctttcatctaaaacatgtgcttgcttatagtataattcagagttcctcagaggtttcagctgtcaagctgtcactgaaaaatattaatttcagtactgatacaatcacctatatttagacttgatccatgtgcaagtgcacttctttttaggttttatcctctatggtgtttacgcatttcagttgaagaaaaccagaaactttgagtatttgattctacaaatcgtgcatgcatatactgatgtagtgtagtgttttcagttagtggagtccttgtcttggggtgaaagagtgtcctttaatgttgagctattctcatattcaaactttgtctttttctgtcattatatgtttctcttctaaatgtcttctatcttgtatcattatgttcattccagcgtataacagtttgctctaggtttctgcttaccttttgaagttcattccttttataggaagcccttacccaccttcttggtgatcagaatgatcttacacaagatctggcatcccaaggcatgagtattgtatatgagcttggtgatgcatctatgaaggagcagctggttcatgctcttgtgaatacactgtctggcgcagcaaaaaagaaaagggccatcaaggtgcacactatgtttccagtttccattttgagagaacctggaatacccccgaacccgtacccaaaaaaaaactgttaatgattaatgttttctctgtctgcattagctgatggaggattcagaggtttttcaagaaggaactattggcaataatcctactggaggaaagcttagcacatacaaggaactttgtagccttgccaacgagatgggccaacctgacttaatatacaagtttatggatctagctaactatcaggctgctatcaattccaagaggggtgctgcttttgggttttccaagatagccaagcaagctggtgaggcacttcagcctcatctgcataccttaattcccaggcttgtccgttaccaatatgatcctgataagaacatccaggtattgaactatacgcttacattatcacatatgccatgttttgttttctgatttttgtgttgggtttaagttcttaaagtgtttgtatgctataaccttatgatccttcattgcaccaaagtgagtatgaatcttgttagctatggcctgcaaaatttcagcaactccacagctgaggtcgtatgcatgtttgtaatcttacctagagaattattggtttgttttttccaatagtgtgtagatataaaagtataatgcggtcttcttgttcatatagaatccaaggcagtcaggaagtactacagtgcatcagacagctcagattatctgattttgatcacttaactatttcaaaaatggttcttcctagctaactgacactttgtatttcattctaggattctatggcacacatatggaaattaattgttgcagatccaaaaaaaacaatagatgaacattatgatctaatagtagaagatttattggttcaatctggatcgaggctttggcgttcacgtgaagcttcatgtcttgcacttgcagacattattcaaggtcgaagatatggtcaggtagataatttgttttgctaattttgattttttttaaaaaaaatcatgtaactattttgttttgcataagctatgaataactggtttaggatttattttgagaataaaatattgcttatctttccctttgttaaggtttctaagcatttgagaaaaatatggattaccaccttccgagcaatggatgatattaaggaaactgtgcgaaatgctggtgacagtttgtgccgagctgtaagcttgttgacagttaggctctgtgatgtgtcacttactacttcatctgatgcaaatgaaacaatgaacattgtactgccatacttgctttctgaaggcatactcagtaaagtttcaagtgttcaaaaggcatctataagtttggttatgaagcttgctaaggtatactcattgtcaaattcaaaaaaagttatctgcattaacattttagtggcaattttttgctccactgtaattttctttatgtatgctgctgtcatgaattgaattacacgaactaactgcccgatgttcacagggggctggccctgcacttaagccacatctgtcagaacttgtcagctgtatgctcgaatgcttatcaagtctggaggatcaaagattgaactatgttgaggtatgctacttttcttggtttttgttaagcacggatgggtagtgattttccaagacaattaacagtttctatacctcactcatttctgaatttggaccaaagatgcatgcaggaaatgctggcatccaaactgaaaagcttgagagcttgcgtatagctgtggctaaagattctccgatgtgggaaacccttgatatctgtttaaaagttgttgacaaagaatcactggatcttttagttcctcgtctggctcaaatggttaaatctgctgttggtcttaatacaaggttagttttgatgctactatgaaccttgtagtataattgaaataataaattgttgcttttcatgtacttcaatcttgttgtcattcattttatgtttgtcttatttcagggttggtgttgctagcttcatcaccttgttagtacagaaggtcatggttgaaatcaagccatatgcggcagcattgctgaggttactgtatagtgctgttctggaggaaaagagttctgcagctaaaagggcctttgcatcatcttgtgctgcagtcttaaaatatgccagcccttctcaggctcagaaacttattgaagataccacttctctgcatttaggtgaaaaaaatgctcagttgtctgctgcaattcttattaaatcttatttaagcaatgcagcagatattcttagtggatacaatgcagttgttctcccagtaatttttgcttcaaggtatgtgaacgcatgtagtcttatcttagccttttatcttctctaccattgctaatggtattacagatattaatgtgttttgaagttcactttcagtctatcacagtaacttgaaatgcacatgttctttgaactgtacattgcaataacaaaacttattttcagatttgatgatgacaaagacatcggtgcattgtatggagaactttgggaggatattcctagtagcgaaagagtaaccctacagttatacttaccagaaattatctctcttttgtgtgattccatgtcctcgtcgtcatgggctgggaagagaaaggtgaagcctttatttcattatcttactgtccatacacataaaagtatcatagcttggaatacacttacagtactgtgtgctacttgcagtcagccaaggctataaaaaaactatgtgatgctctaggagaatccctgtctgtgcaccacaataatattcttgaatcacttttgaaagaactacctggtcgattttgggaggtaattagtactatgatttttctatctgtggcttatcagtgaatctttccttttattcatggaataaaacaggatggattgcttagagattttcaaga

SEQ ID NO: 8276 - DNA, 35114 bp, Oryza sativa
  unsure (1)..(35114): unsure at all n locations
atgccagttccaaccaacattgtaattctactccaggtatgaaacttttggtcattttaaggcttacaatttcaaaaattggacctaaaggttgaacaaatttacaattagaagtgatacctgccagcgtcttcagggctgaactcgacatcagggcagcctaggctgcgggcgtaggccaccatttccttggcaatggccaccacctgctcgggcgtcttccttagcttgtgctgcatatggatctcgctggtggcaatgaaggtgtggatgcgcggccgccgcgcgtgccgcacggcctcccaggcagcatcaatgtctcgcttattgcatctcgagaggccacagatgaccggcacgtggccgtcctccccgacgggcgtgttcccgacctcgatggcgatggagcgcacggcgtcgaggtcgtcgggggaggaggccgggaacccggcctcgatgatgtcgacgccgaggcgggcgagctggcgcgcgacgacgagcttctcggcgctggtcatggtggccccgggggactgctccccgtcgcggagggtggtgtcgaagatgcggacgtagttggggtcgtcgatgcggttggggacgtactccgggcgccgcggctgcgccatggacgcccggacggggcgggcgaaggcgcggtggtagcagcggcgggaggcgctagggtttgcggcggcggcggcggtggcgaggccatgggagaagcgtggggcggcggcgcggaagggggagagagtttgggcgcgtgggcgtggagtggaggtggggtttgcggaggagaaggaggagggttttggggaggagaggagggaggaggccatggtggtcgccggggtttgtggcgtcgacgactcgggggtttaggggaatcgaatcaaatggtgggagagggagatgcacttgctctgcttctcggtgatgtgtgtgtgagtcagagggggagctcttatctggacatgacaacgggggtttcgtgggatgcacgaatgctgtgatggcggcgtggtttttgcggcgaagaagacaagtcggacttgcacacaaggctcgggggagaaatggagcatgcgagagtggtgatgctggtgacttggggagtgaccacatgacatgagcaattggcaagcttgtgtaaaacaaccaaaccaaccaacttctttttgaagctctgaagtctgaagatggatgacaggagtagcctagcttgccaaggtaaggttgtttgtcacatacgcatatcaaaggcagaatttgggagaaaggatgttgttcacagcacagtagtgtgaggcttttgctgtgtttcttttggttcacattgtgatcttatacaatacaaataaacaaatccacttttgatcgctcaaatatggccttttaatctgattttggctttatcttttgttcgacggttttaagacttgagggccaaaggtaaatttttttcttaaaatcagtcaggctcgagttcttcacaaaataattacacgcaatggaaattgtgcttatgctaagtttaagtagcataaaaaattcaaaaggaaatcaacacaatctacgtcataattcatattttgattagttaaagaaaaaaagagcaatcaaaactttacgatacaaaccagactcaatatcttatcgaataggtgaaaaaaaaactcataaacaacctaacattactgcacaatacatagctttctaattagaaatatagagttgttcaggtggttttttattcataccattgtaatcttaagtctcgttgctggtaatgatgatagacattagctttttcaataaaaattggcaaccattattttgaacactcactaaatgctagatctattattttgttacatatgcttcatatcataacaccacgcttgtatactattatcttcactacctttataacttatgcattctctctctatgtattaaactatatacgataaagcccaagaaaaggtgacaaaacagatcctatccagaggttcccatccttttcttcaacttcgctaatagacttgaacaacttcctgacatcaccatgaacactcattgcttctatggtcttcccatcctcactcaacctcaaagctatcacttgacgaccaaatcctgtcaagaacgatgtgatgcgttgaatgcgttgagctggtagcttaaagattagtttccttagccaaggataagaaattgaccactcagcgatcttccctctcttggcatgaagaccaacccaaaaccctcctctaggactcatcttaatgttgtctggaaacccaggtagttgcgcaacttcttcaatagttgatgcttttggtgttttaatccaatatcttaggatcttacccgttgtggtttccgcaagtagcaaataagaaccatcgatgctcatagccaaaccattaggaaaacgtaggccatcaactaagacttcaaccttgttttcttttggatcgtatttcaacaatcttccagtgttgtcacccgttataactatgtttagaaactccctacaaataatttgaatgaaaaattatatatatatatatatatatattacatgaattgtcattaaaaaataacaaactgatgagtgataataataaatntatnntatttattggtccagtaccttctctgaaaccttgtactggtctcggtgaagtagattactccagtttcatggtcaatctcaacgccgttggagaagctgaatgggcttcctgtcctcttaggaacaagcggcctagacacgttctcacccggactgaccactctcagcccaaggtacgcatctgcgacgtacagctcactcagtcttgctattgaacttgaagcccagtggacgcccacacttctgctcccgtttcgtgtccttggatcctctgcgatctatccaaccttgcacagttcaggtcaacgaccaatcaatcgataaatgccgttccaacaattcaggacggaatctgccatactataaatattatttggaccatagcataaatgatagtcaaaaaggagtagtgaaaatgaaatgaactgaacaataacattgttgatgatatgaactctgaagttgaattataccaagaacttttcagttgttttctatatgtacagatgtaactcacagcctcacaggccatattaagctcacaattaatcatcaattaattggggatttggacagtgcaactgtatttgtccggtccctggacctggatcgtaaactaaccaaccaactactactaaccaaatcatgagaacaacagagaactatactaggcagctagcaacacgggtgaatactgaatagtttccaaaagtggaaaaagacttacagctccggcacggagcaggagtgctcgacccaccggcgctccggcggcggcagccacttgaggatcctcccgtcagacacgctcgtgtacggcccatcgccggcgtcgccgaacactatgctctccggccccgcggcgccgtcgagcagagggatcagctcgacgtcgccgtcccttatctccagctgcctcacgtcgctccgcgagtccagcgacaagatcgccgccgccgcgaagacggcgagcgccaagagcttggccgtggtgttcatcgtagctaagtaagctaggcttttggtgagctacccacaaatgggagtgttcccccactaggcagagtatgggttggttttatgctacctgcaaaccgatcctaacttcctaggtgttgatttattgatcatggtaggatagtaaatgcattgccatctccatatctacaaccattaaaattttaatggtgaaagagaaagaaagatccaagaccagtgtacggtccaatagttgccactgtgtccatgctgacaggcgtgttcctgtctcacggttgcaactcgcaactactacctgaaatacgagtatgtttcacatttttttagagtttcttattactcattctctgcaattttacatgaagagcagcaggctaatcttaggtacaacatcaactattcctgaaagatgcttctctattcagcgttaaatagtgatgactactactactttgtaatgtacgtcgattgaataagacgttcttttaagagaacagatagtgtatgaaaagtggacatctatctctgaactttgaaaaaagaagatcgacattgtgtattttaagttcggtgccccataaccatcccatgatcccatcgtgtacaaacgacaaccgttgttgacctaaaacaacattttttttcagaagaaactaaaaaatgcataaaaaaggaaccaatctcaacataggctgtgtttagttcacacaaaaattggaagtttggttgaaattggaacgatgtaacggaaattggaagtttatgtgtgtagaaaagttttgatgtgatggaaaagtttgaagtttggaaaaaaaaactttggtactaaacacggcgataacttatttgaacttaccctacctagttcagatttcagaacgttagtcttacagaatgatgcgccaatatgttggcatggtcccaaaagagcttccaattatatccattaaaagtaaacagcataaggtagatgagaccataagtgagttttcagtagattggcaaagcaaatgtaagactaccatgtgcccatgaagataacatgtcgttagagttgcagtacatgtatgatgtatcaagatactttgcgcttggttggttagctaatcaagctgccataggtgtgttggaaaaggaaagaaagctacaggcgacggccggtgaccgtccatgaagacagagaagatggatagtgtagtatttgggtggatgcgggttgagcatcgtggtattgttttcagtgaatatgattattactatgagatttcagctaccagcatcgtgcaatcttatcgaagaagaatcatatgcaatggaagtgtgccgaaagccattgcaaatcaatgatgcggcagctctgctacataaattgatttactttctgtaggacaggggaataatagacttaagtacacatgccaagaattatcattgctgagaggagttgcaactgtacttagatctgagtagcatcacacgcaagtaaatgcatgcagaacgagggaacagtactatgggatgaatcgcaggatcaaccagcattcattcaacagaaacagatagagattaaagcttacagttgtggctcgatgacggcggacgagtgttcgacccagcggcgctccaggggaagccacttgagcaccctcccgtccgacacgcccgtgtacgggccctcgccgtcgccgtcgaacgccacgctctccggcccgaccgcgccgccggcgtccacggtgatcagctcgacgtcgcgctcccgtatctccagcactggcacgtcgtcgctccgggggtccagggacaccaacaacgccgccgccgccgccacggcggccgcgagcaccacgagactggctttcatcggaaccagaagtccagaacctatgtgaataactgcgattaatgaaattgcaacgcgtgaacggctccggatttgtttatgtagagtagagatatggttgattgccttgtcacatttgctccttgacatgatactccaccaaaacgtataccatgttgtctgaagagagggacatcctagtacgaagctcaaaggaccgtgttcggtacgtgtatgactctgtctgccagttgggatttgaaacggccggtgaggcggtgaccaacaccgctgagagcaagtttaatagtatagcccactacaagcttcaatttatctatatccgatttaatagccaattcatacaatagttgcttactatactgctccctctgttttttaatagatgacgccgttgattttttctcaaatgtttgaccattcgtcttatttaaaaattttatgcaaatgtataagatataaatcacacttaaagtactatgagtgataaaacaattcataacaaaataaattataattacgtaaatttttgaataagacgaatggtcaaacatgtgataaaaagtcaacggcgtcatctattaaaaaacggaggtagtattataatatatggccccacctgtcatacacatattgtgtcttagagtccgtgctacagctggctataaatttgtagcccactcctctttttttttatcttttatcttattaaaatatatttataactggtagtctagtattgtacctgctcttagcgcctcggctcaatctggttgcggcgcgcacgctattttgtccccgaaaagcggtctaaaaccgcacgaaatcctggtgtttgcgcgagttccaggttggtgggtagcggtcggacacgggctgatccagcaaggacgggagcactcgttccgcatacggggcctgcggttttctgcgtgtgggctgggctggagcccgcggttgcagcggccgttagctttcccctcttctgggcctcgcaccactggagcgcgtgcgctgcgaagcctggaaccaggccgtccgttcgatctggctacctgcaaagcccaatacttaggcagagtggtgttggctcgaccaggcgcttctttcgagtgagacaggaacaaagcaacacgtttcgtgcgagggagacacggggttttcaggctagaaatccagtcgctgaaaaccagcaccaaagtccaaaggctatttgtgtcatgcatgccgggggttagctactcggctcatgctcagctagctgaacaaacatcccaaggccttgtttgcagcttgtttgctgaagaaagcctagaagaaaaggtagtaggagtacatcgatcatcagtgcagtcgatcgagagactctgaccacgcaccggtgcaaatgtgagaggtgcgacacaaaaaggaaaggaggcagctagctgcaaacgcaaagcaatcaagtgcagagaaaaagtcatgggcctcctgtcttgacgtgacacctcctcctcctgagtccagactcctctgtcctgggcggcttctgcctctgctgtgcgtgccatcagcaaggcctgcctgcagctatctgcggccgctgcagcatattattggttcgttaatcttacagcaatgcgagtttagcagcttttcagtagcccggccatcaacgcatgcgttttctcgtcagtcaagagtgaacgaagagtgggtttccatgcgacaccctaccctagcgctggatcctaaaacaatactttatccctttaattgacctatataaacactggagtgctactgtttaattactgcttgagttgagtacttggggattttcttttcatgtgaaatggcaaaattagagcatgtacaatagcagactattagtcagctacaaatatattttaataagataaaaaatgagagagaaaaatagcgggctacagatatgtagccagctgtagcacggacttaagacacaatgtgtgtatgacaggtgagaccgtatattaatagtatagtaagcaactattgtatgaattgactattaaattggctataaatgaatttgagctagtagtggactgtactattaaacttgctcttatacattaggtcaaggggatgttggaattaatgaatgggccttagcccactcgaagattaattctttgaaaaatcacaaaagcccacctcatgagatggcatgcatgtggagtttagtaccaccttgcttattctaggagagggggacctccttaaaatggaggatgccctcctagtcgcttgaagcatgtgtggtggagagaagaggggaaacacacgcgcgcgctcgctcgccgggccgggccgggggcgcgcgtgcacgacgtacgcgtcgaatggtccgaaaaattggctcctcacccttgcgcagatgcagcttctttttgcagttttgttttgctgcaaattcggattcgtttttgttttggaaacgttccgaaaaatccggtgcgtgcaaacggcgtggagtccggataagttacgcgcgacttatccggttcggttacgcgcagtagagatcgtgcgggcgccctgatcaagcgacccttctctatataaaccgacctgccgtcttcacgcaacatacaaaaaaatcaatctagggtttgcttcctactctatactgcgccgtcgctcgtagactactccatcccgctcgccggcgtgcaccggcgatcgggagagcaggtctccggaacctctgccttcgacgttctgcaccgggagaaggctgcaaatgtaaggtttttgggaagcgcttcgcgtgactgctccctgttcgttcgcgacggctcgccttcctcttcgctcgcgtgtttcgtgccttcgtagacacttgcgaaaagtttcgaccaagcagccggtctttccgtcacctcggtacgtgttcaatatgttgcgcatatttgatctgttcatgttatactgtgtagtttacatgtgtagatctaatgatgcgttcatgctagttttcatctgtaatgtcatgatttatttatggaatagattaaatcattatatgtctataatctcaacaatccaaaaaccttattataggcactgtgattttactatggctggttttgccgatgcactgaggccggataaattcaccggtgtgcattttaagagatggcagatcagggtcactctgtggctgacagctatgaaatgcttctgggtgagtactggcaaacctgaagaagttcttactgctgaacagcagaagcaattcgaggaagccactactctctttgtgggatgcattcttagcgttcttggcgatcgtctggtcgaggtgtatatgcatatgaccgacgctaaggagttgtgggatgcactgaatactaaattcggtgctactgatgctagcaatgatctgtatatcatggagcagtttcatgactataaaatggctgacaaccgttctgtagtcgaacaggctcatgagatacaaaccatggctaaggaactcgaactccttaagtgtgtcttacccgacaaatttgtggccgggtgcattattgcaaaactacctccatcttggaggagtttcggtactgcactcaaacacaagagacaggaatactccgttgaggggttgattgcgtctcttgatgttgaggagaaagctcgggaaaaagatgccgcgtctaagggcgatggtgggcagtccagtgccaatgttgtgcacaaggcccagaacaagagcaatgggaaatacaaagctcagcagaccaccaacttcaagaagcagaagaagaacaacaacaatcctaatcaggatgagaggacttgctttgtgtgtggccaagttggtcatctggctaggaagtgtccacagcgcaaggggatgaaggcacctgcagggcagacttctaagtctgctaatgtgaccattggtaacactggagatggaagcgggtatggtaatttacctactgttttttcagttaatcaatctactaattggtgggttgatactggggccaatgtacatgtttgtgctgacatctcattgttttcttcttatcaggtcgcacggggttccaccgtcctaatggggaatgggtcacatgcttctgttcatggtgttggcacggtagatctgaagtttacttcgggaaagatcgtgcagctgaagaacgtgcaacatgtcccttctatcgacaggaatcttgttagtggctcccgtctgactagagacggatttaagttggtttttgagtctaataaagtagtcgtgtctaaacatggatattttattggtaaaggttatgagtacggaggcctgttccgcttttccctttctgatttctgcaataagtctgtgaaccatatttgtggtactgtggatgatgaggctaatgtttggcattcacgtttatgtcatattaattttggcttgatgtctcggctttccagcatgtgtttaattcctaagttttccattgtcaaaggttctaagtgccatagttgtgtgcaatcgaagcaacctcgcaagcctcacaaggctgccgaggagagaaacttggcaccactagaactcctacattcagatctttgtgaaatgaatggggtgttgacgaagggtggaaaacgatatttcatgacattgattgatgatgctactagattttgctatgtgtacttgttaaaaacgaaagacgaggctctagactattttaaaatttataaggcagaagttgaaaatcaacttgacagaaagataaaaaggcttaggtctgatcgtggtggagagtttttctcgaacgagtttgacttattctgtgaggaacatggcatcatacatgagaggacgcctccctattctcccgagtctaatgggattgctgaaaggaagaaccgcacactgactgacttggtgaatgccatgttggacaccgcgggactgcctaaggcatggtggggggaggcattgttgacctcaaatcatgtgttaaacagagttcctaacagaaataaggacaaaacaccatatgagatatggattggtagaaaaccatcactttcttatttgcgcacatgggggtgcttggtgaaagtcaatgtaccaataacgaagaagcgcaaacttggacctaagactgtggactgtgtttttctgggatatgctcatcatagcattgcctacagatttttaatagttaaatccgaggtaccggacatgcatgttggtacaattatggagtctcgtgatgctaccttctttgagagctttttcccaatgaaggatacaaatagtggttcgaaccaaccctctgaaataattcccagttcaatcacaccaccagaacaaactgaacatacacatgaacttgtctctgaggaggatgtcagtgaagctcctcgaaggagtaagagacaaaggacggctaagtcttttggtgatgatttcactgtgtacctcgtggatgacactcctaagtcaatttcagaagcatatgcatctcctgatgcagactactggaaggaggctgtccgtagtgaaatggattccattatcgctaacgggacttgggaggtgacagagcgaccctatgggtgtaaacctgtggggtgcaagtgggtgttcaagaagaagcttaggcctgacggtactattgaaaagtacaaggctcggcttgttgctaagggctatactcagaaagaaggcgaagatttctttgacacttactcacctgttgctagattgaccacaattcgtgtgctactttccctagcagcctcacatggtcttctcgttcatcaaatggacgttaagacagcttttcttaatggagagctggatgaggagatctatatggatcaacctgatgggtttgtagttgaaggtcaagaaggcaaagtgtgcaaattgttgaagtctttgtatggtctgaaacaagctcctaagcaatggcatgagaaatttgacaaaacattgacatctgcaggctttgcagtcaatgaggcagataaatgtgtgtactatcgccatggtgggggtgagggagttattttgtgcttgtatgttgacgacatactgatatttgggacaaaccttgaggtgataaatgaggttaaatcattcttgtctcaaaattttgatatgaaggatttgggagtagctgatgttatcttaaacattaagctaattagaggtgagaatgggattacactcttgcagtcccattatgtggagaagatcttgaatcgctttggctacattgatagtaagccttctccaacaccttatgatcctagcttgttgcttcgcaagaacaagagaattgctaggaatcaactggaatactcccaaatcattggctcgttgatgtacctggctagtgcaactaggcctgatatctcctttgctgtgagcaagttgagccgatttacctctaatccgggagatgatcactggcgtgcgcttgagcgagtaatgcgctatctgaaaggtactgtggaattggggcttcactatactgggtatcctgcggtactggagggttatagtgattctaactggatctctgatgtggatgagatcaaagccactagtggatatgttttcacactgggtggtggtgctgtttcatggaggtcttgcaaacagaccattttgacgaggtcaaccatggaagcagagctaacggcactggatactgctactgttgaggcagaatggctgcgtgatctattaatggatctgcctgttgttgaaaaaccggtgccggctatccttatgaactgtgacaatcaaacggtaattgtcaaagtgaatagttctaaggataatatgaaatcgtctagacatgtgaaaagacgattgaagtctgtcaggaaattaagaaactccggagttataacgttggattacatccaaacagcgagaaacctggcagatcccttcacgaagggactatcacgaaatgtgatagacaatgcatcgaaggagatgggtttgagacccatgtgagttatactatggtggtaacccagtctatgtgatcggagatcccgtgaattagatcctgggaagaacaaaccattaataaactagaggagagtaccaatatatataccctctccaagtgaagatgcatatactctcgtgagctgcaaggcaggttggctatgccttaatgagttctgttggctttaattagcaaagatgttgtcctgcagagcattcttgaaagaactcacctttgtgagcttgactgttggtcgcagtctatgaagattttgggtgaatcttctaggaagcttactaaagacctaggagtatgacttatacgctccacccgaggggtagtctacagacggtctagtaccagataagactttgagtgaaacttgcttgcacaagacttgcaattcaaggcgtagtccattgttcaagttgtgagtaagtgtagcttggagttctaggtggatgttcaaccttaattggtctccatcgaaccgctggtatataaacagtacattggaaaaggcaaatctcagtgggattttgagatttggtgggggattgttggaattaatgaatgggccttagcccactcgaagattaattctttggaaaatcacaaaagcccacctcatgggatggcatgcatgtggagtttagtaccaccttgcttattctaggagagggggacctccttaaaatggaggatgccctcctagtcgcttgaagcatgtgtggtggagagaagaggggaaacacacgcgcgcgctcgctcgcctcgcctggccgggccgggccgggccgggccgggccgggcagggggcgcgcgtgcacgacgtacgcgtcgaatggtccgaaaaattggctcctcacccttgcgcagatgcagcttctttttgcagttttgttttgctgcaaattcggattcgtttttgttttggaaacgttccgaaaaatccggtgcgtgcaaacggcgtggagtccggataagttacgcgcgacttatccggttcggttacgcgcagtagagatcgtgtgggcgccctgatcaagcgacccttctctatataaaccgacctgccgtcttcacgcaacatacaaaaaaatcaatctagggtttgcttcctactctgtactgcgccgtcgctcgtagactactccatcccgctcgccggcgtgcaccggcgatcgggagagcaggtctccggaacctctgccttcgacgttctgcaccgggagaaggcggcaataaggtttttgggaagcgcttcgcgcgactgctccctgttcgttcgcgacggctcgccttcctcttcgctcgcgtgtttcgtgccttcgtagacacttgcgaaaagtttcgaccaagcagccggtctttccgtcacctcggtacgtgttcaatatgttgcgcatatttgatctgttcatgttatactgtgtagtttacatgtgtagatctaatgatgcgttcatgctagttttcatctgtaatgtcatgatttatttatggaatagattaaatcattatatgtctataatctcaacaggggaagtatgaaatatagtacaccgtctatttctttatcaatagctgaatacccgtattttgctatgggtaaaataaaattttcatgaagtgtgctttgctatgaaaaatatattgatcttgttttaattttatatgtagctatctatttagatttgattttttatattaagaagtttaaggcttgatttgcaaaatttataattagaggtggctgagttcactgccaccatcagtaatatgattgacaataaaccgacggtaatatgctggtagggattgcacaattgttctagtgcttgtcataatgaaatgaaatacgccttgtctttttcaaaagagggagtatatttctgatgagacatgcatgaaaggtctgttttataaagtttgcatacgctaaattaatagtatggtctaaacctccaatttttagttagtatgggctaaattaatacatcaataatttttaattagtgcaaacatgattaataatatatatactactagctcacataaacagtaactcacaagtacatcttgcccttttgcatctgcatgctggaactcaattgggttttcatgggatactaccctggacatttatcagatggtgcaggatcagagacatggttttcgaaattcctgttttatggaaatctttctggtagcctgctggttgatctggaaacaaagaaatgatctcatttttaacaacatcagtgtttccatttctcgctggaaggggaacttgaggaaagagttaagcctacatttaactaggtttaaagtagctaacagatcttcttttcaatcatggattgatgctttgtaattcttcttcttctgtacagattcttttttttcctctatataaatgaaaattaaccgtgggggcttcccccactgtttcccggtcaaaaaaaaaaattagctcaattttttttttgctagatccattgagcttgtactagtagtatattctagcagagaatgtgcatgatgccaaacggagaattcgatagatcgcagtgatatgatatgacgcactgcagcgtgcttggtggtccttctttgtgtgtgttctcccattggcatggaaatatgtatacacacttggcgatatgatatgcacgcacgcatgtttattgttcttttccctttcctgttctctcgatcttctctaatagctaggcgccaccatcaggcacagtcagctcaggtcaaaagctttaaaacactactaccaaatgatcagctggagatagagctagcactattccagcatggcacaaagtgttgagctatattattccttttcctgcttgaacaaaaaaaaagggcatctattcatgccatgcctccctgtttcccaaactctctgaacatgagtaataaaagagatggatcagcattagatgtactgttcatcaccatctttgggtctatttgggagagcttccagccgctgcaacttctccgagaatcagaagctcccccaatcagtacagctttgggtccagattctgagaagctgtaattgtagaattcataaaatgaactagaagctaaaagctgggaaacccagcttttccagattctcataggctgactacgaaccagctgcttcttagaatcttaacctctcgcaaacatacccttttatctcattcgttctccaagataaaatatatatggagctcatcgtcagacaggccggatggagctaagcttaggtaacaccattcaattgatgggacgttggatcactgtaaagattctcagcatggaaacagcatgtactactactataagcaaacaggcaaccaaaagaaagaagaggaagaagaacagtgccacatgtttgcgtgcacggacaattagctggaaacaaaaggaattatcggggctcgatctgacgctaattaaatccccagctcttgctaatcgatgaacaaaacatgaactcgatcgccgtattgcagcagttgatagacgatcaatagatccaggcagtggtaccaaaagtctagcagaaaacaggtgaagcgagcgagagagagtacgacaaagaaaggatcgatatcgatggagataattggattcgtcacgacataattaagattcatggatcatggccacactagctaatcaatttgacaaatcaagaactgtatatacagcatgaaatgaaggcgctgtagggccggccatgagagcgaacagctaagctcagctagctctcatccatggtgtcattggcgtttgtgtgtgtatgcgatgaaggaaagagagattaataatcaattaatattggcaatatgatgagaggggagcatgcataagaggacaggggcaggcaaacagtggaaatccaagccgggaacagttgggggaggaacccaccatgggagacaacgcttttattgcgagatgtttttaacagttgcagtgactgatgagagcatggtaccgtgggcctctcctctacagtattctatacagcgaagacgagcgagaagtacgtaccagccggtacgtacgtatacgtagctaatagccattgttaactgttacctatagcagtagctgtaatgcatgtcatgtctatgatctccactgctgctggtcatatgcatatggatggacagtaattaattaaccgcgcgcgcagttttactggtgttgagtcacagatactcactctgctatctaatacaagagattttaacattttatttacacgatttgaccaatcattttattcaaaaaaattagtgcaaatataaaaaataaaaagttgtgcttaaagtattttgataataaagtaagtcaaaataataataataatttcaattttgttaataagacgaatgataaaaaatacaaataaaatatcaaaatcccttacattatggaccgaagggagtaaaaattaaagacatcatgcatgcatgtcgatctctcttcaaggaatctactgcgcagttgtcctcatgcacacatatctgcaggaacaattgaagggatcgatataattggagagaaaaaggcaaggggtagctggatatattcatccatatgctcaatcgtcatgcacgtatatatactccctctcatttttaatgtataatgccgttcggcttttaagatacatttgaacatttatcttattaaaaaattatataatttatttattttattgtgacttgatttatcataaaacattctttaagcatgatttaaatatttttatttttttataaaaattttgaataaaacgaatagccaaactttgataaaaagttaacatcgcactgacatgagcaatgtacaaagtgaattgtgtgcagtacgatactgcatgcatataaagtgtagtttatctttatttatatattgagtacaactaacattgggatgtagacttgcagtagaataaatctctgtactagatttttttttgattttttctaaaaaaatttcaaggataaactccctgaatttgaacttttctgccatattattttaattagtgtgacagaacaacgacactatcatgctgataaaaaaaaatcaaggcgtgttactctatactagccacaccattgttcatggtgtcatggtgtggtagagtatgggggtgtttggatcagggtgtaaagttttggcgtgtcacattggatattatatagggtgtcgcatggggtgtttgggcacgtcattagcaaatgtttacggtagcaccatattgtcaaatcatggagcaatctatctggagtatctattatatactaaaagtctattaaacttcctacaaacgctcttaaaccgccacgtgggactcctaaaaacgctcctaaatcgccacatggcattctaatatattagaaatatctagcctttaattttcacttaaataggtgggtccattattttagaccattagattagcttagattaaaaaaagtcaattagtcctcccctcatctcacgagcgcatatgtacgccccaatggcacgcatgtaacatacgtgaaagtgtgccccacctttttttttactcccccccaaacttttacaatatatttatatcacctcatttttatgccattggtatttttgagcgtatatttgctgaaaccacaaaatatttcagcaggttgttacatagacagtcccaaaataaatcattcgatcctcgattttcatgttaaatcagatggacaagttattttatacattagattagatctataaaaaaaataccatccaaaccaaaaagaatatcctatgtattatatagcactattcacgtgaaaaaagccaaaaagaatcttcctgtgtacgtatacttactccattatattattcaccgaataaaaatatttttattatatgagatataaattggtgagtccattattttagatttagattaaattaaaagaagagttagtccctccctctcatctcacccgcgtgtacgtacacctgcttcatcccgtttgtacccaggtaaggtatgtgccctcatttctttccctccccccatttaccccttttttaccctacaacctctacttttttagatgttttaaatagtgggctaagccataaatagtgggctaagccatttagcggttagttctcaaacagatatagcggcagctatagcgggctaaatagagctatagtggctaaattgtacatgagagcaaatagctaaacccttttcaaacaactatagcgggagatttaaaaccctacttttttatgctattgacattgtttgagtgagtgtatatttgatcattcatcttcgtattaaaattatgtaattataataggagattctagaaattccgaccttcgatttttatttaaattggtgaaccagttattttatagcattagatcacatctattaaaaatatttcatatgtacatatgttgtacatatgaatacatagtactgacaagaaaaaaagccaaaaagaatatcttgtgtatatatgttaccctccttaaaaaaaattgcatggatttcaaagaaaatgaatggcctatattagagggcacctaacccctaaacttcctacaaactctctcaagccgacacgtgggactcctaagagcatgtacaatgtaaatgctctaaaaacgctcctaagttgtcacatggcgttataataaattagaaaagtttattgattttccattaaatcggtgaacacattaattttaaccattagatctctctaaaattcaaaattccggtagccagcacgtactccctcctagccaccctccaactcttcccttctctcttatttttagctaactttttctattatttagctaacatagatctatcttaagattttgaaattacgctcatctggaaaaaagaatcacgtgtagaaaaagtcctctatctctccatggacgtgcacgtacatatgtacctaccctctttgttttctttcctctttttttcccttcaggttagatgagatagaaaatcaaaattcgtattaaatatattttaagttgtaaaaatacactctaataaattagaaaaacatctagaaaatgtgagaaaaaaaacctaaaatatctagccatcaatttttatttaaattgatggatctgttatctccgaccattagattaaatcctattaataatctctctcctaatctccctcagcgcactgacgagagaaatgtacgtacgtacgacttgtaaaaaagccgaaaatacatatacaattgtaacatacatttaaaaatataaagtggaaaaacataaaaatataattatgtcattaaaaacgtgcatttgcttccttcttcttccttctcttctacatgtatagacgaaattgtaattattaggagtggtaataaatttgaagaaattataacttcataaacatagattatatatatcatctatatatgtctaaattagctccacaaatttttgaaaataaattttataaaactatattattttaccctttatattaacaatataatatattttttacttaaaccgatgtatctattatatcaaatcattattttatatcaaaattttaaaaacatgttgttcaatataaatgttacgcaataatattctctaccagtaaattgccaatttatgatctatattaactaatattttacattaattactgagcccactattttatattatttttaataaaaatattttgacatcggttttcagttaaactgatggacctattaactagacctattaaggacctattaacaaccattccatatctatcttttataaaagtaaaatgaaacttctaaagacctcgcacatgtgcatgtttgctttctgcacgtatgacgaagcatcgtacctaaggcagctaaggtgatccgataaacactattcataccaattaaatttatataatttttctcttatttcaaacaaatatttttccaaagaaaacaaacaaacatgagaaaaagaaataaaaagaaaagcttcaaacaattgctgatattttgcactatccaaccaagcaattctgcaaatgatttgtgtcctaacaaaaattctttaaaactttagaaaagaatatgaaaattttgaacttctacgaagggaaaaacaatctaaccgttaatctatccttaatttggttgtcactaaatcacgcatcttcatgagacgattcgatcacaataactttgagtccttgctatcgcaatttttacttgtagcaatattgtatggtatgtgttcaaatagtatacatgatatttacttttcgcaaacgcgtatacatgatatttacttttcgcaaacgcatatacatgatatttactcactcagtcaaaagtaaattcaaatgtcatatgatcttgatctatcttctaagtcaatgaatatggttttcagatatatccaacctatgatttgcccttataagatataatttctaaagaaattataatattacgttatgatagtacggatgcccgcgcatcgcgtgggccaccttcctagttatatactaaaagtccgtccatgaaacttcctacaaacgctctcaagccgccacgtggcctcctaaaagcgctcctaaactgccatgtggcattctaattaaccggtggacccactattttagatttttatatattagatttacacttatatggtggacccggcattatatgtcattagatctatttttcaaaaaaaagaaaatcacatcctcaccgataccacttatgtacgtgtccgtgtacgtgatcttcttccatgtacgctctcccctctgttccttttctctcctattttcgtgctattttagtttgatggaaatcacaaatatttataatattttttagaaaataaaactaattcactgtcctatacacttacgtagaaacgtacgtatgccctcctcccccatgttctaaggccggtgtgcaccctccttctttttgatattatttaaattcaaattagaccaaatatttttaaccattaaattattagttttcaccattagatcttatctttgagaaaagaaatatattgatggaccctgagttccactcgacactcaagactgttgttggcccgatctttcggtgagttgagataactacgatttgggagaaatgttgacgacccgactacaaccgtacgagacgttgtgttgcgccttagcgatcgatacagctctccgtgagttgttgatcttgccggtgcagatcaaccctattcctgcaagcaaatcgaagaaacaagtaagaacaagataaaagcaatctgatattgcaaataagaatttaatacaaatgataagttggggttccgaagaacaagcagacggacggtctagccgacacgcgcgctgcaagcaagtagcaatggctaaactttaatctatcaaaaacccaagaaactgtaaaggggtacctaactatttaaggaggtgggaggacgacctaaggggatcctagggtcgtgctccacctggttggggcgcaccccacatgggccccacttgggccagggtcccagacgaagttacaagcccataggcccattataggtgacgcaacaccttgttgcttcaattgcggctcaataagatggaatttcgcaatgaggctggatccattggaaagaggactccaagagctttccatcaagtactcacggtccgaaaacggaggtcgtatgcagattcggcggccgtttgaagtcagcagtgtagtaggtggccgaatcggattccagtacttgtaagacttgatcttgatatcttcttgttcatccatgatgtgagcaatggttgcatccgtggtagccatggtcacatcatatatatgtttcctttccctgtgcatgagaaaagaaatatgtatgtttccctctccctgtgcatgtatataagtttcagaaagaaaaaaaaatcatcccatccatctgaagagggatcccatctcccttctgtctctcctatttctcttcttctttttagctatcaaccaaatatataaaaaataataattatatagataaataatcataactcctgagtatatatatatatatatatatatatccaatttttaatttgtttaaactaatatttatttaaatgttatcatatgtttctgtaaaaaaatataatacgccacctagatatggcgaacccaagaaaagaattatcagggaatcactttcatatatacctttctttcagtggtgaatgtagcaaaaaattatcagggtactacacatataaattatgtaattgttgattgatatatactccctccgtcccataatataagtgattttgactttttgtgaccactcgtcttattcaaaaaaattgtgcaaatataaaaaacgaaaagttgtgtttaaagtactttggataataaagtaagtcacaaataaaataaataataattctaattttttttgaataagacgaatggtcaaacagtgtaagcaaaatatcaaaattccttatattatgggacggagggagtattgattaatatgacatgaatatagctagaatcgaattcgaataatctacccaggaaggtgaatgtagttaggccatgtatcttttgcatatcaatcaaacaacaataagatattataaaaatgtacatatattttgttatcttaaaccatttaacaaacatacaccggaataaattttcatataaaagaataatttatctagcgggcacaatgaaacaataaatataaaataaatatgtattatgtgatcttaagttattccacaaaactgcatagctatattagatcgacggtgttaaaataaaaattataaatgcaaccatgaaaataaatttatgcataaatttaatttatgtagggaccacactcctacactttgaatgtcatccaaattgtcatacaaaattgtaaaataatttaacaacatatattgcatgatcatacattactttgcaagcatggatagaaaaattagatatataatatgtaagtgaaaagaacaaatttaactatgaataacataacaattataaaaaaaagattttacctttagttggatgcaacaatagctaattaattatgtcttttgaaatatgctcaactgacgagataaattaaataggttgatttgtacataagcgttctaaaatatagtatacattatcatttaatggacttagaggtaaaagaaacaaatgaatattactatgacttccatatcttgtagatacaaagataaatttgtctattttatatgcgtagaccattaaaaatgtgaatactcctgtatatgaatattaataggctacgagcatgttcattgttcgtacgcatgcataactaactttaaaatccatttatatttctcttatgcaagctcccctcctcctgtatagaaaatatattttgtgataatataaatcatatagctaatattttacgtacatcattagattatttactacaaaatttataattcaagacccaaaccattggatctatctcaaaggaaacaaaactcctcccctcctcatgctgtacgtacatgtgcatgtctcccggaagaaaaatcaggatttatctactctatctttattgatccatatgtaaaaatatataacaaattaattacgttaatatgaaccaattaaaaggagggctagcttgatggtacattattaacaataatattttttgagatttattaaaaaaatccccaaaacattcaattaaaaagaaaaaaaaacacattacttttaatttgaacttaatttgttacacatgatttctaaacgaaccaagtctacctccattttaaatggtgaaaaagaaaataataattacggatgcattaaatatttcatagtataaacatatttctgaagtttggcaagtatggttaatattcatccctggtaagtttctcaaatatagcctatggtatacatgcccgcgcggatacgcgggctaccatcctagttaggcttaaaagatttgtctcacaaattagtcgcaatctatgcaattagttatttttttagcctatatttaatccttcatgcaagtgttcaaatgttcgatatgacagggtgtaaaatttttgtgtgagaactaaacaaggcttaccataccactacatcaaatggcgtggtcaaaaagtttatttacataatagcctagatggtttattttttaagtagtttttagatcgataaaagttcaaacaataaataattcatgaaatttctgcttttcagagggattggtatcccatctatcgtatctgatcatggaaagatatatatacatgatcctctaaaagtctcaatgcataaatgaagagaaggccagagaagcttgatttttttcaagttaagtttatatatatgagaataaaaactagagaaggaatatttttgtgaagaaaattacagataaaagctaggtttgtgcatgtgattggtacacatgtactgtttgatgacataattgtatgagtagtacttactgtgtgtacagggtacatgtcatctcagcagaattaggcagcgagcattcaaatacgacacgattgagacagaaaagttgcaacagcaaaatgaaaataggaatatgcctttacactattcatgaaaattcaaataaagttgtgaattttataatttccgatagtggaagctatatgtattacttaaataatttgacgattactgatgttgtgtatagttttattattttttacgctatcaataggggagcaaaatagatgagttaaggaatattttgattgtacgcaattattttgacttttttgttttgaaaaacagaaagagaaataaatttaggaataacgtgggtgtaccaaaatgaaccaagtgaaacaccagtccctatcattttaatatttcattcgctatatgcgtctagatcataataagatgaaatatcctatttttcttgtcaaggtggcaattaatggaggtggtggtggtagccggttggccaacttgggatcaacgatggcaaccgtggacgtacaatggttagattgtagggaagacggtgggttgttagcggtgtcggtggtgattgaggtgaattgattccacctaattaccatatccaatttactttttgtttgctaggcgggtatagcaaggagcaacatcaacatgacaaaggaaggctagctggcattgttggcgatggattgatagggggtgcgacgctggatctaggacccaaatgctgttcagtctggggtgtctatgcttgtatctatttgtgtagcggcaaatgtgggttacgttggaggggttcttctcttcgaaggcactagatgctgggagtcgctaaatttggatcgattggatccatccagtgatagggatatggtgcaaaggagctggtcaaaggtggatgtaaaacaaataagggtgtaagagttcagactgcacataagatcgactcagtgtggtttttggtgtggcaggcttgttagggagaagaaaactgaagcttagtcttctagtatttttgttttattttcttgtttctcaattatgagacctaaaatataagtatttttataacctttggctatttatattcgcttgtggatagataggccaaatttccttcttacgcctcaattttcaccttttggaatgtgcatccttaattataagagaaaatatgattatacaatgtactcccaatgtgttgcacaaattattttttgaggatatatatgtcgtacttaattactaaagttaaataaaaaaatgcacgctttatgaatcaacagtaggaacctaattcggtttgagaaaatatgtgccgtgctgtaaactgaattataaaaacatgctaagttcaaaattaatatattcctttaataattggtggctaacttgggtcgtataaatagagtgagttccctaatagaattagttcacttaatgtaccttttttttatattcatttcttcagatgggaaaagccatctgaaatgtataccaccacatgcatatatacaaatgtaatgaatgtatcggtacatttttggtttactacggatgatctgtaaagagagaaataaataaaactagtaatgcaaataatatccttgccacgcctaattatagaaaattaattaaaatggtactaattttattattaataatatatatattttggatactagtatatgaaggtatacatttagctaaccctagagtctcatcaaacaatgggcccatgcactaatcagtgaccggtccctacatggatatataggagtatatatatgaggccacggtcgtcaaattttcttttttgaggactactctaaaggtttaattaatcaagaaataatattaataatgacacaatgaattagcaggagctaggatatcgtctttatacatctattaacttaataaagtaatagaaaaaggagctatcatgttcgctctcaagatctaaaaattaccacgttaatcgaagaaaataagaaaacgttcgctctcaaggtatagaaattaccacgttaatcgaagaaaataagaaaaataaaaaaggcaagcggagaaggatatgttaatcggatgaaaatatgaaaagaaatagtaaagcaatcggacacggattcatggaaactgtcaaagtgtcaaacatcaatcagaaacaaacttattgtggaaatggaaatacaactatacaagtgtaaaaacagactctggtcacaatgcattagtatcgtttagagtccaaaagtaaaaaaaaacaaaactatttaaaatatctgaaattcaaaatataactaactattgcaagaagaaactatgcataaatacaatttagactaatctgaaattacatttttttagaaaatctaatattgagaccatagttgtatagaatttacttaaaaaagagtcaatataaaaatataatttaaaaatatctaaaatccctaattaaaaaaagaaatattcgaagagaagactagactccatacatgtatgcaatgtagaactaattaaaatttggaactaaagttagagtccataaagaaataaaatttaaaaataactaatattcgaaattaaaaaatattgaaaaaatagtttagagtcattatagaaatacaatttacaaacaacagaaattcagaactaataaaaatatatattggaagaggagtctagagatcaaataggaataaaatttaaaaataattgaaattcagaattaaaaataagaaatacttattgaaagaaaggtttagagcccatatggaaataaaatttataaataacagaacattgaattagaaaagaaataaatattagaagatgagtctagagtccatatagaaatccaatttagaaatatcaaaaatttaaaatttaaaaatagttaataactatcacgtatatacaatacaatatgaatattacatattggttggtgcggttaagttagtacaaaatttaaaactatgttgctattttaatatattttaattatattatgtgaaaatatatatgctactatgtgaaaaaaaaaatataacgttactagccacgtatgtaatttgcgcgagccaccatactagttttaataaaaatgaaaaacacacacatatatacacatgctttgactaacagagtctgtcgatcatatagatatgcaaaagttcatggtgttctaacaggaggtttgtaatttgtcgcctcatgttagacaaaaatcacgtactgccggtactaattgtacaagatcagtacaggatcgagagcatgcatgccatcaaaaagccattcttaaagagacacagagaaaaacgaccttaccagtagatattacttcatccatgcaaaaggatcgatctgggccgtccaatcctccaggatatatactgtggcgaatttttatatatatatatatatatatcccagagaaaatgtcgtcacacaggagaaatgcatgtgcaaacccagtgtcattcaattgcttgcacacttagattcgccttgtcgaacgccactcgatccccattccttcacatgatcttgcaccccgctttcctatcgtccaaagcctactacagttatcaaaagctgcactgcataaagacattgtaaaaacaccaacagctaaaatcctcttcttcaggccatcaacactagtagctgcagctggatcgagcatgctcatctcctggtggatcgatcacattggagactacagctccaatattacaagatgaacattgcttgatggtttgaaactttttgaacaaattagctagcatgcaacagtttgctgcgcgcgcaagcgaatcaatcatgcgaaagatcgaacaatccacatcaaataccactaaattgttgcccattatcctagctatatagtagctagctacaccatttgctgctcatcttgtcaaccatgcataaccccacaaatctcaacacggctagtagaagagaaggatagggaataatattacttatgcgaagccattggggaagtacatggcgggcggcgggctccctcggccgttattgcttttcctcccctcgccggcggccacggccgccgccatttcctggccctggtacatgagcgtcgagttcatcgtcaggctcaccaagctgtcgtcggcgtcgctcctcgggaagttgccgccgtcgcttccgccggcctcggcgccgccggtgacaggcgcgccgtcgtcacgcgtggtcaccatcaccgccgactgcacgagctcgaggcagagcctgagcttgttgggctcgatgtgcgtcagccccggcacggcgcccttgaagaggaactcggaggtgaggctgcggagcacgtcgagcggcgtgacgccgtcgagcgtcctggagttcgggtcggcgtggtggtcgagcagcacggacaccatgtccggggagaccatctccgccgccaggtgcagggcggttttgcctgtcgggccggcgcgggagttgacgtcggcggcgccgagctcgagcagcgccttgacgacgtcgcggttgcagtgctgcacggcgtagtggacggcgagcgcgtcgtcgaggtccaggccctcgcccatgaccatcagtttgacgagctcgatgtcggcggcgtcgagggcgcgccgcatgcgccggatcttgttgtcgcggtccgccgcggaggacgccgggttcatggggaggtagtggtgcgtcaggaacggcgagcgcggcgcggccaccgcggcgagcggcgacttggcgcggatctcctcgatcttggcgaccacatcgatggggaggtgcttggcgaggagatcggcggagaggccggagcgcgcgacgaggtgggagcaagtcgcccacagctcctgcatctcgaacttgcgcgacgccatcagcaccttcatcacgtcgtccaccgacgcctccttcaccatgctctccagctgcttctgcattaacacattgcattgtgcaactcgccattagttcaattaagatgcttaattaatcaccctcaaatgcacgacagctaattagcagcatgaaatgttgttcttagcatgtagtagtagtactttcttcagttctgttcagagagatatgcaaaaatgtatgatgagcttaactgtactttgcttagaacacagcatgcatgctgtacactaagaattatttttggaaatgatgctagttaggatcgaagtggccaccccgggttggatctccaagaaaccctagcaatggaaatgccgaaatgatgcgaattaagaaatcaggaaagcaagcatggggatggatgtgatgtaaggaagggacagacacaacaagagcttgaaaagacccttcctagtaaagatgagttagaagctccatgacaagtgatgacagaagcagcaagggcgaagcagcagaaaagcaatcgagactagagacgactcagtcctattagtacactataccccatctatctcactcccgaaaaaaaaaagaacacaagaaaaaatgttaaaaaattgcgatgaatgaagtgagggcatgcactagattctgctgcagctactgcgcatggatcagatgccacagttgagagcagtagtgcatgaatcgtgcagctcagctcgctcagtaatcggaaaaaaaggcaaagggggcatgcaacctagggatctaggcaagcatgcagcaggatcagctcagacttgaacattgcttctgctgactccttaatgtcaccaaaaagatgctccaatcatgccagcctaactaccatcatgtactcttaatcaatacccagtgttagcagcagatcccaagatcgaattgcaagcacatggaagaggaatttcaaattatttgcagctgcaggatgcatgacgcgtatatactacgtcgtgttcctgaattttccgcgcagtacctgaaccagcagggcgagctgctcgacgccgaaggagcgcgcagcggcgagcgtgtcgagggcgaggtcgacggcggcgccgcaccgcgtgtgccagcaaccccgggcgccgcaccccgggagcggcccgctcttgggcgccgccaccgacgcctgcccgctgtacaggaactgcagcacgagcacgagcacctcgtaccggatcgagctgacggggatgacaagctccagcgtggcatgcgctcctccaccaccaccggggccgncacgcccttcaccaccagagccgccgccgcctcccccggccatcggccagtttaacggcggcggtggcggcggcggctggtgattcggatcgagcccgcagaacaacttcctgaagaacaagctccgcgccgccagcacgcagcggtgggcgtgcacgaggcggccctcgacgctgaaggcgacgtcgctgaaggcctggccattgatgagcaggctgaggtagtcaagcgacaaggatttgagcgagtcctcggagctcatgatctcatgtgcagcttatcaccaccagataaaagcgccggattggccccaacttttcaggcgcaggaaggtgaggaggagggatttggatagagattttgaggaagcaaaccaagcaagagaggtggaggggaaagggagggagcaacacaaggtagaagcaactgttgcaagaggaaaaagaaaaggttagggtgaaggagaggtgtgtgtgaggagagaaatggaggagaggggagcatgcggatgctatcaatcccctttgtgctacagctacagtgagcaatggtaccgtacccgtcgtctcttttgtggcaagcttgtgggtggggacgcatacagctgatggccatactgttctggctacagtatcaatggtccatggatgatcgatgcattgttgcagctcactgtgcgttttgatcgtcactgacagaaagggcactgctcttggtagaccccatctgccaatgacactataggcactagtaactggtttgcactttgtatatactgtgcgcaactttcatgaacattagattttttatgtggtaaaaaagcgaggaagtgaatgggcagagcttgtgattggttagtttttaggttcgtagagattcagacgttaaatgattccgacctacttatttatactccctttatttgttaatactcctatatgatactatattatatactgatttaaacaatacatttgatgatttatctcatttaataattacgtaaatatgaaaaatataaaacatgtttaaagtacttcaatgataaaataaattataagaaaataaacgataagtgcaacttataaataatacaaatgatcaaacgcaaggtcatatattaaaaaaatgaatggagtatttttttaaaaaaaatatttaaattcggtgacatcccagctaatgtatgcatatgtatgtgtgtatgtgtggcagatatgcacgcatgtcacacagtgtttcatcccgagccactgtatttgcgtgtggatattagcctttttcccgatggctagttgattatgccagcagggtttagttcgacttcagtcaattcatgaagcgcaaaatacatctcaattaactgattttctgtcgctcttcacataaattattgggtattgacctcgcaccaattcaccatattgccgacctgtttagaaagcgctatttttagagttgcgtatagaccgtatttgattgtgaggttagttgttatattgtagattattctaattttatgataactttaatattaaaagttagaaatggatttatttgatttttaaagaaacttttatatagataccagtatttttttaaaaaaagtacaccgtttagcggtatgagagatgtgtccgtgataatctagtagccagtagttgaatcaaacaagaccttcaagctgatatattacatatggctgaaattaattttaaggtaagacttttagggtccaaaagttaaggctaaaaatagaaatccacaaagaaaaccctaaataaattctaaatttaaattctaatgtttaaatttggttgcagccatctcaaagcatcttccccattaatccgaccactgcacactttcatttcatcagatatcattgcccattgccgtgcctcgaaaaccttcaaatttaaagcacaatttaggttagtatatatacattctaggtatgactactagtagcaattttaattgcaaagtttgaaactccgagctgtaaggtttagtatgtactagttccaattgtaattaatctgtcatattatttaagtctagttgaaatttatctggtgagaaatgcgcgcgcacacacatggattatccaaaccaaaagaaaacataaatgattaacatcgccattttttgttctctggaataatgtcgtgtgccattttcctttattccatcaaaatgttactatcatcaatttattgcacgaataaatatgacgcgcagattttattgaacactgttcgtttatattaggtactcgtacttgtcacctttgattaatactgcacaaatcacaaacatataataggattatgttttataaacccaaaaagttattatatcatgttaatattttttacaacaaatttatccctatgaattgtcattttcatgtatccaattgcaacttaatatttaaaaacatattcttaattaactaatatatctttctttaatatacaacgttgataactttttgagatacttttggccatttatcttattcaaaaaatatatgtaaatatcatttattttgttaggacttgatttatcatcaaaagttctttgagcatggcttatattttttatgtttgcacaattttttttaataaaacgaatgatcaaacttatgtctaaaagttaacagcatcacatattaaaaaccggagagagtataaaccgtgttgaaacgcatgtgcatttggaaatgaagggagagttctgttttaaacattaatttattcagaaaaataattattattcgtggtttgcagatcgatcgtgtcgctccaactatatataattaaatgtgggaacaatcatgtttggaagattaattgatagtgtatggtttcgccagcatatttatttgacttcctatataggaaaacaggacaacatattgaagcaatcatctactctctctctctctctcctcgttcttttcctcttttctgctttataatcctgccatctctagctttgagcaaacagtcaccggtaaagaaaccatcttcgatcggtcagccaagatccacaatagtctcgattgcaataaaaacctttagtcccggttcaaaaggttagagctacttttttatctttagtcccggttggtgttctcaaccggaactaaagatatatttttaaaaaagatccctatctatttctagtctcggttggtagcctaaactggaacaaaatatcggcatgcgcgcatgcgtggcggagaggacaaggcgtgcgtgagattgaggaattaataaattctattctttatctcttcctcctcccatctcttcctcttcctcctctccccattctattcctcccctctcttccgtcagcagtcgggcggaggcggaggcggcctcgcgccgcggcggcggggccctcgtgcggcggggcggaggcggcctcgcgccgcagcagccgggcgaaggcggatcaggaggggaggcggccggctgccgccggatctgaagggggaggcggccgggcggcggcccgagcggagggctgcgcccggcggcggtcggtgcagcggcaggcggtggaggccggcgttgccgtggatttttttttctttttttcctttaatgtgcgattcaatctgtgtgttgattgatacgttctgtgttgaatgtgtgatttgatctgtgttattgttgtgaatgatttggggatgaactattgctgtgaattaatgatttggatgaactatgttgctgtgtgttgtgactgtttgatct

SEQ ID NO: 8277 - DNA, 3767 bp, Oryza sativa
gcattcttagcgttcttggcgatcgtctggtcgaggtgtatatgcatatgaccgacgctaaggagttgtgggatgcactgaatactaaattcggtgctactgatgctagcaatgatctgtatatcatggagcagtttcatgactacaaaatggctgacaaccgttctgtagtcgaacaggctcatgagatataaaccatggctaaggaactcgaactccttaagtgtgtcttacccgacaaatttgtggccgggtgcattattgcaaaacttcctccatcttggaggagtttcggtactgcactcaaacacaagagacaggaatactccgttgaggggttgattgcgtctcttgatgttgaggagaaagctcgggaaaaagatgccgcgtctaagggcgatggtgggcagtccagtgccaatgttgtgcacaaggcccagaacaagagcaaggggaaatacaaagctcagcagaccaccaacttcaagaagcagaagaagaacaacaacaatcctaatcaggatgagaggacttgctttgtgtgtggccaagttggtcatctggctaggaagtgtccacaacgcaaggggatgaaggcacctgcagggcagacttctaagtctgctaatgtgaccattggcaacactggagatggaagcgggtatggtaatttacctactgttttttcagttaatcaatctactaattggtgggttgatactggggccaatgtacatgtttgtgctgacatctcattgttttcttcttatcaggtcgcacggggttccaccgtcctaatggggaatgggtcacatgcttctgttcatggtgttggcacggtagatctgaagtttacttcgggaaagatcgtgcagctgaagaacgtgcagcatgtcccttctatcgacaggaatcttgttagtggctcccgtctgactagagacggatttaagttggtttttgagtctaataaagtagtcgtgtctaaacatggatattttattggtaaaggttatgagtgcggaggcctgttccgcttttccctttctgatttctgcaataagtctgtgaaccatatttgtggcagtgtggatgatgaggctaatgtttggcattcacgtttatgtcatattaattttggcttgatgtctcggctttccagcatgtgtttaattcctaagttttccattgtcaaaggttctaagtgccatagttgtgtgcaatcgaagcaacctcgcaagcctcacaaggctgccgaggagagaaacttggcactactagaactcctacattcagatctttgtgaaatgaatggggtgttgacgaagggtggaaaacgatatttcatgacattgattgatgatgctactagattttgctatgtgtacttgttgaaaacgaaagacgaggctctagactattttaaaatttataaggcagaagttgaaaatcaacttgacagaaagataaaaaggcttaggtctgatcgtggtggagagtttttctcgaacgagtttgacttattctgtgaggaacatggcatcatacatgagaggacgcctccctattctcccgagtctaatgggattgctgaaaggaagaaccgcacactgactgacttggtgaatgccatgttggacaccgcgggactgcctaaggcatggtggggggaggcattgttgacctcaaatcatgtgttaaacagagttcctaacagaaataaggacaaaacaccatatgagatatggattggtagaaaaccatcactttcttatctgcgcacatgggggtgcttggcgaaagtcaatgtaccaataacgaagaagcgcaaacttggacctaagactgtggactgtgtttttctgggatatgctcatcatagcattgcctatagatttttaatagttaaatccgaggtaccggacatgcatgttggtacaattatggagtctcgtgatgctaccttctttgagagcttttttccaatgaaggatacacatagtggttcgaaccaaccctctgaaataattcccagttcaatcacaccaccagaacaaactgaacatacacatgaacttgtctctgaggaggatgtcagtgaagctcctcgaaggagtaagagacaaaggacggctaagtcttttggtgatgatttcactgtgtacctcgtggatgacactcctaagtcaatttcagaagcatatgcatctcctgatgcagactactggaaggaggctgtccgtagtgaaatggattccattatcgctaacgggacttgggaggtgacagagcgaccctatgggtgtaaacctgtggggtgcaagtgggtgttcaagaagaagcttaggcctaacggtactattgaaaagtacaaggctcggcttgttgctaagggctatactcagaaagaaggcgaagatttctttgacacttactcacctgttgctagattgaccacaattcgtgtgctactttccctagcagcctcacatggtcttctcgttcatcaaatggacgttaagacagcttttcttaatggagagctggatgaggagatctatatggatcaacctgatgggtttgtagttgaaggtcaagaaggcaaagtgtgcaaattgttgaagtctttgtatggtctgaaacaagctcctaagcaatggcatgagaaatttgacaaaacattgacatctgcaggctttgcagtcaatgaggcagataaatgtgtgtactatcgccatggtgggggtgagggagttattttgtgcttgtatgttgacgacatactgatatttgggacaaaccttgaggtgataaatgaggtttaatcattcttgtctcaaaattttgatatgaaagatttgggagtagctgatgttatcttaaacattaagctaattagaggtgagaatgggattactctcttgcagtcccattatgtggagaagatcttgaatcgctttggctacattgatagtaagccttctccaacaccttatgatcctagcttgttgcttcgcaagaacaagagaattgctaggaatcaactggaatactcccaaatcattggctcgttgatgtacctgactagtgcaactaggcctgatatctcctttgctgtgagcaagttgagccgatttacttctaatccgggagatgatcactggcgtgcgcttgagcgagtaatgcgctatctgaaaggtactgtggaattggggcttcactatactgggtatcctgcggtactggagggttatagtgattctaactggatctctgatgtggatgagatcaaagccactagtggatatgttttcacactgggtggtggtgctgtttcatggaggtcttgcaaacagacaattttgacgaggtcaaccatggaagcagaactaacggcactggatactgctactgttgaggcagaatggctgcgtgatctattaatggatctgcctgttgttgaaaaaccggtgccggctatccttatgaactgtgacaatcaaacggtaattgtcaaagtgaatagttctaaggataatatgaaatcgtctagacatgtgaaaagacgattgaagtctatcaggaaattaagaaactccggagttataacgttggattacatccaaacagcgagaaacctggcagatccctttacgaagggactatcacgaaatgtgatagacaatgcatcgaaggagatgggtttgagacccatgtgagttatactatggtggtaacccagtctatgtgatcggagatcccgtgaa

SEQ ID NO: 8278 - DNA, 8275 bp, Oryza sativa
tctgactagacgcagtacataccgttctgtttaagaagattggcagcaactcaaaacaggtggcaattcgactttgaattagtgcagctatgcctgtgtttagtcaagcgtaaagttagattttggttgaaattggagatgatgtgactgaaaagttatgtgtatgacaggttgatgtgatagaaaaagactgaaatttggatccaaactttggatctaaacacagcctatacatgatgtaacgtgagaaagtttattcgtctctcaaggaaacactcctttatttttttatacggtttgaaaaatcacaaaaatattaataaaaagtagatcaataatacaatatataaataaaatacaagctcaaattcagctagaaatgaaaataataaattgactccgaataaaatgtgtcattcatagttaaatttattttttaattatatatatcaaattgaaattacataattgtcgagtgacacccccacatatttaattaatcttaatattttttattaaaattattaatgattttttaaaatggcatacaccgacatacacaagtaaagaaacgtagcctcgaacaacaaaagtccatcttacaatcatatactatttggacaacggaaagcctgtttcgtcttctactcttcttcccgtggcttttctgttccatgcgttttctgctctgctcctagaggtaagaccgccagcctctctacttgatcgccacggaaacggaagggaatccacatcagctagttgcgagcatcacgtgccccattcactctctttatttattgctgattcccgatcgatcgatcgatcagcaggcaatatataggcgtagttaatcgatctcaacaactacccatcagttattcaatacaatacagccattcagacagagccaaggtctatcgagtcagagagatcgacacagcgagcgagattggtgaattgatgggcgaccatggacgccggcggcaggcggaggcggcggctccgctgctggagaagaagggcagcaccggcaccggcgagggcgatgggtcctgcattgaggggtgccccgggtgcgtcgtcgaccggcggaaggccgcgagctccggcatcccatacgggagcttcctcttcgtctggatcgtcacactctgcacaggtaattaaccacccttcatttactctctcatccacccaccacatgcatcatcaatcgcgctctcatctcatcgatctgcacctgattctgttcctcttctcagttgatctccatatttatcgagtcttatcataatgagtctgtttaattagtttctcctatatatacatatattctccattgatcatgcagccacattggagtgccaatatatacatacagtcccttcaattaatcaaaatcattaaattgataattactaattttatgatttgttttaagatttgtgcacctcaaccaaccgttgaattttagcaatggcttatttgaggtgtttctgaatagctgtaggttcttctgataattagaagctctccaagcggtttaacttttcgttcatattctaataagttatagttgttgaattcacaaaataaaatagaagtagaaagccagaaaaccaattttttagctctaagaaataactacccaggctgtgtgtttagttaccttcacatcaaatgtttaaacacatgcatggagcattaaatatggaagaaaaaaaccaattgtacagtttgcatgtaaattgtgagacgaatattttgagcctaattacgccatgatttaacaatgtggtgctatagtaaatatttactaataacatattaattaggcttaatagattcgtctcgcagtttacagacggaatctgtaatttgtttttgttattagtgtatacttaaaaaaattttggacgggaaactaaacacggcccaaattagctgattattactactctgtcccaaaatataaattttggttgtccagatttataactaaaaaatacatatattttgggacggagggtacaattttaagcttttttttgcagtccatagattagatttttagaggttgaaacttgaaactgccaatggccgggtgcgtgtgcatgtgtagcagacggtcgcacactcgcacatgacctgacctgctgagattaaattcgtgagcttaatggttcattcattgcttttgtactacctatattctcgtttcttgattagcacaagccaaccattgctccatgcatgattagcgcttactcagacttcacttcatccacgttaccttctgtaaatttgttttttactttattaacctggccgtatggtttttcataatgtctcccatattttgaaagaaaaacaagatagcggctcatacgatatttcaatttgtattatactcgtataagtagctaacggtaatagagacagtagcggtggagttcacgcggccgcccaacccgttcgggaagtgcctccgccgttggctgcatgtgtgcaacaataaaatgagttgtttaataaacttgctatatattaagggaattgtatactagtttatataaccgtctcatgctcgaattgagaacaaaaacatatccagtggagttaaaatttttaagtagaccattaagttttaagtgaagtctaccgtaagatgatatctctgctacttaaaaagcgaacccgttcgtttgtactctttccgtacgtccttacatgtgtataagcaccatctctttaagaaaaacccactaacatgtgatttctcactgcctacaccctgaagccctgttcgcccataatttcaatcatgttctatgataaaggtgcactttccgatcagttaaacaccatgacttttacaaaagtctcctatatagaaattccgtgatatactttctataatttgttttatcactttttaacatctaattattggtttgtgcccttaaataattattttcacttttcgtggtatactgtgagtttatagcattgcatgctaattccaaatatgcatggagctatatgtgacgtggagctccaaccacccaagtcggatagagtttttgtcactctgtccaactgttggtagctcatgtgaactttggcgtgtatcacgtacaatatacgaacccatatgtacatgcatgcatgtgttaagttcgctttcatcaaatatttaatattactcgatctctgaatattctgagtcttgaaatccacagaaaatatttgaagatgaatgtgacagtactgtttgtacatgtctgggagacgtaaggatctgaatgtgttcgtgaaaaagttgaaggaaaataaaagaattcaagtctaaaatatatgttcaaaattcgaacatacaatagaacatatacagatttgagtatagtgtgcatatataggcataagtagtacaaactgaaacacaaaaatgtcaagtccagaaaaaaaattaaatttgaatatttagaaagtttcagaacgagtataaagttcggaatactagatatcttaaacgtgctagtatatatgaaaatgcacaaattccacatagaagccaggaagtcccacacaaatttgagcagtgcaaaaattggaagtttctatgacggccacataaaaaaatgccaggtaggcagaaaggtagtgaccgtaggccgccgtctattgtgtgtgtgaggttgcaaatcttttgttttctttgtgctgatgtgctagtaatcctaaatttcgcctactaataaatgacttccactaccacccacctccatggagctaaacatatgatggtatattctacccattcttgtttgtggcaatgcgcggggtggaatgttaaagcgacgaccacggctcgctcactccgttttggcttcctcttcctcgtcttcttgtcgttgttggctttccttgttgggaattccacgtacggaacggagcttggatttggagaggagaggagactgcctctgcctggctctccctcgccgccggcgcacgccattctgggcctctcctctttgccgattgataagaggagaagccgaggagcctccctgtttcaattcgttccggcgggtcgctgcaatccggcagcgaagttgaggtacaggtacgcgcgtgccgtgtagcagtcgattgattcatctcctctcctcgccggagatctctcgggcgcattgcccatttgccttgcctggcggcggtgggagggatggaagaggaggcgggggcggaggtgccgttgctcaagatcaagggggactaccaccaaggttgccctggctgtgcctatgaccgcaagaaggaggtctacaggggattgccttacaaggagttcctctatctctggatgatctgcctcaccgccggtatgcatggaacattccctccctttttcgcaaccttttgactagctctggagattcattctggggtaaagttcttcaactttttaacccatggtgctctaggaatttcccttttctagtgtagtacgaatgaatatctccaacaaagagaatcttggtaccacgtaggaacatgacaacatagggaatcttggtacctgcaggaacatgtcttctttcttgcaaatgctacatgttactgcaatgtccatgtgcagttccatatgggtttggtcggtgttcagtcatgtcgatgattcctgttcctgtggggaaatcgctgattctctataatagattaacaggaccaagttagttaagccaattgcctcaacaagatttccataatgggggggggggggggatgttgacatgctgttgctgtttttaccacgcacttctccatatttgctttcagtgctgcttacaaccgttaattacaatgtgatgtgatgctccgactcatactacacacgacgaccgtttacaccggtcataacgttgtccatggtgttacagttgcaaacttgcaatgccacgtcctggttcatgtgatgtgggttagctggggggtctattatgttaactagaaaatttattgtttgagggacatcactgtgcgaacaatattagatgcacaattaattcctgttatgtcatagtgccagtcatccaaaccttattgggcacataattaattcctgtaatctttcatcgcaccaatagtccaacccaacttcattgataggatatccaataatgggactgtaggtgatgctgattcagaccttgcagatctttaggttcttcattgtgtttgtgatcttttttacctacctcggttgctgaaatttttacaacactacatggcatctatgtcaacagtcagcagaagcatacactaaaatgtcctactccgtgttagattagatagcatacagtctgcaatgcaatattgatttgcgaaaatgcctttaactgattttccttaatgatgttttttaacatatttttttataccgctccaaatcgtgataaaggtcattgtgtaaactgtaaacttggaactgatgcatgacttgtttcccacgtgtcctatataagcatatgtaattgtgcatattttttaggggtgaagttccatgtgctgttctggtgttctgcataagctccatcatggtttttagatgaaaagctccatcatggttgcattgaacagtagtctttctcttttacaatagtggaacatgaaattaatttttctacttgaacatcgtttcctatctgctgttgaggatattgagtgctatcttgtttccttcagagtattgcttaaaaaaatgtgcgtggaacagtcaaaatctgagaagcatctagcacttcaaattttcttcatttcaagtacaactagccataataccttgttttattatccctgttctcaccagcatcatttagttgtttgtagagaagttctcaagtagtcccctgatatcaccatctaagtaataatataataaatattgttatcaccacttgcatctacaaaagttttaaatgtatttatcgtaaccacatatcccatctattctttttttacataaattttcagtgcatactcaagatttctaattctgtccctgcccttttcagctttaccaatatcatcattgttccccttcttgtacttcatggtatgtctatcttcaggggcttttaactatttgccactcttacgagtggtgcttaacgatttgccactaggcccatatgtcatagacacatgagggcccacatgtcatagacacggtgtggcaaatcgttaattgccatgtcacaagagtggcaaatagttaaatttcccctatcttcatgtcttcttttgatggctaaaactagatttttttttcttgttggtagtttatctccttttttgacaactatctttactctagcaattaagtcttcaagacgtgtcttattacacagataagagacttgcatgttgcaaaaaggacagaagatattgggttctatgccggctttgtgggtaaatttctcatgaattgcttgttcaaatttaagattaactctggctctcaccttgactgattccttatttacctgccttataggtgcttcgtttatgttcggtcgatgtttgacttcaactatttggggaatagcagcagatcgtattgggaggaaaccagttgttgtgtttggcattttcgcggtgttagtgatatttttcctcctctatatgaaataatagttgatatctggcacaacctagtttactccggtatagcagttccttttctttttattggtgtttgtctaactaagttcttggtataatggtaccagggtcatatttaatacgctatttgggcttagtttcacctattggatggcaatagctacaagattccttcttggtgctttaaatggtttacttgggccaataaaggtacaataaagttgaaactttcctttgttgtacttgtacctggtcatgtttttttttcctccaatgcttgtacctggtcatgttgatcttgatcaatttatatttgtcctttcaggcctatgctattgaagtttgccgacctgaacatgaagctcttgcattgtcacttgtaaatacatgccatactgttctgttattaatttttttctgtttaaattgtgttgattttgattttttttaatattaggttagtacggcatggggaataggtcttataattggtccagctattggaggctacctttcacaggtatgtcacagagaattgaacagtgttagggatttttttttaacaatgtggctacatttaatacgatttcttttatggcagcctgcagagaaatttcccaatgtcttttcccctgactcactgtttgcaaggtattctatcttgtgtaccaacgcccaacaaaatgttttttatgattcatctacagaatacttacttttgttggaaaattttcaggttcccatatttcttaccctgcttgtgcatatcagtctttgctgctgttgttctcataggctgcatatggatgccggtaagtcagattccataattgctagcttcacaaaatatgcaatcagtgtaatttgacatatatttagttgtatttgatatatttgcactgtggaagatcttatgacatggatctgaaaaaagaaatcaaaagttttgctgcatgcttagcaaccaaaatcagttactagtaattataacggagataatatgcattttatcctaatgtggttgttccatttcatcaggaattaatagtctcttttgttacttttttaagtcaaatttatatttcctttctcttaaaaacttgtgcattagcagaaatatcaatatttagcatgactcatagtgagaaaggataattctttggtactttgtattaattctttttgtatggttgtaaagtatcttgaaatgtattttaggagacattacacaagcataaagctgatgcaaatagatctcaaactgttgaagctttggagagccatttgattgatccagaagaaaaggctgaccaaaatggtagtttggactgcaagaagagcttattgagcaattggcccttgatgtcctccataattctttattgtgtcttctcctttcatgatatggcttatacagaggtattgttcttgctattgtctacggatggtttgctactgctttgcatataaattgttagctcatgtggtttacactcagttaatcactagaaataatatgcatttcagcagacaacgtgtgatattcagcatgattttatattgaaatatatgccaaaatata

SEQ ID NO: 8279 - DNA, 31653 bp, Oryza sativa
tctcctctagaagtaagcaactcgtcactggtcaaacgaacataaatggttttttttctcagtgatataattacaaatgtgattatgtgagtttatgacatatgagatactgctggcaagatttttacattgttaaaaactgccaatgattaacgatgtggagtatgtggataatattaggcaatctacgccctaagcccctaatatagtcacattatggatatataaaatagttgactggctatcttctactccacttggtatatatggttgttgctttgacttaatatcttaattggtattcgtaaccggtagcgttcatacccattttgatacctattcgtcccgtatttatgcccgctgtgtttgtattcatattcgacactatccatatccgacccgattctaattatcaatcacctatcaagacaaatcggacgctacgatgagacatgaaaacacccgatcctattctgacctcgatatatatgtggaatcgttttgcgccatatgtattgaaattgcacgggagacacggtcaaagccaaggttaagataaggctaacaaaatataggttagaatatgagaaatgcgagatctgaccgaaactaatccgatttcatccctatgagggagtagtagttgtttggtttttttgattgtgtagaattggatttttgtaaaagattgtataaaaacgaaaaaaccccttgtcgtcttctccattgcgacactgaaactcaggcggcgccaccagccagagtcccacgacgttgctctgctagggttttgctccaccttcctcccacctcgcgccatcggattccaccttcccaggtctcccctcccctcccgtcgccatgcctcacctcgtccgcgagcgcctcttcttcggcgacatcaacgacgccatcgccgcgctcaccaccaccgccgcggacaccggcggcttcacccacctcctctccgtcgtcagctccgcatccatctccttcatcaccgactgccgcccgggcctctccatccccaccgaggaggtccgccgcgtggtcgccggggaggagggcgcgccgccggtctccgccgtggcccccgggcggctgttgcgggtggtggagcgcgctggggtcgggctgcgggtcacgcggatggccgtgccgctgcgggacaccgaggaggagaacctgctcgatcacctcgagccgtgtcttgatttcatcgatgagggcaggaaggaggggaacgtccttgtccattgctttgctggggtctcaaggaggtacgattaatatttaccaacactaatgttccgagtaatttgtgcttttctgtcatctttagtgtcgtgtgctaatcaaagtgaagttcatctttagtgtcgtgtgctaatcaaagtgaagttcatcagatatttttagttctggaatgttacatatatctgttaggcatacttccgttttagccaaatggacattgtgaattttgttccaagaatttatcaattaatcataagcatatgatggaatgtgaatccctgtatcatgctctgttttgacaagttggatatttttgcctgtcctgatgcattggttataacaaatatattggttaacagcgatgtatctcctgttcactgttgttcatttgtaacaaataaattaatacttgtatatttatttgtatcttgttgcagtgctaccatcatcgttgcttatcttatgagaacagaacaaaaatctctggaaggttcgactattccaacaaaatgggtgatttttcagtcgttgctttggttattactccagatgaatacctgagttgtctttttgatacacgctggtgacatgccatgctttttgtcttgtttcagaagcactagagtctcttaaggaagtcaatgagtcagcctgcccaaatgacggttttcttgagcaggtaatcctttgtgatctgtttgcaccctattgctcttagatttcttttatttatttgttgaatgtgttgtaaattgcagttgaaactgtttgaagaaatgggcttcaaagttgatacttcaagtcctctatacaagcgtttccgtttaaaattgctaggttagtcataattcatcttggattctttgttactgttggacaggttgtgtggttattatgtcagggaaactgtgaagattctggccactggttagcatttatttaaaaaatggaaatgtaaattctttgttttagtaaatttcaacattgcatgtctgtgaatcatgatatatttgatgttttcctgcttttttttaattatccatgactaagagtgctattcatgcagtcctgttgaaaataaagcagtcatacacttctcaatattgcttacttttgtttcttacttatgaaaaatctttgacaaatggtcagatttgggtactttactgtttcacctttgtcctttctcttatgcatagtctcttactttgccacttttcactaaatctgtcaattttttttttacttctcgcaggccaatcctacaaaattggagagaaaataggaagctatgtatttgaagatgatcctggtctttctggacagcctaattcttctactcaggatttaccaaacaaacaaacccaacaaacagcataccgctgcaaaaaatgcaggagaattgttgctgtgcagggcaatgttgtgagccatactcctggtgagggtgaatcttgctttcagtggcaaaacaaaagaaagggagagcgatcatatagcaaagaacaagattgctcatcgttgtttgttgagcctctgaagtggatgactccaggtaattcaccctcgtaattcagccctttgcagttacctacggtcacaaatgacttttcatgttgatctcctattgatgtggttcatagcaaacctgtgtttactactgagtgctcgtccaatctgtcatgtgattctgtaattggtcggccaacctttggctgacccggcaaaaaaaaaagaaaaagaaaaaagattctgtttgttttatcatttctaattggtgcttttgttaatgatggaacagtggaagacggtgctttggaggggaagctatcgtgtatccactgcggagcacggctaggatatttcaactggtcaggaatccagtgcaactgtggcagctggatcaccccagccttccaaatttccaagagcaaagttgatattagtacgacttagatagttttttttttgtggggtgtacgacttagatagttgtcggaggctagcagattatttcaggaccatgtgagctggtgtaaataccgttttatcagaaggatttacgaactcgaaggatctcgaccgaagattttcagatccattgtgcactagatagatatcatgaagcattagcctcagaaacctccactgtattactacttggtgttagaagactatgccatcagttgcaattgttggttctgatgatctgagaggctatcaacacgaatttcattttgttttttgtttttttgtattaaatgcatctgtctgcaaatttgtaatgcagttttgttgtacctgagtccatccattgaaaacattgaaacatactgtgttctaagcaatggcatgtcatattttcgtgacatatgccgctgaggtggcggggtcggagttttcgctcccgagccagctaggctctgctctaagatgggcttgctcaccgaggggtgggctggacgtctgcttacgggccatgtattcggcctcagccacgtacgtgggctttatattgggccgcatgttgaggcccatgtacaccatcacgtcaggaggagggagaaaacccttccacgccgcacactctgtcacacgccggcgcgccggccagcggcggaactcgcgacacccgccggcgaaggagcagcagcacaggaggtggacggcgcgccagcgaggtcgcccagccaacctctgcgtttagttgtcgactaatcgggaagaaggcgaggaggagaggagaggagaggagaggaaaggaggaggggaggatgccgcaccgcgcgcggccgatgacggggctgctgctgttcacgggagtcaacctggtgctcctcaacaccatcacccccgtctacgacttcgtctgcttccacccctactgggaacgcagggtacgccgcctccctcttttcttcttcacccaccttcatcccccactccgatctcccaagccaacgctttgatcctcttgccctactacagcttggtcaagcctttgcccgcaccgtttgatccgtgcatctgttgattgtttcttgtctcgagcatgcgcgccagctgtttgtggaaatgcctcgcggctgtgctgcaactttcttctattttatgattagcaccatatgccattgccgggcttaaggactactaattcagtagttcgtgttcgctgcattgacccaacaattttcacttttgaatattagtttgggggaacatcgtatctgccatgtaattatcatgtcatatcaactactctgcctagggctgttcaattttggttgattaaacccgtttaagaaccggagatcagcatgcttagtacaatcattatcttacgtgccgccggtgcggttaacagaaaaaaaaaagactacctccatagatttcgggaacaaaccatccctaactcttcctttcgacagacaatttggtgaagaaattccatattccctacccacaaatttttacaataaagagtgcccttctaggaccatctttgtgctattatgatgttcttcctttctataccatgttcttgatatattacatacaatttgaagttttcttgatgtgtaatctcgtggccaatttagagagaacgtcgtcaaaaggagcgtgaagcactacaagccaatggttctctacaaactgctaaatgattttattcctaggtatgtgcgtgacactccttgagaaaaatctgtttgatggaagtgttcatttttataaccagtttaggagtagcttcacaatttggtggatgtgaaaggaaggtgagaatccccaatttatctggtaaaaaacttgagatatatttttgttcaccctagtgatagtgaacttgcttttggtatgctttatttatgcatgcatttgtttaactttgaattgacattgtatattttaaattttcagttgttttattacttggttagttcgatgaaaccctggattcttcattgatatggagtgaagaaaattttataggcaggtaatattgtgatgctcttcagatatgagtagatctccgcactccaggtcttgcttcataatgctactcaactgcatcatcacatccttgtaaaattaccgaggaaactagatctgatgaatattgtttcttgaaactacctttatgtatctcttatcgtctcatactcatctggctataacatagtaaatgaaaaccactgtttggctcaagccatttattctgatcaggatcctattaacttagttatttcctggggtggaaggaacatatgtttaacaactgatcctgcagagtgcttcattacgtgtttgaaagttctgaaaacctccaaccattttactgttcttccctcaatggtttatctgtcaacaagcagtagaggcatgctttctctgttcttgttgaatgtaccagtaatcttttgggctttctaatcaggtaggattcaatcatgtagtgtacaagatgactgaacagaaagaaggaacaaatccatcttcccaacaactagccaggacaatgtgcaagaccaaacatgaacctgagcccaacctgaaatgcaaatatgcaattggaaagaaaattccattgtatacattacactcgtggtaaatgcacatcatgtttgaaattgtgcacaaaccagccactatacacactaccctgtttcgctatagaactagatctcgcctcttcttctttgggtttgttgcttctgcacagcctgatcctttcctcatcatggccacaaactctgaataatctatccgcccatcctacatgtgaaaaatgcattcagcgtctcttgataggacaaatattttcagctttatcgatttcatctgttttgcatgaacacaatttaaagagcatttcttccttacattattagagtctgcatctgtgatgacatccttgatctcgttggcgtcgtataacccttgttccttcaaggcttgctcgagctcttcctttgtgatgtacctgcaagagggatggcataaatgtgtacaaatccctgaagttcagaattcagttatatcagtttttgctatccttaacttacccactattatccttgtcaaagtactggaatgccgtgtaaaggtgctcttctcgatccattttgttcatgtgcactgtcgcggtgacgaactcctcatagtcgataattccattgccatcagcatcagcctgaaagttgaaaggaatttccaggagtcctgtcagttttagcatttcatctcgaactgaactaagtttgtagcttcactatgaggactcactgcttccatcagttgctcaatttcgttgtctgaaaacttggtgccctgctttgctaacccatttttgagctcctcaagcgtaatggtcccactattgtccttgtcgatgttcttgaacatctccttcagccccttgatctcctcctctgacaggcatccggctataatctacagaagattcaaaacaacaattaagatgcatatatctaccctgatgatgtgattaagagtaatatttaccctcagtgcagctttcttgaactggttcatggccctgaactgcttgagcctgttgagaacaacattgtcaagtggtacatcaggagcatccccatcttctttgatccacgggtgatctgcaaatccaaattgatccaaatgaatccaaatttaattctgacaccaataaagggaaaattaatccaaactgtacctctatatgaaaaaaaaaggagcagatttgagtaattaatctgtaacaaataaacttactgagcacttggaatgctgtaagcctctccttggggttgatgttgagcatcttcctgacgaggtccttggctccagaggagatcttcggccatggctcactggcgaggtcgatctgtccgcgaaggatggcggtgaagatggcgttctccgactcggcccagaagggcggcacgccggcgaggaagatgtagagcatgacgccgatgctccagatgtcggcctcggggccgtacttcctcttgagcacctccggcgcgatgtagtaggcgctgccgacgatgtcgcggaacacctcgccttccttgaagaagacggagaggccgaagtcggtggccttgagcggcgcgtcgtcccccttgctcagcagcaggaagttctccggcttgaggtcccggtggatcacccccatggagtggcaggtgtgcacgatcccgacgatggcgcggaggagcgccgccgcggcgcgctccgtgtagtggccccgcgcgatgatgcggtcgaagagctcgccgccggcgcagagctccatcacgaggtggacgttgtgcttgtcctcgtaggcgccgcggaggtcgacgatgtttggctggccggagaggtggtgcatgatctgcacctcgcggcggacgtcgtcgacgtcctccttgtttcgccagcttccgcttcgcgatcgtcttgcacgccagcttctcgccggtggccttgtgggtgcacaggtgggtcacgccgaactgcccgcgcccgagctccttgccgatggagtacgtcgtgcgaacctcctccatcggccgctccagcacctcgccgatggggcctgccggcttcttggaggaagacgccgccgccgccgcttcggtcgccgccgccttggccgccggcgagcacggactgctgcttggcggacccatttttggaggaggtgccgcggctcggcggcgccgccttggaggtccccggctctgcctcgtcgccggcgacggccttcccgccacccgtgcagcactggcccatggcgtcggtgggattcgcgcgtgcctgctccggcgacggagaggcacggatcggagagagaatttttggtagaaggaagaaatgggtgtgtgagtttgatgggttgagaggaaatggcgggaagaagtgagcggtagttgtttccgtttggattttcagcgtctcgtaggtttggtcgcgggctattcttggctgctaataattgtttctggttagattttcctgtgaccaatcatcaattggctgctaatagtttttttgattagatttttccagtgaacaatcatcaatctgcctttacaattgcctaaaaaaatgggcctttgcaaacactaccaaactagtcaaagcttacaatatcaagtgtcttctctgttatgaaaaaaaaaaacaggccctaacccctaagctctcatttctgcagaagcaccgagagcaaatacaaggatacttttcctaattttggtgtgctatgtatatattttaactttcaggatacactcacaatttgttgattttagtcctgcattaatatgtcaccgcaaaattcaagaagaccatttaatcatgtaactgtataagttgttccactgtcaatagagtgaaagcttcttctggaatttctattgccgtatgcaattctccctcctgaataaccacatcagataatgttctcctgaagctgtcaatagcatcctctggatgccctttcgcaatggatgcctgcaatggtgttgataatcgtaagcaaataacctatcacaagaccaaaactagaagtacaagagccaaagtttaggcactgtagatgttgtgaaaaaattcagacataccaaatgcttttcatcaatcttgaaaagccaaaacctccatttcctatcctcttctccatcaatacggagagaaatattagtccaattcatatggtggaattccaaacgttgcaacccaaatccaacgccagcacctgtagctttgacaaatgcttctttaagacaccaatacctacaaaaacagacaatcgttaaatcttaagtaactccacaaattttggcttgtaaacatgatcagcaccctgcagttgttctgaaaataaaaaaaattgaacaagaacaaattcatatacctgtagaactcagttagcataccatcatggctgcctgcagtaacaatgcagttccactcatgatcagtgagataggaagtgaaattgttgatgaactccagggcagtttctcgttgaggcttggagatgcacacaatgtccaggccaacgaggcagagaggctcagatgctatgccaacgtactccccctgatgcgacgtgttgaagttgaagccaggaaagttggcatttttattctgctgcaacagcagacgtgatcagttgcaatttgggcttcagaaactgacagactgtaaacgtgaaactgaaagagatggatttgggatgcagagcagacatgaactaattgatgggaatatctactactactaccaggtagggcttcccttcaagcgtgcggttgatgcgaatttggtggaatgggattccaagagcatggtgcacgagcgagtattggagaaggcgactgacgagcgcccgtttcctgtcatcttctctgacgaacctgcagcggtgaggtcgtgactcgtgaggaggaggagaaaaatctagaggctgaattgaatttcagtagtgagtgggtggaatcaatgtgggggaagaggaattggttggaaaaacctgtggatggcggggcggtcgtgcggcgggaggagggcggcggcggcttggaactcagcgggggaggggcgccaccggccgacgtcgacgagccacctacaccgccacctccccacgctgctctgcttctcttcttcctccaccatcaacaactcgagttacggcagagaaagccataggccatggccggccgccaaggaaaggaaaggaaaggaaaggaagacgatgacaacagagaggggatgttaggatgggcctttctcacgaggcctgtaaacttttgaagctaaactaggcccaaattgcatatgtgcatcttgccatggtgccatggcagagacatcagcaaattaaacagcaacagagacataaccatagccatcagtccatcaccatctgctaatctctcacattcaaaaacagtcgccattgatacgctgtgtgctgtgcactacatttatttttcgtcggactcgcggtggagatggagattaattgagctcgagtgtgagactaacagcaatgccacgcaggctcaagatcgcaatagtaattaatggcgaatcgagccaacgtcagttcgctatcgaccgacataataaatcagtttggttgtgaaccaagacatctcatcatcccaccctggagtcaggagctcaggaacagcaagcaagaggagaggaagaagctgagatggctgcaggcgacgctgcgacgccattgctggtgctggagacggcgtaccaataccatgagggctgccccgcctgcgccgtggagcgcaacaaggcggtcaacccgggcatcccctacatgcgcttcttccacatctggatcatcatcctcgtctcatgtacgtacgcgcctcctatcgatcactgcttcatttatactcctacgtgttcatgcatgcttcgcttcctgcttgactgcctctccaatctccttattattcatgttatattcgaaaaagctaatggacgagcgctcgcgttcacccacccccacgcgatcagtttactctgaccaatcccatgccacgcgaagtataggtggccaaatggaccgcccggctcggcacggcccaagcacggccgtacctcggccgaggtcagtcgggcaagcacggcccaacctatatgttaggccgtgtcgtgccagctcacgggctgcacacacgtcccaggcacaaccctataagactcgggccatgccggtccagccggaaggcacgacaaaccatcgtgtttcttcatagaataagtctatttttcatccctcaactctttgggttgtcttatatgactagaaataagtctattttgtattacacctctcttttggcattgccttatattgttgattaagtctattttggatccctatactattttcttctatcgtgccgtgccgggccggcccaccgtgccaaggcatcggcctaggcatggcccaactatcgggccatgccgacacggacttgacaccagtcaggccatgccgtgcttaggcccagcaaaatggccgtgtcttcggccaggccatcgggccccgggccatatggccatctataacgtgaagcgtgatattctctttggctctaatacgaatatagccacttcttccattttaggctagtccttttccttttaggctttactctttcccatttaattttatttgaccaagttgaattttaggtgagaccaaccagttaggcctcacaacccgcatgcatgatttttctttttttattctatgaattcatttaaatttgtatatatgatacaaactttatacgtatgaagtttctatacataaagtttctatgtataaaatttactacatattattttttgggacagattaacatgtcgttgaattcagttgaaatctatgtttataaaaaattacatgcacaaatttctatataaaaaatttctctttctatatatgtatatatattttagacatgtaaagtctatatataaatatattttctttactgggccatgttgcttttgttgggctgaattctagaaaagagagaaaaagatgcacgtggaagcctacgagcgtggaaacatgaccgagaaatctgagtcgtcgcgctcgcgccttagcaaatccatcttaggtgtgtaaacgtgatcgtgcacaccgtggacccatggttgctcaagtattagacggaccctattatgtttgcatatccattttttttcatttcctccagcattgcaaaatgtgaatgctttatcagtcatttctagttcacctgaatttatcttatagaggattattttgtactacctctatttttttctttttatatagatgactcagttggcttttggcataatgtttaatcattcgtcttattcaagaatttagtataaatatgaaaaaaatatgagtcatataaattttattaataagagaaatggtcaaatgtcacgttaaaagttaaaaaaataaagggagtattagtgtctaaaattaagggggctaaaaggaaagttctagcttgtaaccgttggtcgaactattgaagcaaaattctaaattgttgtttcttgcatctcttttgcatctttatttatcttgtcattagcttagctcgttccattgatgcgggcttgtgagcctttcatggtagatttttaacctttcatccttacaatattttttttattgaatttcatccttataattgaatttcaggtttgccaatatcatcgttatttcccttcttatacttcatggtatgtatttatgattgtaaaatttacaatagcaccaaaagatgctctacattgtataagtttcagtgtaaattagctgtttctatttctcattagcggaatttgtaccttgcataattttatcatttggtttcgtgaaatgatattcatcattcatgtagcaattcaaatttctctagtttccatttatattaactagtttttgtagtcttggaaacggaaataacagtaaagttaccacctaattcctaattcttcaagctatgtatagtcatatatatgttgctatgtatactcatactcatatgttttggctaatcattgtttgaataaaaggtaagctcatagtttaattctcttcttcacaataggtaagagattataacatttatttttattgtatatttctcttgtccacaacagataagagacttgcatgttgcaaaaagagtagaggacattggattctatgcaggttttgtaggtaagcgattataatgtctgtaataccaaaggtcatgcttttacttagtagtgacaaatgtttttttacacccatttatctatcgcaaacatgacatattataattctcaacatattaggtgcgtcatatatgtttggtagagctttaacttccactgcttgggggatggtagcagatcgtattgggaggaagcctgttatcatttttggaattttttcagcttaagtaccttttagttcagttccgattgaaccaagttagtaattacttgtattaccttatttatatccacctatgattactttaccttgtgttgtgaaatcagatttgtattcaatactctctttggactaagtacacactattggatggcgataactacacgatttcttataggttcattgaatggcttacttggaccaataagagtacggtgattaaattatctaaattcatatttgctattcactattgaaatactataactatctagcatactacaaccgggctttacaggcttatgccgttgaagtttgtcgaccagagcatcaatccattggattgtcattggtatactacaaagttctataatattttttactatagttatattgcactttacattatgacactctttttttatgattaggttagcacatcatgggcaataggtctcattgttgggccagctatcggtggatatcttgcacaggtatcctactaaattttaataccatatgagttgggtgcatgcttaaacaatgcattgacgctattatgatgcttttatttcatttgacagccatcagaaaaatatccaattctatttccagcaaactcattatttggaaggtatcgttgttataggaaatataattgttctagatggtataactccttaaatgactgattcttgaaaatctttccttaggttcccatattttctaccttgtttatgtatatcgatcttctgcttcgttattctcataagttgcatttggctcccggtatgtgcacaactagctaattttattcttattgatattaatttgggcacacataattcttgtttttatgcttctcttagctaaaatttatcttaactactaaaatacaaaagttaattaatattttgctaatactttcaggaaaataatgtgttttcatttcaaaataatgtgtttcataaaatttcaggaaacactacataaacatgcaacagaaagaaatggagattgtaaaattggatctttgagtacacatttggttgactccgaagagtttgtcaagcaacacactggaccagctaaagataagagcttatttaaaaattggccattaatgtcatctattgttctcttctgcattgtctcctttgatgacatggcttacacagaggtatgtaccaactatgtctagactaatggtgtagtatttcctagctaaatgagtccagatgtttgaataattgaggaaaagttgccatgttttgggaaatatcgattaaacacttcacccaattacaaaactagggtatagtgttatcactataaataatgcttctatgtttatgtaagagagacttaatttacttcgaaagggccacatgattatttaatcattataaaataatgtttgaaatatcataaatatttaattgaaatatctatttctcaccatgcatcaactagatcctaatacatttttattatttatacaatcatttttgtgttatatagacttatatgttgaacaagtaataatttaattttgtagatgttgtcaaaaaaattgttgatgagacacatcccatcttcatccccagccatgtgtataacaagataataacatttagttgaaggacacacacttattagttcatggaaaacaatgaagcacatacaagttttattataacatataaatttaatcaacagaggtaacctacatgcataattgctatcatttctttcttttacttgcaagttgtgaacctacatatgttctaccaatacgccttgaggcccttgaacatgctcgtcctaggggagtgcccccaaagaactatttagtaacattaaatattttctatttatattggtgcttaacattcagtcaaacttttaaaactacatcattgattttattttataacaagtttataaaaactattaagtttataatactgtggaagtgcttttaaaggcaactctacacataccatatttgtttttttataatgaaccatttgagaaattaccaatggtcataatttcaccacatcttgttattaatacgaacatagacaaatgaattactcgatttcaattttgttcctctccgccgatgaaatcatagggaaattatatataaattgaatgattagattaggatagcatggatatgctaagatttctctactactatatgttttattataactgtatagatatctaatattttttatttggaattttttctcctttgtcttgggagttctcttcttacgatgattaatttcatagcatcctttctgtataaaaatatggtgcacatgttattttgaatttatttttagtaaagttgttttccaacctttgatgataattgaaatcaaattttagatattttctctatggtctgaaagtgacaaacaatttggcggactaaatttctcgtctgaggatgttggtcaagttcttgcaattacaggtacatgtcaagttatcaaattggtcaatattcttgcattctattcagggtagctaaatacactatacaaagctttactgatatgtatttatatttaaatgaagagcaagacgtttttctactgatgcgtgacaatgcataaattataacttggtataacatggccagaaataaatattggctacataacatcgcaaaaacttggtaattagctgttggacacttaatgtactattttattatatttgatgcaaatggagagagaagcaacacggaaaatacagatttgcccttgtatcgatcggcttgtaagatgactcggactggttcgaactagatccaatccattctcactccctcgatgcagttcattctcactccctagtctaggtttggttcgaaattgacctgatggggttaaaaagaagcatgccctatgggcaaacttgtcttttctaaaatatttatctccatttggactagatataacaaaaaaacaatgtgttcaatgtacaacggctaattactgtgttttcacgatgtcctgtaagaaatacattttctttgagtatcctacaacaaagactataaattttgagtgccttgtagcaaattttgccaaatttttttatacaatatcaacttttcctattttgtttaagttgtagaaaccatatttaatggtatagtctcatatcttcttttatatcataggtgctagcatacttatataccagacatttatctacccacatattgtgaaagttctaggaataatcaacacttctcgggttgcagtagtaagtacaagttcccttgattattcagtgaaagttttatctttaatttaattttagtaatgtttgtctcttatttgttgcagattctttctatggcaattctttgtagttatcctcctatgacatatctctcaagaccttggttgtccatagtagtaaatattgcatcgatgcttaaaaataactttgtggtgagtaaacataaaacctaaagttttattcatccatgctcataacaaaccacactgatggatgtttttgtacttccattttcttttctctatttgcatataccacactttttagtgcaaactaccggtgtacatggtagtacaagtaagtattggaatacatcattaatgctaaagtataatatgttgccacaaatcaataataaaagggtggtacctctcattatttcctcatgcattgtacaactactcttgcattaaagtaacatactaaactttggtaaggtacactttaatttgtttgattgctttttggttgagcaaggttaatttcatctaaccaattttctaggttcaacaaacaagttgaatatttagaagatttgaagaattttttttgtgcaagtaattttcttgctcctgaagtattaggaattctgttactaggtaatttgtcttttctaaaatgttgctacactagcaatcacacataggaaactataaacgtgaaatgtagaattgcaaaatataagtgtaattttggcttcgccactgagctcataatattagtgtaactcattgcttttatatcttataagcaaaacaaatatttgcatgaataacatatatcatacaagtcttggccactaatgctttgtcatttgctcctacatatttattaggttactatcaatacatgctctttcattcttcagaacaactctgtggtatgtatcccgttatctaattaaattttattaaccttttctacatacaattattgttttaatgcttatttctctattgaataaatagccccagcatcaaagagcaaccgcaaatggcttagccaccactttaatgtccttcttcaaggcatttgctccagcaggagcaggcattctgtaagtaaaaaaaaatatttgctagtatttctgtggtaaaaatctagaattagtctatagttatcaagctaaaagaaaacaaaaccatccacacatctaagcaatgaattttaggattagggctgtcaacatgttacgaccaagtgagcccattcaggttttgcttgagatcgatttacgagtggaattttagtggtccaaaaaatacacttaattggcttgtttataatataataataaattttattgttccattcatttcaaattagttatcattttagtattgtcctaaggcaaacgtatctatccttgacaattaatttctagaaaatcgtataggttaacaacatgtgaattatatattatgaaagtatatatcaaggcgaatctacaaacataaatcttatgatattaaactacatgaatgtctagaagttgatggcaaaatatacaaatgtttaaattaaaacaaacctagaataagaagtaatttgaaacagagggattacatcattaaaatgaataaatatttgacttgagtggttagtaactaagctgattactgcttataaaaaaatgcaatggttgaattgatatgtatcatgggtcttgttggcatattaattatgattggttaatgtaggttttcgtgggcacaaaaacgccaacatgcatttttctttccaggtaaatttacgacatcattattatgcataagtaacaaaaaaatcatcattgctttaatagaccacgtggctggttaaatgcaccaagtcttgagctttatgatagttacctcgtattttgattttatctggatatttatttctatcccttaacgttagtgatttatcaaaagtagtgattattgggtgttggatgctccttcatagcttataccaatacatgattaattgtgaaggaaccataactctgatctttctattgtttgcatcattgttgtctgccatcttttcgatgtgttctcattgttacatttttgtacgcaggtgaccaaatggtgttcttcattttgattattattgaatttttggaactcatttggaccttcaaaccatttctggccgtgccatagtaattctcttcaaccccaagtaattaagctttcagatcatcgataagttgggtggcatgtcatgtttatacggcagatatgtttgtttgggtatttggatggtagctaataaagagttatgcatatttgaggagcaatacttatgtatcctgtcatgtaattatacataagtatttaaatgacctttctcctttggtttgtaaaatttaaatactcgatttttcacgaagatgaagcataatatcacgtaaattgcaagtgtgaataaaaacaaatggcaaggtaccatataatattatatagatttatatttttccatgttaatttctaagtagtaatataggcatgacacattttaaacgatattaccagataaaatcataaagctatgaccttattatgctttgtatctgtatataatgtatgcttgttgtttatcgcagtggctattgattaattgtagcttaatcgaatacgtgaaatttgtatatgttacattaaaccatgattgctaaagatggctaaagaaatgttagtatacatgagaacattcttcaatggctaaagtgggcacacttcaccaagaatggagaagtttaaaaaaaatacttggagctccttacatccttatggcaagccattgattatgcaattgaagatctatcaggcagtttaactattcggattcccagctaactggttcgataaccagttgaaccggtcggatcaccagtcaggctggtctgctacaagtcaacttgctccgaaatgctcaagatggtgttgctcaatggatacaaggcgcttggggactagctgtggagggtataacccccggtacccacaacaaggtgcatgggccggcccaccaggaatggcctgacccagtacctgaagacccgtggcgcacggcagcgctcggaggtgctcggcgtgcaccgcaagtctaccataaggcaattagcagatatatagggatctgatctgataagctagatatcagatcccttgattgatgcttatcattgtaaaccaactagattagatcttaaccgacttgtaaaccctatctcccggctatataaggagggcatggtaacccctcaaaaacccgataactacacctcatcttgtatcaatatacaatccaccaaaacacatgacgtagggtattacgtcaccatgatggcccgaaacctatctaaagcttcgtgtccctgctcttcgtgttcatcatctagttctgatcatgcacgtccctccacgtagttaatctaccatcgtggttatccccctcagtggattgccgactatatttagtcgaagtgaactataggagcctttgagcaagtttaattgcatagccaactactaactccaaatcatctatagctaatctaatagctcattcatacaatagttatccataaaccattaatatatggtctcacctctcatacacacataatgtattggagtttgtgctacagctggctacgaatctgtagcccgctttccttctctcttttctcttctctcctccacatatacttacagttgacttgtagcctgctattgtactcactcttatagattaccgtaccctgcccttaacaactaattaaggtggaattaaaattccacggtctcatataacacagtaacacatgagccaaattcaaataggccgactgtcacctaatttaaggtgactaaataaaagggctaccatgccaaaaataaaattatagttcttggacgtgcaaagctgtcgagcttgtcaacgtcgattctttggcctgatctgttgtagtatgttgttgctctccggggtagatatgtgtagatttctcaatatcgtcatcagtgacatcatcagtctcattaccctctttgctcttaccccagagcatggtgtaaagacttccgaccagcaaaattccacccaagatgctgccaataaaggaagagcagaaaaggaaagtttgtttattttagcgtgtttttagaatattgcacctttgatcagctgacagtgagtatatatatgatttaatttacctgccgaggtgaacaatctctccaagaaagaaggatgagcaaaatattgtgaacacgaagcagagtggcgtccaggaggcaaagaacatggggcctctcatctctaggcaccacgtttgcaggtagtaggacactcccgtcaccataacaccctgaagcaaaccaccagttgtctaatagtcatatgtgtgtgccgaagaccatgtcaatagtgaatacactagtggaagaggatgactgaaaattttatgtgcacaacttaccgagtataggatggcgagcaagctgatgtcgaatcttagcttccatctggagaagtcgcgctctgcgaccaccgcgacgacaaacgactgcaccgtgctgaacaggcactgagtcacagtcacaaccattttatctggatattccttttgcaccgcagcctacacagtcaatagacaaggattagagaccccgatttgtcagcaattgcagctgtgaatcaatgtagacaagcatgcaagaacagctcagattttttttggtaaatagttaaatatgcatgcatccgaacctgaaaaatgatccacaaagaccagcacatgttggcgaccaccataaggaatgtccatttgatccacacacccctcggaactactgttttcgagcttgtgtcagaggcgaaggcacggtgatggttgatagggcttatggacgggccggtgaagaaggcgatggtgaagactccagccagacagattgctacactagtgaccttggtatgcctgaagagctcctcagcttcacatactccgtcctgtcctggcaagcaacatttcaatcttggtattatatactactccatccattcaaattataaggcggtttggtttttcaagttacatattccttttattatgtgtgttgatatggtgtatatctaaatatctatatcaaaatttatgtgttcagaaaagtcaaaacatcttataattaatattttcacaactaacttgaatctatttatggtacattctcaagttaggctttggtgatatcgatgatgataaacctcaaaagcaccgccaagaagaaggtgatggctgggagtgagctgtttactgcagatgccactgttgcagaggtgaacttgagacttacatggtacagatttaccccaagcgtaatcctgaaaagcaatttccacaagtaaaccagggactaattaaactcttgacatgccatgagtatacaatcgattgttttgttttgtaccaataaattagagtttgcaaagatgagcgcatacccgattaaggcacaaaagaagagctttatgagcaccccaagtgtcatggcgggtcgtgtacttctcctacaaatataatcaaacggacctgtatttctcagctaatcaaacaatatagtaaactaagcgaagtggcaatataacaatataggaaaatgattctatactcccaggagtacgtactccagctttcatccaccatccatcagcaagaggtcccgatcaagattactatcggatctacactttatacccgttttgtgttttatttgaaaaaaataatacataattttccctcattaatcggatcagcaaacgacccaaataaatcccagaagacggcagatcgctctacccagtccccaaccaattcgggattcgcgagcgacggcaagccgacgccagcggcagcgtgaagtatcagcggcaacggtgcaaaatcattcatccagaccttggtgtgttatgcacctcgcatgcaccattttctcttctatcctattttctttgccttctcttgccgatcgagcatatccttattttttcctgttggatctataagggaagagcacatatgttggatgcatagatgcccagtgattttggtggtttgggaattgtgatgtatctttttcacggtaattcaatttattctttaattagttacttgactgattaaccccctataattgggcatgcagacggctgtcggccggcggcaattcatgtcgactccggcggcagttctgttattttttttaatcatgactaaaaataaactttagtccgatcaaaaagttttgaaccagaacgaaatatcatttttagtcccggtttataacagaaccggaactattgtaaaatttggcagatcgatcaaaagatcgttctccagtagtagctctcaacccagcggccagtggcactgctatctgctgaatgtattgcatgttttgatcggcgaaaagatgtactgatactctccattcagaatttagtttgctgctacagcatcaaatatattttctagtgattttgtttgtgaatctgtcagtggcagatacttctcatggtgatactcatgtcctaatgtattctgattttttctgagatctagtgtgttctgtgattcatatctaaggtggtgtttggatccagggacttaactttagtccctgtctttagacactaatttagagtattaaatatagactacttacaaaactaattacataaatgaaagctaattcacgagacaatttttttaagcctaattaatccataattagagaatgtttactgtagcatcacataggctaatcatggattagttaggctcaatagattcgtctcgcgaattagtccaagattatggatgggttttattaatagtctacgtttaatatttataattaatattcaaacatccgatatgatagggacttaaaagttttagtcccatttaaacagggtctaagcaaccccataccaattactatctttaaaaatagcatatactatatttatactaatagcatatactatatttatactaactaaaaatagataaaattaaattagtacataccgcaactaacctaaaatgtggagtaatatatactgctactttataaaagcatatactgctattaacttaaaaattagtatataatgctacaaagttgaaaagcagtacataccactactactattgtaaaaatatgacatataatgctactggtagaatttagtatatactactactaagttaaaaattaaacagtatgtaccactactactctataaaatagtaccacctccgttttttaaatagatgacgctgttgactttttcttacatgtttgaccattcgtcttattcaaaattttatgctaatgtatatgatataaatcacacttaaaatactatgagtgataaaacaactcataacaaaataaattataattacgtaaattttttgaataagacgaatggttaaacatgtgagaaaaagtcaacgtcgtcatctattaaaaaacagagagagtatatactgctagtaactaaataaacagtatatactgcatgctactaacatttaaaaaaagtatatactgctactaagttaaaaatagtatatacctactacattacaaaatagtatatactactattaacttaacaaaaggtatatactgtactaactcttcaaaggagaagaattcagtacatactctttcggagaagtaatcagtataactgattaagaaaatagtatatgctgctctaattaagtgagtacaatttatgctgctagtacttaaaaaaaaggtatatacttaaaatatttataaccctttttctaatcagtttgaatggtagaagatccatctgtttagaggatggtacgttcattattcaaatttaaactaacagcacactccgcgatccctacgttcaattgtgcaccaaatgcggtttgtacctgtgcatgcatgcaccatgcagcgattagagaaaaacaatattttcattcttttcccaccagtttaattagatgctaatggttatccactaaggggagagagtatgtactcccgggagtacataacaatgatcctataaattaaaatggttctatactaccgtccatataaggcagccccgatgaagagcgctattggattcacatgtggacccgttttgatttctattcgagaaaaaaatccgtagtacgacataactatcccacattaatcgacataccggggcgttcttgaacgcgcataaatacctctctcccaaaccatcctattggtaaatcgagtcctcggcgagaacgcgatctaccggcggcgatccggacggatcaatggcaccgattttacggtgacgtcggtgtccatccgatactaggttttttttttaatttcacgatcttgtttgatttgatttcagatgcatcaagcaagagagagagatgggttgttacatactccctacatctacttttgatagtcatatttcatcttggcacacagaccaatgataagtaattctacttatcatccatttaaacatgctactagtcattactcgtaaacaagcgattcattaatatttacatttcacgatgctcaagtagccaatattgtgtggaagaatggagagtcatgcattaaatccgagaaagtcatgaagatgataggttgttgaattgaaatatgcctatcaaaaataaaattttcagatttaaaaatatgactatcaaaagtagatggaaggagtacctttctagaagaaatgtagggagcaagatgagggagccaactgcctggcgatagaagacgaagatgtagatgttcatcccgtggttgaaagcagccttggatatcacaaacatgccagtgtagatcagttggacgacgatggcgacaaaataaggcttcatacttgctttcaccatctcgatcgatccagcaatggcaggcgtgcgtggtgttttgtgcgagtgtgttgtcttcagtgtgcggagtgtgttgtcttcagtgtacgagagcgcccgtttagtttctctccatcaacctggcactacttctatatatttatataaaaaaagaagaagcaggcagtatgccaagtgtaaacgcaagagcacggtaggtaatgtagctttgattttgggtaactgatcagcacgccagatccacacaatctgctatttttagtctccacaaataggagacccacttcgagtgtacattgacggattcggcggcggccagctcgagaagaccgatgctccatggctgaccgtgccatgcagatgcctattcgtaactaaccgagtggtgccctgcgttttctcctctcccgtaactaatagagtggtggcatgcattttttcttctcccataactaaccaagttagtttagaataataatgataattaagaaaaagattttgtttacttacatattgaaaagaaatctatatgtgaaataaacttccatgtaaaatttaaaactttctatcgaaaaattaagggaattgatagatgtctattagattaatgggctaggccaaattaaatcccaataaatttcaatggcctaaatttagtgctatgggtaataatatcaccttgaaaatttaagtgaagagatctcaacttaaatatggagctagtagttaaccgagctgtgtattaactcgggttaatagtacggattgaattctccgaacgtaactctcgcatgcgctacaaatactccatgattaatcgcattaactcgggttaatcgcgcggatgctctctctcttgttttgtaacggacgatgattaattctggtgtattaactcgggttaatcgcgcggattgaattctccgaacgtaactctcgcatgcgctacaaatcctccgtgattaatcgcattaactcgggttaatcgtgtggattgaattctccgaacgtaactctcgcatgcctcgcgccgattaaattctccgaacgtaactctcgcatgcgctacaaatcatccgcgattaatcgcattaactcgggttagtcgtgcggattgaattctctgaacgtaactctcgcatgcgctacaaatcctccgtgattaatcgcattatattctggtgtattaactcgggttaatcgtgcggattgaattctccgaatgtaactctcgcatgcgctacaaatcctccgcgattaatcgcattaactcgggttaattgtgcggattgaattatccgaacgtaactctcgcatgcgctacaaatcctccgctaacggggttaatcgcgcggattgaattctccgaacgtaactctcgcatgcgctacaaatcctctgctaacggggttaatcgcgcggattgaattctccgaatgtaactctcgcatgcgctacaaatcctcctcgattaatcgcattaactcgggttaatcgcgtggattgaattctccgaacttaactcttgcatgcgctacaaatcctccgctaacgggatgaacagacacaatgctcacacttatgttcttcctctctcgcactttcttcccggctgttctcctgttccggaactccgtctgcttgcgtacttgcacgagtaggcaggcaatcaagtttttggggagcgtattggcgcaactgctcctgttctgcttcgacttcttcctctgcatcgcgatggcttccattggagatggcgcaccaggagctgtagggaacggcagtgctccaggaggaggagggaacggcagtgctccaggagacaataccaacgaaggcaatacaaatgcctcaacctcctctgcactgttttctgggtatatggttctatctctaattgatgttcttcatgttacttatatattaatcatgctatccttaggattacaatcctatgtgaatgttgatgatgcttatgcttatgttatgaaaagcatgcccatatttctatttagtcacaccactagattacttactattgtgaatgttatgtttattatcttgttattttagattaaaatataccgaattatgatcaaatttacaacaatgccagcctgagagatcgacatctcagcgagcgagattggtgaattgaaaagtggggaggaagctgatcatggacgtcggcggcaggcagaggcgccgctgctagagaagaagggcagcaccggcatcggcaatgggtactgcattgagaggtgcccaggtgcggcgtcgaccggcgtaaggccgcgagctccggcatcccctacaggagcttcctcttcgtctggatcatcacgctctgcacaggtaacccccacttcattcttctctcttccactcacccacatgcatcatcaatcgcgcgcatctgcacctgattcgattccccctcccctcaattgatgtccacatttttatcgagttatatcatgagtttgtgtttaatttctcctatatatgttctccattgatcataccaccttggagtgctatatagaagtatatacatagaggaaatcccctatgtacccatgaaagttcacctaatcccttctatacccctgaattttgctcaaccccttacatacccctgaattttagttaggatcctttccatgccctttccactagttgaccgttagttgaccgttaaattcttttgaaaaagtccattttgccctttgctatgaagaaacataataaattaatgaagtatattgttggaatgtaaaaatttattggatgagactattatatttatgagtatgtgatgcaccatattatttgtgacaaatttactttcacatataatataaaaagttgatacttatttattagttattaaaagttcttttatgtagcatatgtgttttcatagtaatacaacagatttgtttattacttcagaacacatatgctaaaaaaaatcttttaataactaataaataagtattaattttttatgtcatatctaaaagtatatttatcgcaaataatatggtgcataactatctcataaacataatagtctcatataacaaatttctatgctctaacaatatactctattaatttatatgcttctttataccaaagggcaaaatggactttttcataagaatttaacggttaactagcggaaagggcatggaaggaatccaaactaaaattcaagggtatataagggattgagcacaattcaggggtacagaagggattaggtgaacttccaagggtacacaggggattttctcatatacatactaatgcaggcccttcaattaatcaaaatatttaaattaacaattactactaattttatgaattgctttgagattcgtgaacctcaaccaactattgaatttgggcatgacactgagggcttttttggagagattctgaataactatagcttctctcataatcagaagctctccaaataatttagtttttcattcagattctaataagttgtagttgtataatcttacgcaataaaatagaagtcagaagctagaaaatctaacttttttagattctaaaaagactcttcaaatttatctctggccagatctaggagcggggagggagagagggtgagccgccgccgccgccgccccgtccgcgctggcgccgtcgcaccccctcctccggccagatctaggactggggaaggagaggggggagccgccgccaccatcgccccgtccgtgccaacgtcgtcatccacaccgccaccaccgcgtttgcaccgccgacgtcgctcccctcctccggtcggattaggagggagagagggaggaaggggatgggaggagagagacgggccggtgagagagagagagagagagagttgagagggaaatgagtggtggcccgtggggaggggtggaggagaagataagaaagacttaaaaagatatttttggggcaggtatgatttttgcaggcgaaccacataaggttccgcctgcgaaaatcaatttttccaagcggaccacttaagaggtccgcctgtgaaaataaagttatttttcgcaggcagacctctgcctggaggactttcgcaggtggatgacgaaatccaccccgttttatattttcataggcggatatttagcttcgagggtcatacccgttttggaaaataaaaggccaacgtcgataaaaatcgtttttctagtagtggtggctattgattaattgtagcttaatcgaatacgtgaaatttgtatatgttacgttaaaccatgattgctaaagatggctataaagaaatgttagtatacatgagaacattcttcaattaatcagcatacaaagtgatctactgctaactgatgaaaacgaggcaacatctaagccactaattaaacattattacttttgaccaaggtaaaataatgagtatagtactggttttgtttacacaaagatcgagggttgcactctacgcacatgtttgttaagtagttaatcatgagtgatggagaagctgggagttaatcatatttgccacacaaaatcaatatgcaattattgaattcatatggacaagctgacgatgtagactgataaataaaatcctgtatgcatgcatgtgccattttgtactccagtaatcttttgtttggcatgcatgtcagcatgtgtgcgtggttcaggcaatgtgaaagtagtgaattgattggcaatgtgagagtgagttgattgaagtagcaacgacctgtcgggcctagcggccggccggcctgactgactgacgtaggagctgacgatgccaagttagttgcacattgttggtgctactgatgctcaaccagggctctgtttagttcacatcaaacgtcccctaaactttcaacttttcatcacatcatatcacatccaaaacttttttactcacataaactcctaaccttttttctaaactatcaactttcccccgaacttctccccaatttcagaaactaaacacatatatcctcattaataataagctactagtagtgttttactgtttgatgataacttatttctagcagtactgggctaacatgtatggtaatactgaaattaaggaactgctggattcaagcagcagctgattgactttggttaccagcacacaattaacctaaaatttaatgaactgttgggtctggccgattaactagttatcttacggttgcagcagcaatggtgttaccattaaattttttaatttctacgtaatctatcgatgggatgtacgatggattaataaacttcaactaccttttaaaaaaataaacttcaactacataattgttattattgtcatatactctgactaggagcagtacataccgtactgtttaagaagattggcagcaactgcagagcaggtggcaattccgacttggattagtgcagctatggctgtgtttagttcagcgtaaagtttagattttggttgaaattggagatgatgtgactgaaaagttatgtgtatgacaggttgatgtgatagaaaaagactgaaatttggatccaaactttggatctaaacacagcctatacatgatgtaacgtgagaaagtttattcgtctcttaaggaaacactcctttatttttttatacggtttgaaaaatcacaaaaatattaataaaaagtagatcaataatacaatatataaataaaatacaagctcaaattcagcttgaaatgaaaataataaattggctccgaataaaatgtgtcattcatagttaaatttattttttaattatatatatcaaattgaaattacataattgtcgagtgacacccccacatatttaattaatcttaatattttttattaaaataattaatgattttttaaaatggcatacaccgacatacacaagtaaagaaacgtagcctcgaacaacaaaaatccattttacaatcatatactatttggacaacgggaagcctgtttcgtcttctaactttcttcccgtggctttttttgttccatgcggtttctgctctgctcccaaaagtaaaaaccgccc

SEQ ID NO: 8280 - DNA, 21914 bp, Oryza sativa
ccttatatttagggacggtgggtgtcataggtagtgggccgaggggtcgaggccctagggataaggatagagttggttggataggattagactgggtcctccctccatctatataaggatggtttgtatcatcattctaattaagcaatgaatcaagattagtctctcccaacctaagtccccctctcatccctagcagccgtcgccgcccggctatcctctcggcggtgtttaccccctatgaatcctaacccataacagtgggagtattgttttaattttctaaaatcaccacttttattcataatgcagccagagggagtagcaattgaatcaaggaaggtgcttcttgagcgggcgtctcaaggaacaacgatcttcgtgatgaacaagtgatgtcctctctgctcaatttcaacacccattagtaagctaataatcaataatgagtatgctagctgacacaataccgtaaattttgattgacaggccttcctggatgatagagactgatccaaaggaagttggcctgggaatatatgtgtaggggaatagtatgtttccctcactatatgtctatattgaagtttacagctcctaattataattttgacggtgaaatcttagcacttactacaaagttcttgggtatgagtaagagcaagagcgacaaataggacagggcaatgaacaagtaaattcttatccattttcaacaaggcacctctgtctctttgttaatcgcactgttctgaatgtggctgtaaataatagaacgaatttgtaatgctctaagagtatggggtggatgaatgaaatgaattggagcacaatacaaccaaacgagggttacagttttgatgaagtatcctagtgcctgttattgtcttagcagaaatgtgtggtgagtttatgaggtctctaaagaattcgttacattccaagagcattaatgcatccaccgaaatgaattatccgtagcaattttggtcatcgtgtttagcatcgacttgtgcagcctgtgaattgaagtagaagggcatatatatatatatatatatatttctctgttctgctcttgcctctgtctacaaaattccacgtattctttaaaagcaacggaagctaaataacatttgtgggtgggtgtggggggtaaaacttatctcgttctatacagattgctgagactaagatatcatatatacctatgtaagctacgaagagctgatgatagttcgttagcattttatcattacctactttacatttcaactctgacataattcgcatgttcaacaatggcgatcctcgtactgcagctcttgttcgactatgatatgcattctacatcaccattgatgttgcaggaaacagcctgtccagtagggtataaacccctccacccagtagaaatgcaccactaccaagcaaatggcaaatgttagcgcaaggcgttaatccaaaaaaaataaagtataaaaggcagattttttaaagaaggaatggcttatatttttttagagatccttcctttttttaaaaaagaaagaacacgaatgtttctgaggaattggaactgtgcaaagcacatgacagaattgtggcaagaagtttagaacaatatcttacaaaagaatattaaatggatgataaggtaaatttgatgtgctatattctctgaaagaagcatgcccaacaaatgtgatttcaagctctttgaaccaagacagtgaaattgtagcgaatgctatcaattaacaaatatggattttcagtgtttcctttgtaaaaggtagtaaaaaaattattactattcatacagataattaattgcaacgtgcaggtcttttgcaatcaaattacaaaccaggaacctctcaagatccagaaagagctaaggcacatacctgattgggtttatccatgcagaatacctcctgaaggaaagcaaactctacagaaagcaaataatttatcaggcactaaacttaaaatgaacaggtgttgttgttctaggatttgtgctgttaaactgttagtcaagtctaagtgagatttaaagttccatatttgatggaactatcttatctatacttaaccagatgtgtatatcagaaggcatttatacctgcagtgctccagcaaaagaagctgcaatgagaagaggtgcaacatagccagttgtataagtcaataacaaacttcccccaacaatcggatcctgacagaaaatgtattgtaatcagcatgtcagaaaattaataaattaggcgaacataaacttcttgccaacaattatgacagattgctaagtcaagtgtaacatatattagaaacaaagaaatcaaaattactgcatatcgtacggtatgtgatttactaactttagtaattaaagacactatggtaaaatttatgacagttttactgttttgaaatttaagaaaaagtaataaaatattaatgtaacttatgaatgttcctgttatgcatactcttgaagtggcaacatatcccagaagggtagcaagaacaggtgtactgcaaggtgatgctgctaatgcaaacgtaagtccggcaaggtatgcttgtacacctatagggaaacagcaagatatcatttaccgtaactgaaataaacataatgaggcatatggtactttgatacaaaatagaaaattatgtcaaagcattactggaagggaggttagctgcagcagctcgagggtcataatcgctgaaaaatgagggaagttgtagctcaattacctgtaaatacaagataaccagcatagagaacagtttaaggcagtgagctaatatctactataacaggagtgatacacatttcattgaaataaattaccatcgcggcaaaggatttacaattatttataaaaggaaaaccatcaaatcaactgatacttgatttgaattgtggcaacaagttagcttgaaaaattaattggcatgctccgctttatgagttttcacattggatcatgaatttacctcaagaaggttcaatcccatgataactgctaaccctgaagcagccactggaagtccttgtcctacctgtccataggcctttccagcaaaagaagcagcaacaccaaggatggctaaggttgttgccagtcctaatgaaaaagcaactgaatttccaacaacctaatagatagaatggaaacatatcaatttacatcaagaataacatggatgaagtttttttcttctacatggtgaatggatgttatggcatacgaggttttgggtatacatgctctatttaatttctataagttattttataaataatagaatatacctcagatcgatctttgcccgagccaaaagcacctgaaagattttaaagaatatgtcatcagatcagtgccatcaattgtaactgatcctgggcaacaaaaaaaaagcatctcaaaaggcaatcgctatacttgcctatatatcctagagtcaatggtagaacactgagtgtacaaggagacaaactagttacaagtccagcaccgaaaattacagccaagctggagaatagagaaacatgtcagaaaaaaatatggacatgaaacataaaatataatctgagaaagtaagtaaacagattctgtccataggcaattgaccgcaggggaaaaaaatgcttacctagtgaaactaagagcagagagctgatcctgaacagcctcgttggcttgctgacccgctgaataaagcaaatttccaaaccaatctccaatgctaaggtcagccaaagcaagtccagatgaccctaactgatcataataaaattttatgcacgcattagctatatgccatcacaatgtaataaaaaggaatatatgatattctctttcctatgacagataactacactgttgactacaattcattattgtttctacgcagtagtacaatttgacatgttaaaatcacaacttgatacaggcatcacgaactcttttgtgatcagcaagaaggggacagaaaattcgaaggcacatagtgctccctcaccagagaatcaccaatttctgtagcatttgcagcgccagcagcaaccaaccagactccccactgcgaccaagaaacaccactcactaacgtcagagacatttcatcaaacagattgccagcgatagaacacatgaagggagcagtcaacagctaacactctacccgccacggtcgccagcagcatggggcgctggcggacgagagagcacctcgccgcggcctccaatctcgctccacgaatcgctgccttggaaaccgagctcccgcgctcgcggggcacacccacgagcacacccgtaccaggggacgaggaggtggagggcttggaagcagcggcctgcgccgggcggcaggggcggcaggtggaggtggtgctactaacggggcgcgcggccatggcgacgcagagcacggaggagtggatggagcgaaggataccggagaagagggagaagagacgcttctgcttgggtcaaagggagaagaaggccacacgcccgcggggagacgtgtagccttcgatgggccggggcccacgagtcagtgtgaagctatagcagcttcctctttgggcttcatttaaagctatagctttctccggcaagccgtcgcctcagctcatctccctgtttgcgaaattgcggcggcggcgcccaatctcgcggtgcaggggcggcgcctagttcttccatggcgagatagcattccggtttgccggaggagattgccgtcgagagcgagagagagcatcggcgaatcattttgaagttgggtgttcctcctcttcctcccggcgatggggaactggaatcaccatcggcggccatggcacaggaggagccgccacgaacgccctccgcctccgccttcacctcctccgcatcccggtatggatgactgatttgcttgttctgttccctttgtttctatggattggattgcgtttttgtatgattcgatttaagttcaggtggtgatttgttaggcaagaatagggttagaaatttttaaatctaggtatctagtcagtaggtctggtaatgtcggttaatgctttttctgtgaattggaattttaggaatcgacatgaatatcattctacttcttgccatcctaagaatgcacaaccgtcatagatagtggactgtctgcttagaaccagagttgctactgcaactttctttaccaataatcttattgtttgtctaattgtcttaatatttcaaaatgtggtgcttaaatgtcagaaagttctagttttattcaactaccaagtatcaatttgtcgtttgagctgtaatggtattgcagtttgccatctactaatgtgcaaactttgtatatacgagttggtcatttgatccaaccacacagtaagcacagtgtgtcatctgttccgacaagaatatgtaacggaaatagtggtgatgcatttctagattaggatattctccgcttcccgccaaagtaatatacaacggcctaatggaaatagtaataatttaggatggtcttttcttcccaccaaaatttaaaacaccgcctctccttatccactagaagaaatttttttttgaacgaatcactagaagaaatataaatgttgaaacataaccatggtgcaccacttctgtacttgaatcttgctagacaccaacctgccacctagcacggttgccattcaggccaactattgctaactaggaactagacaccaccatgttaccccgtcactcgcctagcatcattttgaacactactaaattgccctagctcatttcgttattacatggggggttccaactcacctggaccttaatgtggcatgactaggagcctagcctaggaattttttttagagcaagggccattcccagttcccacatttccattaacagaaatgtagctacagatttcaggaaaacataaaaggaaaccaccaactatcctgatagagttttcattggtcaatttgggttgggtgtcaacacacaacctcctaattgccagcagccagcacaaagtaaagacacagggagccactctagggactcagccaaacagaacccagcagcccaacctgatcaaaagcccaccctactgagagacttccagttttttgtcaacagtgagaagaaccgggtcagtgcttcaggtgaaatcaaactccagagtgaagccttctagctggtagccgcttcatccccaccctccacccgaaccttgtgttgaagatgtcatttacaaattgctttaggagctggaccccccacagcagccctcttcgctcttcctcctgcatctgcaaaccagctcaacatgtaatccaatgacaagcataataaatcaaatctgtgggatctccaggaagttgtttcttaaaacaagcagaattttttgttttccaaatgacccataaaatagcagccacaccaacccaaatgggatgtttcatgtttttctgaaagctctccatccaactaccaaaaagatgatttatatctctaaaaggtttcaagttgctacaaacaacattccagatcacttttgcaattcggcattcgataaaaaggtgttgcattgattctgctgtatcacagaattgacaaaatttatcccccttctgccaacctcttataattaaattatcttttgttagtatactgtttctcaaaagaagccgcaggaacactttgatttttcaaggggatcttgaatttccatatttcctatgtgaaaaataaatgcgtattttcatatctttgtaaaaagatttaacagtgaattactctatctgcttttgacccatcaagagtaagctgatctgagtaagcttaccctaggagatggaaggcagagttatgttattatgatcatacaagttatttctctaaaattaggataattctagaagcttcaaaagagcgttgctttgcattagccatatcacagtcatctggttgaggttgtacttaatggagaaaggaaacgaagcgctgtacttactgcacatttctttagaaaaatgaggagccacaaaatgttaagttggctattgataacttcttatgtgggcgtaacatttttttcctcaagcggcagtatgcttaatctatgatatacttgaagaaacattgttagtacttgctattaaaataaactattaggtaactgacatagccatgaaaggtgcagttgtgtggcgacaaaggagcatccattagaaggaatgctagtattttaggattgaacccttttatctagtactttgaataattcttctgtttagtctgttatgaaagtaactgttgggtgtcttttttttccatacttttagaagagatgctgctatttcaggcgatttctaaatctgtacagtggtgttcagatggtaatttgttagggaagactcgggttggaaaattttcgatctagatatctaggtctagtactttcttgttggctgacgattttcctgtggattggaggtctcggaatgggcatgaatatcattttgcttcctgccaccctaacaatgacacaactgttgtagatggtggactgtcctgtactgtgtgatgcggtcaatttaagcttagaaccagagttgctactgcgacttcctttacaattaggcttattatttttggtctaatttgtcttactatttgaaaaggtacccaaatgtcagaaaatgctagttttatttgactaccaagtatcagttcatagtttgaactgtaatggtattgcaataagcaaactaatccctctgtttttttatttgactttggttaattcaacgtcaaataaaaaaaatagagggagcacttgtgtgcacatatcttcagaaaaaatgaggggacacaaaatgttaaattggctattgataacttcttacgtggccattacattttttcctcaagcagccggatcctaaatccatgatatgcgtaaggagacgttattaattgctattaaaaataaactattagataactgacatagtcatgagaggcgcagttgtgtggcgacaaaggagcatcccttagaaggaatgctagtgttttagtactgaacccatttatccagtagcctgaatggttcttctgtttagcctgttaggaagtaaccgttgggtgctttggtgtctttgtttcccatacttttagaagggatgctaatattttggatttgacccgtccaaaatctgcaggcgatttctaatctgtacagtagtcttaagcaatctaaccagaatttttttgtatatgttatttgtttgtataaacattttagaattcatcatctccttgcatttttatgctgctacaatgaatctgatattgcttttgtatttacaggacacaattgccacccagtcccattatgggaaagggaattttgcatttatgttggcggcatttcttggcacaggttctgtgacaacaagagatatgtctgcatgtataagaacattgagcaatgggatgactcagaagcctttgataattttaagaatgcaaaggctagattctgggctaattaccatggccaaccttcagacatatctttgccagaccctgatatgtatattgacaagattgaccacaatagcaagatcgaccctgagttgatagctgacctgaagatggtacgcttaccattcgagagggatgatgagttactcccagctgatggattgggcagcactgatacagataacaagtgccagcagaagcagaaccaatctggaaactgggacatctatgtagaaaagcccactgaagttaacaagtgggagcaagattcaagatccaacatggactggggaacaaagcatgaatcttggaatgaatggagtaaaaattgctctggttggggtagtgccttggcggattctagtgccttggcggattctagttggggcaattggaataatagtaacaatcatcattcatcaaataacagggatagcttcaatggggtcaacaggaatagataccaggacccaaacagcatatctggaaggaaaaggaatagtggtgggcacattcagcaaagaaacagtagacagagaaaccagactgagggctaccaaggaagtactcctagatggtgagaccatataagacaagagaatggtctccatttgataatagtgtaaagggggtaaatgaccacacaatagaatgtggcctcttagtagtgcgaaagattggatcagaatgaacttttgtctggagactacagggatagcttcaatggggtcaacaggaatagataccaggacccaaacagcatatctggaaggaaaaggaatagtggtgggcacattcagcaaagaaacagtagacagagaaaccagactgagggctaccaaggaagtactcctagatggtgagaccatataagacaagagaatggtctccatttgataatagtgtaaagggggtaaatgaccacacaatagaatgtggcctcttagtagtgcgaaagattggatcagaatgaacttttgtctggagactagagcagttagcaatagttggcagttagaacaaatgatctatgtaaagagatgctcgagttttttccttctctagaaagaaagtttcttcatgtcgcttgagacatgatgtttttgggtaatggaagcagaatgctgccatttcgttgtaaaggtgatcgccataagttagttgttttttttctctttctttctttcaagctccatgaatatgtagtttgttcaagtgaaacatagaattcatgtactggtagcatgttagtactaacatatactgatatattgataattcgtgtctagtgctaataaagatactcataagtcataaccagatgaaagagtctggtacagtatgtgttactaacataaattttgcaactaccaaacataaatttgtgtgcaagtgtactcaaccataagggcatttccaacccaagacactagacataatttccataaactccacatcatcaagaaactagtactagacactactctttcaatgcaaacactactattccatacttaaatttaatgctacttatctcacatgatatcttggacgttgtgtagaaaccatatctcatgcaatatatggtttccttctcttttctcatttattcacttgccatttcattttttatcctaggtggcagcttatttaatgctatggacatcatcctagtcattgggttgggaatgccctaagtcttctttcatctgattaatttgttaaccataagcgtactcgcaactgtcaagggttaatactagattcatcacaaagtgtttttcacactttccttaaataaaagtgtttttcacacacatacacacaaacttccacacataaattcgcttgcaaaaaaataggatctttttttaatgttcgatgctgaaacaggggctttaacaaaaataatacttaaaaaccattttatattatacaagtcgctttgacttttcacttagtcaaacttctaaaagtttgatcatgtttataaaaaaaatctagcaacatttctaacacaaaacaaataaaatatatttaatatcatatttaaagaaactaatttggtattatagatattgctaagtttttatataaatttagttttatactaggaaaagtatcaaaaagatttataatattaaatggagttaggagtgttgtgttaccttagggtgaaaacaaaccgtaaggggtgttatgcaaaaactaggatcaccttcatgacaaaaatagcccgaaacaagggcctttttgtaaacattactgccagtccgtcagcgcgcggaacacagcgatctctgccgttggatcgatcatcaacgctccatcggagcaacgccgccccgtcaacaaatgcggcgcctcccccctcccccctcccgacgtttcccgtttcccttccttcgcgcggcgctgctccggtagggtttttagccggcgatctctcccctctcgcgcgctcggcgactgagaatggtcgaggtggaggaagtcagcaacaagatgcaggcgcagatgcgcctccaccccgcggcggcggcggaggaggaggacgccgacctcccgctccctgccctcttcgacaaggcgtcccacctccactccctcgcctccagctcctccctcgatcaggttttccctcgattcacccccccttctcctcatccccatcaaccctctcatggcggtttcatgcgagcgcttactgtggctgcttggtttggtttgggatatttgcaggaagggatccgcaagggggtcgacctgctgcggcggtgcgacgagatggtcagtaagctcggcctcttctcctccaacgagaccaaggatgacgtctccactgccaacctcaaatacctactcgtatgcttgtttcccccactacatctgcgtttagttccgtttctcttatcatatcatgtttgtgcatctgcgacatgtggttatatctgtgatttcgattgattttcttcaggtgccgtactaccttggggaaatgactgaaagggtagcgcaggaagatcggatcccagtccttaaggcgtcgcaggatcatttgaaggttatatcagtttgtcctgtcacatttagttgatttggtgcatatttgtcatgtctttcttatgcccttttcaattgggagcactctgtcatcacaacactcatgttttaatcactacggttacgcaggaattcatttctatctgtgaagcactggagcttatatcagaggatgagcttgaattgtctaggcagaagcaacctgataccatggcaaatcgaagagcacagaaggtgagccttggcaaaatattttttctcgaatatgttaaagccttaaaggggtcatcaatcattctgcaatttacaaacacaataagctgggatccaaatctcttattgagactgcaaaatctgggactcataatctgcttgaccttttccaaagtcggttaatttccactctaattttcttgtttgaccaaacctaggttgcacggttcaagcgccaaaaggctgcagaaacaaagctcctagaaatcaaggagaggaaagaaaggcgtaggcggtcattgagagcagctgctttatcagctcctattgaagctggggaggaagatgcttttgaggatgatggagaggaagaaagagaggttagcagttagcaccagacatttagaacccatttacgtagcaaatctgatcttgtttaccaaatggaaacatcatgatatattcttaaattaccacatagcatatttgaaaatactccaaactaaaattagctacaatgtactagaagtggaagaaaaatatttacttttccagaaaagaaaaggaaaggaaaggctttgttctgttcaatagaagatggaatttgacaaatttgatgattcaagataggttttaaaaatctcatagggaactgatcgcatttcctgaattagcccatttttgtggccatgaaacacacaacagatttgttctgtagtgccagattgtcaccaccaatcttttttcctgtaacaatatgatgcttaatgtctttcctatgctttttatatacaatctcttacttttgtgggcaatcaaccttttgggatctgtcgatgtgtgcttccaaagtttgggctccatgcctgtcataactttactttgatgtacaaatgacaaacggttatgctgtggttttgattcttttttttggttctatgttgcaggcatggttagctactatctcattggctctatgcaaggtttgtgttttgtgggcaagaatgattctcttatactgcttggaatgtttatttgcattcttttaagctactgtgctcgctttgttatcctgatcatcagacgtactcatttctacttcattttataggcttttgaccttcttgacatgttaaagaaggaagaagaaatgcttctggcagtaaaagaaaggcaagcgaaggtaaaacaaatgaataaactttgccaatgtcttgtcaatagtatctttggttgatcctttccagtatcatattgaccttttaacctttcttctgtaaccgttctgtaaccttatacaattattgaacttcgctttggataagccttgagcttatgttgtagtagggcttaccttcaccaagtagatagctggatagttgtatacagtaattccgtttgaaaaaaaatatacaccggattctgagtttggacatacaattaaattaattgtcataatatgataataacttgccattgcaagtatttcatcacacttctctctctctgtgtgtgtgtgtgtgtgtgtgtgcagagtgctgagtgttttgttgttactacatgcaagtaatattagatatttgattttgttttcatgatccttttgtagcactcgatggtagatattctaccgtaagaaaaaaaagaagattttttttatctttgctcccattgtgttgcatatctgtttcaataaactctgcacttacatggaggtttcctttagtaatgaaataattgcctgcttatgatgttttaggatggtaatgcatttgctcgtgaaatgcttgatgaacgtacaaaaaaggctgaagcatggcaccataatgctgccaaccgtgcaccatattccaagccagctgatccaatcacttgtgcaacatttgctcaagatgtcattgaaggtagagcaagtgtttcacaagcacatgagcacaaacaccagccgctgatatttggccctgcaagtcttgttggtggaggactaaccagtgaaagagagagaatggcagcacaagtttttcagccaagttacaggtatgctttaaaatactgctacgtacctggctgaaaactgcactgcttcttttaatatttgtggagggggcattatttgtggcaacttttaatgcatcatattagtcatactttgatatatttgtaggaactttgacctcctattccattgagcattactcgatgagcaaattatttcttggtaaatttgtaaagtggttctttacattgtatttgcttcaccacattagtatgtgactgtgtttattcaatcgtaggtgtttccttgttctattgttgtatgttctgccataagtctgtgacaaatttgtggtttacattgttgatatcattctttttttttcatgctggaaaggcaccatgttaaatttgctactcagtgcaatactagattcactgacaataaactgttgtcttgtactctgttgtgactacgaacgcttggtgcaatcgtatagatgctgagatagtgatttgtaggtgcgaccttatgtttagtcataatccatgaaaaattccaagaaatggtactattctgcaattgctcataaaaaacattagatttcccctgcagcaactaagtgttgagctgtagatcatctctattaaagtgatattgcattgttcagtaaaagttagtgaaaatatgcatatgagactatcctttgatccaattattctgtttccatttttcctgtatttggactattaggttgccaacgatgagcatagaagaagctggcttacgtgagatgaaaatgatggagaaatggcaagaaagaactgctaagatgattcaagaatcaaactccgcatggcacaaggatggcagtcggtcagcccaagaggatgaggacgctgaagaggagaaagcaagagcatgggatgactggaaggacgataaccctcgtggtgcaggcaacaagaagctcactccctgtggctagattatatgctatggcaattctattgaacttagatctgaaactgtagctcttgtaaaaatatgtggttttttactttccttactgcggcatttgttgactgttgagtaataatgtgttccatatgcctattgtaatggtgcatggttttcttctgccaatatattgggaagtaatgccaaaaaaaagctggtttgagaagcaagcttacctgctcggtacaaagatcttatctgctcggtacaagtatgttacactcgtcagccatgcccaaagggtagatcaccctattgggcatgtttggcttagagcaagtttaatagtatagtcaactactagcttcaaaatatctccagccaattcggacaatagttacttaaaaatatatactacatcattaatatctggtcttatatctcatacatacacatcgtcttggagtttatgctacagttgactacacagtttatgctacagttggctacaaatatgtagctcgctttttctctcatatcttatcttctctatatgtgcttgtagctgacttaatagtctgttattgtacttgttcttagctccatggaagatatttttctcgagattaaggtgtcccattgccccatatttggtaatattcatcgatgattaaaacgtttcgaaatgcttgcggaacttaaagtagtcttacactttggtgggtttgcagggggcacgaagaagacaattatgtgacacaaaagccaaacaaatgacaaacccaacttactgctaatcgacctgttattactcgaagcagcttgcaataatttgattcatagaattacagtacacatatccttcacatatttcatgaatactacacatgtccagctgttcgcttcaaacatgaatacatgatagttacttctattctcctttttgtcgtaaaagctgtggatgaaacaacaagccagttccttcaaacttgatctcgatgatctcatcaattttcattgccatctccggtgtcagatagttcctccaatctccgactactccacgccggaagaatatgttgttcggtacgtctttctcgataaagtcagttgtccccgacagattcacctctaacctcgacaagctctccatggcacagatctccacaatcttcctatccactccagcctcttgctcctcaaccgtgaacgggtgcccaacgaactcggccaaacgtctcaataggccaagcgtgtcagcggcaagctcctcgtaggtcaagaagaacacctggcttggcatctcgacgtgccaccgccagtagccgaggacgtgctcccaaaacggcccgaaatgcgagatgccatcgcagaattgccggacagccacatcaatgttccatgacatgaatctattccagaagtgccagagagagacaaaacaatccttgggatcccggcacaggtacaccaccttgctgccggaggcggcaatggagtccggcagcgattgggccgggatgtgcgtcgtcaagagccttggttccgggagcgagctcagatcggggatgcggtcgttgacgaacaactgggactccagaaaagggacgctagctcgtgggcgtcgtggtggagagcagagtacataagcgccttgagccatgtggtgccggacttggggaaggtggcgatgaagacgtccgtggtgcgcgccatcagatgcctcttgatggccatggcgctcacaaccccccgcctggacatgtaccatccgtcagggtggcgacagttgttggaattaatgaatgggccttagcccactcgaagattaattctttggaaaatcacaaaagcccacctcatggaatggcatgcatgtggagtttagtaccaccttgcttattctaggagagggggacctccttaaaagggaggatgccctcctagccacttgaagcatgtgtggtggagagaagaggggaaacacacgcgcgcgctcggctcgcctggcagggcagggcaggcggcgcgcgtgcacgacgtacgcgtcgaatggtccgaaaaaattggctcctcacccttgcgcagatgcagcctccttttgcagttttgttttgctgcaaattcggattcgttttgttttggaaacgttccgaaaaatccggtgcgtgcaaacggcgtggagtccggataagttacgcgcgacttatccggttcggttacgcgcagtagagatcgtgcgggcgccctgatcaagcgacccttctctatataaaccgacccgccgtcttcacgcaatatatgcgaaaatcaatctagggtttgcctcctactctgtactgcgccgtcgctcgtagactactccatcccgctcgccggcgtgcaccagcgatcgggagagcaggtctccggaacctctgcctttgacgtcctgcaccgggagaaggcggcaataaggtttttgggaagcgcttcgcgtgactgctccctgttcgttcacgacggctcgccttcctcttcgctcgcgtgtttcgtgccttcgtagacacctgcgaaaagtttcgaccaagcagccggtcttttcgtcacctcggtacgtgttcaatatgttgcgcatatttgatctgttcatgttattctgcgtagtttacatgtgtagatctaatgatgcgttcatgctagttttcatctgtaatgtcatgatttatttatggaataaattaaatcattatatgcccataatctcaacaacagtatggttggccgatgccgctgactgccgccgggaaggtctccacgacttgccggagttggtcatagatttccatgtgagacgttccgtcggccgcttcggcagttgaggaggaagccatgaagtgtgtagtcctacgaaaacaataatgagtcttagtcccgtgaacctgacaatatatgattgagatgtaacttgcaaacatgcatctaagagaagagacaaatcccagcagagttctcaagctagctggcactgataatccaccattaattgattgttagagtctgtacatccgtacttatgtgacctatttttcattccttaattccctcctctcaaattatggtgttaggttgagaaatttcatgaacatgggggttaaactttaccttgcaaaaaaatgctgttttttctgagggacaaatttatcatggtgtctagtagtaagatcagctttaattaactatgcgcaccgaaacaagggtttggtagtgatgtaattgtgaattacagtctttcttttcagagatgaaatcatgcaaactactttctagactagaaggtaatggacaatcatctcaataaagtatatatacgacatactcctagttgctaagtgtaagatcagttcagctaactatagatgtgactcgaaaaaataatttggaggaaaacaaatggaagagcagattagcaggtccgtagcatatcatccttatagccttggacagttggactagaatcgcagtttctctttgctcgtgcctccctatgccaattgaggtagctcgttttactgctctaaaataaattgttttggacattgaatggtccttcggttcaagtaataatcaatggtttaatgttttttgcttttttccctcagtatttttatttttatttctaatttattagagtgtcacttggtggtatagaaatgtttcggaggatgtttaataatctttagcatatcaagaaacagtgtggatcatttgaacgttattagtgaattttgatgaatgatctgaaaactgtatgacgatagttacgtacaccaaactaatccacaaagccaaacaacctaacaacccaactcacggctaaccggcaacattttattatattacttgcaatgatttgatttacaaatttccagtacatatatgtatttcttcactcgtgaatacgcaagagattgtatctctattaaacaccgaaaacggcacacaaactattttttgaaagaaaaaacatatactcctagtttgttttaatttattctctttttacttgtaaaaactgcggatgtaacaacaagccagaccctttaaacttgctctttgtaatctcatcaatcctccttgccatctctggcgtcaggtggtttctccaatctccgaccacgccacgccggaagaacgtgttgtttgggacagtgctatcgactatggtgatcgttcccgaccgattcacctctaatccggacatgttctccaatgcgcaggcctccacgatattcctatccaccccgtgcttctgctcctccgtcgtgaatggacatccgacaaactcggcaaggcgtctcaactggccgagtgtgtcggcggcgagctcctcgtaggtcaagaagagtacctggttcggcttctcgacgtgccacctccagtagccgaggatatgctcccagaacggcccaaactgcgagacgccatcgcagaattgccggtgcgcctcgtcgatgtcccacggcatgaacctgttccaaaagtgccagagcgagacgaagcagtccttggggtcccgacaaaggtacaccaccttacaaccggatgtagcgacggagtttggcagtgactgggacgggatgtgcgtcataaacaaccgcggcgaagataaggagctcaggtcagggatccggtcattgacgaacacctgggactcgaggaaagggacgagctggtgcgggctgtgcgccaccagctcgtcagttccgcggtggagagtcgagtacagaagcaccttgagccaagtggtgccggacttggggaaggtggtgaggaagatgtcggtggcgcgcgccgtcaggtgctccttgatcaccatggagctcacaaccccattcgtgaacgtgtaccacccgtccgggtggcggctgcacgggaggccgatgaggctgggagccgacggaaaggtctctgcgactcgtcggagttggtcgtatatctccttatgagctgttgcttcgtcggccgactcgggtgcagaagagagccggaaggagggcgccatgaagaatgaatccagcagaacaccagttaatgagcaatgtattttttctttgatccaatcatactctctgggagtatgaagtgcaaatatatagtactatctcggagaggagagtagtccggaagtaataataaagtattcaagttgacattaattagtattaacttgttattatgtctaggtgttagcatcttttttagatcatcaaagatttcgttgaacaatagcatctctagttatgtagattaattttatctctttttctttctttaatgcacgtgatgctcaacttgagcttgaaaaaagttgttaatgcttcggagggttaaatttaccgtgacatatggatttagcttttaggggagggcattattttgtccattgtatagttttttctttacaaagttcggggggggggggggggggagtttccccacctgaattttatgaaaggaatgaagacttgcagttacatcttagattacagagtttcgaaaagcagacgatagtgtttccttccacgaggaaacaatgcccctatcatccgaattgaaacgctttgcccaaagagttgcatcatctatacatttagttactagtctacgcaaggatgtttgcagccccttgaaaacaacatcatgcctgtggttccacaggccccaaaagcagagaaagaagaagactctgaagtgcttgatgggaatgccatctaggcggcctaaacttgcgagattggctgagcttgtcagtcctgggacaatctaaatggtcgaccagaacgtctgagaaaaagagcaatcaacacagaaatgaaaagcattttcttctaaaacaccacaaagatcgcagttcacggacgaaacaattttctttttgtacaggttctgctttgtggggaggcgttctttagataataaccaaatgaagaactgaatcttcggaggagatttacttttccaaattattttccaattttggtcgtcttggcggtcttcatgcaagtactcgtagatttgcttggacttcaagatggtggcgtgtggagcattgagggctcccctttcgttcagttgatcaacttagtacgaaatcactcaaagcgagaaggagatgttgtagctgagaaggagatcttgtccattgtatagtgatagcagatggtggtattatcttgctcattgtattatgattgatgacaatcgtgagaacgatgtatatcaaaatacattcaatgttatatttaatgaaactaatttagtattattgctaattatttttatagatagatttgataaaatgtcaaaacgattgataagatgaaacgaatggagtagttgctaagttagtgaaacctatataatcttggacatagtaaactatgacaaaatatgactggcaacctaacgcgtcgtattttactatgacattgatgagtggattagctcttagcaagatgcattatcttgcccattttatagtatatatacactacactgatcagaagatatcattaggatcttacgatgaaaattattgatcgaacatgataagacaagcgttattaattatcaacctaaagcaccaaagtgtactgatcatttatagtttagcagtaagcttgtagacttctagtttggttagttacacccaccgatatgacaacgatataataactaggaattgcatagtgttgtatttcagatatacatcatgcaaaactagtactccataagatatgcgaacgtggttgcgaagcgtaacagtaggtcagatcgatccattattaattacacagaaagaaatatctagtatactttataaaccaaacttgaagaatagccgagtgtatctgcacgcttctaaacatgacatccatcagcaaaattgcaaaggacggctgcaaattaaaggtgagatcaccaggctacattcattaattacctatcagtccagcacgacattttagagcatcatatcgatcatatcttgctataaaattataacccactaatcttaaagatcaatatataaacatgtcacatcattatccact

SEQ ID NO: 8281 - DNA, 63784 bp, Oryza sativa
ctcgtccagtcatcccacgtcacccgccgccaccgcctccgcgtcccccgccaccgccgtctcctcgtccggttgtcccacggcgccgcccaccgccgctgaccccgtgagagagagagggagagagaggaagagtgagagagtgtgtgtgtgagagagaagagagagttgtgtatgacaggtgggtcctataatttttttaaaatagaatgttgactggactgccacgtgtactccacgtagaccaaaatcaccgcggattgggtccaggagggtaattcatcatgtattcatagttgagggtgaagaatgttccgttttgcggttcgggggtaattcggacgaccgtgatagttcgagggggtaattcgtactttttcctatatatattattctctttaactacaaaagtacaagtgcacgtgcgttgcatgtttctagctcagctctacagatttaattagagatctcttctaccggtttgaccgataacacaaaagacatgtctatatataacttcttattttctccgtccaaaatagatataatatatagttacatttatcttagaaattttgtatttttcaaagccacttctcttaaattttggagtttacttccgcacgccagctcgccattggcagagataataacgtggtctggtcctatttcgaacaaatcttaaactaacgacactgcactacacgcttgatccgaaagttgaccttaagcacctaattaattcattaattagtcggataaggcctaagaacagtttaataatatagccaacggctggctctaaatcatttatagtcaacttaatagccaatttatatattaggtatttgtaaacatatactacataattaatatctagtctcacctgtcatacacgcatgcatcttggagtccgtactataactgtctataaatctgtatgttttatcttctcgaaatctgtttatagttgatttatagtctgctagtgtatatgctgtaagcatttctagtaaggaaaaagtacaccggaggtccctcaacttatcatcgagttacaaaaatcatcccccaaccacaaaaccagatatatgacatccctcaaattttaaatccattcattttaggtccttcagtggttttgaccctgtttttatacgacgtggtggctgaatcaccatggaacccacgtgggccccacctatcaggatgccacatatcatcctctctctccttcccctcctttcccttcctcctctctctctgtatctcacttttctcctctagcaggctggccggcgggtcgtgaggaggtcgccgggacgaggagggagaggagaaggaccgacggctagcaacaggcgacgcgggaggaggccggttagggaggaggtcggttagggcgacgacggaggagcgggggcggtaggatcatagggccgacgggcggtggccgcgtggagaaagaggcctccccacctcctccctccccgtgcgcgctcgccgctggactccccactcccctcagcggccgtcccgctcgtggctgggagggcaaggtggaggaggtcaccgtcggtccaaagggaggagacggaatcggcatacctcaacctgggcgtcgccgccacctccaactctacctcctggatcgtcgagacgaagatgtggccgtgcaaatttggtagcttagcgacgtctgccggtctccaccgtgggaggaggcaggaggaggacccaacgccaacgagcgcagtggtgggagatggcggggcggtggccgtcatcgggcgacgacgcctgggcgatcatggttcttgatgacgaggtcagcaagggaggtcgggaagccagtctgcacgggggagggccggcgtgggaaggtggatggagggaggaaggtgaggaggcgaacgagaggatgcggcggaggagggagcggaggaaatcggaggcgaaggcctcggcgaggagggaggaatggacggcgtcattgtggcggtaggaggagccgtcgtctccccttcttgcgcatcggccatcgccggccgcagccgccctagcatcggccgccaccggccaccctccctctcgtcttctccggcggtaggaggagccatcgtcttgccttttcccgcgtcggccatcgccggccaccgctggccgccctccctctctcccaccttgtgcccgtgggccggcctacccaaagaagaatgagagagagagagagagagagtaaccgagtaagggagaagagaggatcaggagagatgggaaaaagagtgagtgatgacatggacacactgacatgtggggcccacgccgacttagccatcacgtagaacaaaactagagccaaaaccaccgaagaacctattgggactagttttgattagttaagggacgccggatatctggttttgcatttgggggacgattttgtaactcgatgacaagttgaggaccttcggtgtactttttccaaaatatcatgtcttggccaggcccatgcacaggcccatgaatcggtcgagccaaccttgtgataatgtgcagggttgcgtgatgataactccacatgaccacatgcgttgcagctaggacgagcgagacttaacgggaaactattttgatttgtcgagagaatatttcctcattttcttaaaaatcatgttatgaaaaattctaaaaaaatttgatgctactcatacaacatatctatacaactccacaaaatctcaggtttgaattcatctcacacgtcgagatataaaaaaacaaattcagcttatgaatagtagcatactattcacatatgcatttttttccttgagatgtacattgaatttgaatttgatttttgatgtatcgatagatatcatcgtacaactatttgtatcaaatttagaagaaaaatatacataagggatatcctcaagtgattagaatccactctcgagttaacgggcacacataataagatgcacgtattgtattgtccgttgcctgatgaaaacgaccccacgctagctttgcttgttccgcagacatcgtcctgatgatctgtgctatgaaaaatataatactccatctatcactaatcacttaccctaatccatttcccaaagcttccagtgtcagaaaagctatatcctagtatatggactctggagtagtactatgcgagtattgaaatgtatggagtacatcaatcacgcattcacgcttcgaatgaagcaaagaaaattcgagagagcaaaaattgtctacagagcacagtaacatatgtgacatgtgaacctgtgtggctgtgtcatcgagcgtgcgcagcgaggggcacggcctccgcgagcggcgtggccatcggcgacggcagcggcgagtcgcggcacaccgggcaggtggcgctcacccgcagccaccgctccacgcactccgcgtggaaccggtgcccgcacccgggccctcgccggagcgcgtcgccggccacgaactccccgaggcagatggcgcactgcgcccccgcgcacgcgttgtcgtcgtcaccgacgccgacgtgtaggaacttggggtagagcgcgtcgatggcagggccgtcgaggcctagcaccacgacggcggacgctgccggggcgccgccgtcgtcgtcgtcgtcggcgaggagcacggcagctgcgccggccttggcgcggacgcagatgtaggaggcgagcatgacggtggagatgaagacgaggacgccgacggcgatggcgatgccgtagccgaggcacacggcgccgccgacgtccgctgcggcgggcgcgaaggaggcggcgtcgggcgaagatgcgggcgcgaaggagatgggcgcgtgcattcgtagcagcagtcgcgcgtgcatttcagtgtgagcaaataaaatggaagagatggagacagcagctgcagggaagtggggcttgcggctggacagtggcacgaacgagctgcgatgcgagcggcgtatgagtcggaatggcgtgacaaaatttaaggcggagttggtagaagctgatccgaatcgattctgaatttggatggcgagagtgcgtacgtgcagtggcagtgagagtgaagtactgaaggtgaaccaggaattactcggatcacacagccacatagattactaaattacagggcttatagggttacagcaacagttgatatattcttgcgcaaatgctcaccgtgcaatcacgtggctcgcgttcatcgtgatttatgaagcaggaagaggaccacattgcaaattgcaagcttgaacaatgtaaatggagtacaatcgtaaatgaatgtaagcacaagtaatcactcgaggcgggacgacagtcgagacagtaggttgttggcatcacaggaagccacagagaagtagacaaccaactcgaatcagttcttctatgggaccatgaatctgaccacaagccccacggccctccgcgtgctgttttctgcctaaaaaatgctccaggaaacggatcataaatcgctatcagtcgaataatcactcgtataatatttgcgtcccataatttgcagaaaatgaataagaactgtactccagtttgaatccaagttatgtgccaatgctaaataacaactggagaaaaaaattgtaatagcatccgatcaagttgctgttcaacaaacaatcccacgatggcgccatgttacttgacattagcatcaatctatcctatccacccaccaaatagcgcgaatctcactgaactgcggggaccacatctaccaacattctcagcactcgacgccggcgcacgcggcgcggcggaaccctggcggcaggtccggcgcgcggctccacttgccgccggcgatgtcgtacaccagcaccatcccttccaacgcgccgccgccggcattgtgacccctcacggccgcagcgctcaccacggccgccaccctgttggttcctaggccggccatcgccacgcgcaccgccatgccgagccccaccgaccccctcggcatcggcggcgcctcaagcgccacccacccgccccagcctctgccgtcaccggcacggccggtggcgccgcaccacctccagaaggagagctccaccgcgtggctcgccaccatgtacaggtggtcaccgacgccgcacgcccccacgacgcagccgccgccggggagcgcacgggggcgcgcccaggcgccggacgcgacgtgcagcgcgtccaccgacccggcgcacacgtgcgcctcgagcgcccgcgcgccctcgccggacaccgcgacgcccccggcgacgtagaacacgcctcccgcgctcgcgccggcgcacccgtacctccgccgcggcgcctcgccgaccacgcgccacgcgtcagcctccgggtcgtactcctcgaccaccgcggtgcgcgcggacccgccggcgacgtagatccggtcgcccacggcggcagcggcgaacttcttccgcgggaagagcgtgggcgcgcacgcgcgggccgcgccggtgagcgcgtcgacgcgcagcgtcgccccgcggccgatgaggaagacatcccgacccagcacgaccgcgcgggcgtgcgcgaacacggagccgccgcaatgcagcagggtcgggggcaacggcagcgcggcgacctcgagcacgggcacggaggattcaaaccggagcagcgcctgcgcgatgcagccgttgtcggagacggagaggccgaggagggaggggcggaggtgggcgtgggcgcggcggaggtggaggaaggcgtcggaggcgaggagcgtggcgaagcggcgggagacggcggggagcggagggatggaggcgcgggggacgcgggcgaggcactcgaggaggaggtcgtcggggagggcggagattgggggtgccggcggcgacgagggaggcggcggttgcggggtggggcaaagaacggggacagcgatgtggcgggcggggtcggcggggatgcaggacttgacgagccacgagaggctgcgggagtggcagctctcggcggcgggcatggcggattgccggattgggagctcagctgctgctcggggagcgaggtgggttgtgattggacgtggggaatcgtgggaggtggagtggagtggaggggaagtcgttgggcggctgggctcgtgcccccaccttgtgcggggcgcagcaacggcgacggtggtggagccgttgcttttctttgaaattcgaaggtttgggtttaaaatttgagcgttttgaattggttaggtcagctttggcctgtaggaataacagtgtacttcactttacatcatctgatctattatatactaaaagtctattaaactttctacaaacgtcctcaaacggccacgtggactcctacaaacattcctagaccaccacgtggcactttctaataatttatagaaaaacaaagcatctcaccattaattttcatttaaattggtggatccattagtatacaccattagattagatctattggataaaattaatcccttccaccaaatctcgcgtgtatacaaacaaaatacgtaactatttcactgggaaattttaactacgtatttacgtacgataaaaaataattaaagctggcgaactgttcaccagccaaaaaacccaagaaaccatacgtagtacgtacgagtagaaaaagttaaagcccaaataaaacatgtatacgtgcgttagtgccatcgggaaaaaaggacggtctatataattttctataatataaaaataaaacatattacttctaaacatacacccatgtttaaaattattttttaaatcagatattcaatttgtgatcatattgtattcctctaattaaatgaactaccgtggacttatagtaatgatattataatgttaaatacatcacgacacataagaccgacataaaataattaatttcatgatatttttttagataatatcacaacatattttagagaaaattttctatgtgtccctaaagttttacccaattccttctttgctcccaagttttctatcgcatggaaaaattctttctttactacaaggtaatgtgaaaaatactataaaaaatattttgagtcaatgatctttccataacacaagcaccttaatccataacaaggattatgatggtatatgtatgattttttttatgcataatagttttagctataaatgaacagtccaataacatgcacattaaactactcatgatatattttattattgttgatgaattctaatatgtcgggcataatttctagatgtatgccatatcccccgctaacttgactataagtgcacttgaacaaattaattatgtaaataagtttgagaaaataaatatattcttggaattagtaaaagtttttcatataattacgaacaacatgtgttaaaagcaaattttgccaaaaaaaagatctaggtcaaaatataaataataatgataggatgctctatagattatcatcgtgatatgtctctttatatataattttttaagcacagtcgaatgatcaatcatgcttatcttcaaaacataatattgtatctataaaaaatattaaatagtactgattaacactataaacaaatcatgtctactttataccacaaatctactcaaaacgtaaataaaactatttctgtgagaaaaactatttttatcatctccatcatctctcttgtccttagttgaaggacatcaaacatggatgagaaaactttctacgttgttgtaagcgttagcaaaggcttacatttggttgagttgaggtggccctattggaggctactgttggtaatagtgctcaactttctacttaccattgtaatcctctatgagcatgccgatagtgatttaggcgttaaattgccctcaacgccaggtttaagtgacatggctacatggatgtgtgagaaagaaagcttggcggctacggcaagcttcatccgttagaggggttttacgtcaaattttaacggtgttattccattaaccagtagaagtggtattcttacaataaatatacatggatttggaaataagtgagacctgaacactcagattaatggtaaaccttttagtatattaataatgtattaggcttaattttggtgataggacatatgcaatttcatccattaaataggcccaggttttaaaacaatgataataaatagtcgtgataatatgggaatttatacataaccgggtgaacgtcatttttattagaatctgggagaaattattatcatctaacatatctagggtctatttgacaacgtagatacttttttattataaggtaataacgaaatcttataataaatatgtttttttagcgttgtgttcatgaaatagtaaataagacacccgcgcatttgtgcgggcttcctttctagtttcatttaaaaatagttttgaattggttagactagattatctgatcataatttagttgcccattctgaaatgtttggcttgaccaacacgtgaagaggaatacacaagactttacaggcagatcaacctgaccacgtacagtacaaacgattcaccgtctagcgcacatagtagcttccaaagttccaatgtgtgccattcagcgatcagcactccatcgttttttcatgccctaaagttgaacatgcaaatacacaagacaagttagtgctttatggtttatggaaagggaagggacatagagcgcaccagtaaacggtaaagtgcattgtcctgagctggtggttaatggccatcatcaaagttgatggatgcaaatcaccaaagtcagaccagattggcagtcaattgtgccaaggaaaaaaggacaacgattatggttaacacgagtgcaaagaatagaagaatgtaagaccaagtggcatcagaaagcatcacatgattcgttcaaaaaaagaaagcatcacgtgtgtggtttccgggaagctgcaaatcacctgcaaactcaactagctgcagcctccttcagatacatatattctcctctctgtagtccgtagcagcctggcagattgcagatgccagtaccaaccacaatgactcaatgagcgagcggacgattcctcctcctgtgtcgtcgcatggcgaggacttcgccgaggttgtggtggtgcgccatggggagacatcggcgaacgccttgtgcatcattcaggtcggcggtcttgtcttccctttgttcctgtcaccaataacttgtccttttcaatttttcttgagaattatacttggttgatggccttcttcagtcaatagctcttcagtcccctcgtcgtcattccatcaattttctcgagttgacagatcatcagaacaattttaacagggacaaatggatatagagttgaatgaggctggcagacagcaagctgttatggtgagctttaccaatacatttcaaataatgaaacaggattgtaatttggggttttgtctgaacttggaattctattatcgaaaaacctgaacttggaattggtgctaacgtctaaggttgctcgtcggttggctaaagaagctaagccagttgccgtgtactcctctgatctgaagcgtgctgccgaaacggctcaaactatagctacagcttgcaatgtgtccaacgtaagtacatgcattatatgctgaagcttccattttccagtggtaaacttgctatgtttctcatttgatttgctttcagctggtgttgagtcctgcactgagagaaaggcacatgggagatctccatggtttgaagtttgatgatgccgtcagaagcaagcctgacgcttacaaggctttctcatctgaagacagaagccaagaaatccctgtaactttcatccttaattttctcaccaacttcttaggcttgataatgattggcctaacattagtagatgtgtttcgaacaattttctgttttgacagggtggcggggagagccttgaccaactatctgagcggtgtgtttcgtacttgaacacaatagctgggaagcacaagggtaggcagtattgtaatattctcactctgaagtttttgtatggttgacagaatagtgaaatttgcttgttgagttagctatttcaaatctggtaagcatgctattagtaaagtgaaagctagcggtgcaaagaaaattcagaatgcacctgcacattcttatgccgagtcattcaagcagttgctcataatacacagaaaatgaagttattatgtatgctgcattggcaggggagcgagtgattgtggtctcccatggagcgagcatcgaggaactctgcagacacgccgatccaaccagctcagttcgcaggagaatcccaaacacttcgatctgcgtcttcaacatttctggctccaccggccattggattctcgagaggtttggagatgtcgcccatctcaacgaagacgacttcccgtagaatgcatttggtggcgatgaggcctctacgtagtgcctccaaccaaccaaccaaccggcttcttgggccatttcatgaatccgggcatgaactgttatctgtttgtctctcttttctctcaatttgacaattgtagaactttcgtgctaactgagtcacatcgcataactcacgaattcacaaattgtaattgcttgattgaaactagctactggacttttcatatttagtactagttaaatagtcacacattcgtgtgactataacctcctgctctgctagatgataatcaaccaaacttttggtttccaaagtatgacaatagaaacacggtcccttgtatatgattattcgatttgctggtggctttgatctggggattagtcaagcacctcagttagtggaaaaaaaataatcacgttcagaatccaacccaggcaaggaccgaagcattaactccgattgtggaatcattcataaaactaaaagtccttgaaaaaatttcaagcttaattagaacagaacatgggatatttatttaccagagaagtaagaaaaagaaaattgataggggctgaagtaaaaaacagcaggaatgcagacatgagaaagaatactgataagggccgaagtaccaaatgcttttattgctaatttggatgtcttaataccctgaatatgtgatgtcacatccgcatatcggcatgagtttcaaaaaacattctcctgcatgtgtgcgcctaaacagaattagctgcttaatgagctggggttcaccacccaggataaccttcactaagctccgccactagacggagttagtacgaaatgaaggggcagagttagtacaaaataaaagggtatcactcctttattttactttaatttggatcgagttaaggctgatgtaagtatttaagtttggacagagggtgcaaataggatggaaatatatgaagtatagattaaaaatattttgaaccgggttgttaggcaccccctcagctccactctacgaccaagcaaccgtctggtctactattcttgatccatttcgtgatttcagacatgatcaaaccatccgattatctttctcttttgcagtacaaatacaaatttgtcggtacggcagcacagtactactgtgtactagcagaaaatgaaatcaatagagttgctataaaacattgaccaaggtctctcccgctccccgctctatagatacatgtccatatcgtccgaagcttcctactcaaacatttctcaattaacctccattggattaaataattgatcttcgagttggtcttctgaagtctgcaacgcaagtccctatcttgggcaacaagaacaaacaatttggcatacatgtgccaatccatggccttacacactctttagtacagttcacaatattttagcattcatctcagagtaggactttcaattaaacagctcaacatctctgaactctgaagcgtagataggcagatagctcaacatataaaagcagtagcaaatgcatgtccatatatgtcaaccaacagcgaaagtagcaattaattcagtcagttgaaatggagttctacgcctattccatgctcctcatcctgcctctgatactgtacatgtcctaccacctcacaagaaccctagccgagaagaagcccaccacccatggcctcaaggcacacccgctgctcggccacctaccggccttcgtcaagaacagccaccgcttccttgattggtcgacggagctcatcgccggcagcccggagatgaggattggattgtggatccccgggatgcggagcggcatcgtcaccggcaacccggccgacgtcgagcacatcctgcgcaccaacttcgcaaactatcccaagggccagcacgccattggcacgctcgaggatttcctcggccatggcctcttcaactccgacggcgagcagtggctctggcagcgcaagaacgccagctacgagttcagcaagcgctccctgcgcaagttcgtcgtcgacgtcgtgcaggccgaggtcgccaaccgcctgctcccgctgctccgccgcgctgccggtgatggtgtcggtggtgatgccgtcgtcctcgacttgcaggacgtgctccagcgattcgggttcgacaccatctgtatggtggcgttcgggcatgacccgcgctgcctcgccgacggcggggtcctggaggaggccaagtcggagttcatgcacaacttcggcgaggcactggacctcgtcatcggccgcttcatggaccccatcgaggtctcctggaagatcaagaaatggctcaacatcggcaccgagcgccgcctgaagaaagccatcgccgacgtccatgccttcgccatggacattgtccgcgcccggcgccagagcgcgtccgtgaaagacagagacgacgtcttgtcaaggttcgtggcgagcgacgagtacagcgacgaggtcctccgcgacatcgtcctcagcttcctcgtcgccggccgtgagacgacgtcgtcggggctgacgtggttcttctggctgttgtcatcccggcccgacgtcgtggcgcggatcgccgacgaggtccgcgctgtgaggaaggcgaccggcacgcgccccggcgagccattcgggttcgacgcgctccgggagatgcactacctccacgccgcgctcacggagtcgatgcggctgtacccgccggtgccgaccgacccgcagtcgtgcgcggcggacgacacactccccgacggcacgttcgtccgcgccggctggttcgtgaactacagcgcgtacgccatggggaggctcgccgccatatggggcgaggactgcatggagtacaggccggagcgatggctcggtgacgacggcgcgttccagccggcgagcccgttccggttcacggtgttccacgcggggccgaggatgtgcctcgggaaggagatggcgtacgtgcagatgaagtccatagttgctaacgtgatcgaggagttggtggtcgacgtcgtcaaggaggtcgccggcgggggcgttccggagcatgtgttctctatatcgctgaggatgaagggtggcttacctgtgaagataaggagaaagggtgaatctttttaggggatggtttggtgattcttgcaactgaattaacaggagaactatatatcttagcgctgtgtttcttacttgaacacctgttgttgaaagatgaacgcttgtgccggtcgtttcgaaaaaacttctatcggtagcgtgttaccacttactccctctctcattttaaatgtagttctgattttttttttcaatctttgaccgcacgtcttatttaaaaatttatatatttttttaaaataagtcacacataaaatattatttatattttatcatctaataagaaaaattttaaataggattgacggtcaatattagacataaaaactcacaactgtatttaaaatggaacggaacgagtaccactttccttatacggttgtgttcagcagtggattttaccgggtttgtgcacgaggaaaacgtggtctcttgcttttcactcatcagattttgtttattcgtactgcgtcgccatccttggatagtggttacaaatactgaaatgacccaatagctgatgttacgtgtggtccggcaggacatatgcgaggcactgttcgtccaagcattcaggccgcagcacctggtccccggtggctgaggctagcagccaccctccgccccatctcgccggcgacggcggctgtcaggtatcctctgttccctctcgcctgcggccatcaggtgtcagctgtcaccatggcgaaggaggtcgatcggttcgtggagctggtggttgtccggcacggcgagacgtcgtggaactcctcccgcatcgttcaggtcggtagccaacaccaagcatctgttgctttatccttctgacgattcgttgtgttggaaaaatgaaaatacatactcctgatagaacactgaacttctgcaataggggcaaatggatccagagctgaacgagattggaaaacagcaggctgttgtggtacgatacacactagctcaaaatttcgaagcagaaccaccaatatgtggatttatggtattaccagcattggtagtttaatttgatattttctgtctgaatgaatcgatctgatgcgaacttacaaggtggctcgtcgtcttgcaagaaaagctaggccagctgctatatactcgtctgatttgaagcgtgctgctgagactgtaaaaatcatagcaaaagtctgtgatgtatcaaacgtgagttcttctagcctaccttttcctgctttctcctccatgagtaacaccaataatttgttccagttagtgttgattgaagcactaagagaaaggcacatgggatatctgcaaggtttgacgtgggatgatgctatgaataaaagcccaggcgttttcaaaggctttgctaattttgaagtcaaaaatggtttggactttgatggcagaaaccacgaatttccggtaagttccaaaccgtattttttctttggaacacttataacccgagaaatgtaactttgtctaggtctgttaaatcagaagtggagtgagtgtataccattttgtagcactagtactatataacttttgaaaagtttatcattgtttcaaatgatgtttaggatggtggagaaagtcttaatcagttaagtgagcagggcatctcctacctgaacaaagttgctcagaatcatatcggtaagtatcaaactatcataaaaaaaaatcgaacttttactccatttcatttgtgtatgccattgtacaccttatcctgacaagctgctatcctggaaccttaaagatgttttgctaatgttgcattgacaggggagcgggtgattgttgtcggccatggtgctgccatactagaactctgccggcacactgatccacccaacagctcgattcgtaggaaaattcccaatacttcactgaacattttccgcatttccggcgtcaccggccggtggatccttgagaggtgtggagacgtcggccatctcagtgaaaatggctttctggagaacgcatttggcggtgatggagcctctgcctaacacattcagcgactcatcttgtcagtgtattcagtgattcaatcacccatgacttgaagtctgaaacatttttcgtttttctgattgctattttcttcggtgtgataatcatgatgaattgatcataaactactcgttgtttcgtcgtgttagctgtatatcaatctgcaaaacaatcgcaaaaaggggggaaagatgcaaatctgaagggaaaaaaaaggctaattcggatgtcctcccttagactgaggaccggctctctgccgttggatgatcttctcggtactgtagcattgcaattgaacggttaagattgcgtttagatcgtcaggtcaggagcgtctctgctgttttaaggccggcccatcggttgctgcttctcgcctccgcgtttcctcaccccgccgccgcagccgcagccgccgccgccgccgtcgccgtcgccgtcgccgtcgccgtcgccgtcgccgccgccgcagccgcagccgccgtcgccgtcgccgtcgccatcgccgccgccgcgtcgtctgcgtttcatgttcaggctcctgccccgcatcaccccgctcccgcgccgccgcctccgtcgcagccacaacccaaacccactaatctcccccgccgtcgctgcttccctcgccggcgtcctcgccacccgctccacgaaccccacctgggcacggtccctcgcggcgctgctcccctccccgctctccgacgcccacctcgccgccgccgtctcctccctgcccgaccccgacctcgccgtcgctctcctctcctggtcacagtcccccgaccaccatgtcgccctccaggaccctactcctctcgcccactccacgctgctccgcctcctcgcccgctcccgccgtttcgacgccgtggacgacacgctccagtctatgtctctcgcgggcgccgcgcccacgcgcgcctgcctcggcgcgctcgtcgccgcctacgccgacgctggcatgcttggaaaggccaccgagatgtgcgagcgcgtaagggagcagtacggctcgctcccggaggtgacccattgcaaccgcctgctcaagctcctagtggagcagcggcgctgggatgacgcccgtaagctgtatgatgaaatgcttggcaaggatagtggtgcggataactacagtacttgtgtgcttgtccggggactgtgcctggaaaggcgagtggaagaggggttgaaattgattgaagcaaggtggggagctgggtgcattccacatgtagtgttctataacgtcttgatcgatgggtattgccggcgtggagatatgggtagaggattgttgctgttgggggaaatggagacaaatggattcttgccaacccttgtgacatatggttctcttataaattggcttggaaagaagggtgatctagagaagattgggagtttatttttggagatgaggaaaaggggattttcccccaatgtccagatttataacagtgtcatagatgctttgtgcaattgccggtctgcaacacaggctatggtgatcttgaagcagatgtttgcaagtggatgtgacccagatatcatcacatttaatactttgataactgggctgtgccacgaagggcatgttcgaaaggctgagcattttttgagggaggccatcaggagggagttgaacccaaatcagcttagctacactccattgattcatgggttctgcatgagaggggagttgatggttgcatcagatttgcttgtggaaatgatgggcagagggcatactcctgatgttgtcacatttggagcactaattcatggtcttgtagttgctggcaaagtcagtgaggctttgattgttcgtgagaagatgacagaaagacaggtattcccggatgttaacatatacaatgtattgattagtggtttgtgcaagaaacgcatgcttcctgcagctaagaacattcttgaagagatgcttgagaaaaatgtccaacctgatgagtttgtttacgccacattaattgatggattcattaggagtgagaatcttggtgatgcaaggaaaatattcgaattcatggaacacaagggtgtctgccctgacattgttagctgcaatgccatgataaaaggttattgtcagtttggaatgatgagcgaggcaattctatgcatgagcaacatgagaaaggttgggtgcatcccggacgagtttacatatactacagttattagtggctatgctaaacaaggtaaccttaatggagctctaaggtggttatgtgatatgatcaagcggaaatgcaagccaaatgttgttacatactcttcattaataaatggatactgtaagacaggtgatacagactctgcagaaggcttgtttgcaaatatgcaggctgaagctctatctcctaatgtggtaacttataccatcctaattggtagtctgtttaaaaaagacaaagtactcagagctggtttgtactttgaaaccatgttgcttaaccattgttctcctaatgatgttaccttacattatctagtcaatgggctcactagttgtactccttgtgtcatcaactctatctgctgtaacactagtgaggtgcatggcaaggatgcccttttagtcgtattcaagaaattggtttttgacataggggatccaaggaattcagcatacaatgccatcatcttcagcctgtgtagacataatatgctcagggaagcattggattttaaaaataggatggctaaaaagggctatgtgccgaatcctatcaccttcctttcacttctttatggcttttgttctgttggaaaatcagtgaattggaggaccatccttcctaatgaatttcagcaagaggagttcgagataatatttagatacaagtttttgtttgaccaatatgcaactgagtcagtttgctgtgaagtctccagggttttacagcatcttgcagggtgtaaatccttgcagcgtgtggagcagaaatttgctaattcttgatgcccgtctacctggctcttgtaaatgagggagatcatttattcttttgtttggccagaaaaatcaccagccaaattcattatgaaagaaaggagagtgtagggtacaaagttactgcaacaaggttgttgttacggcttatttgatttttttacttcagcaactggaggttgaaagatcaggaacgttcatagtaccatctaactggaggagtggtattaatatgaccaaatctcccgcagagatctccacccaaaggtattaatcttgctatgactggtcatatgtgattttagattatgcttgaatctttgatggttgaagactcaaaagtttttctgacaactcaactacaggaaaattgaacattagaacttctaaaattccatgtgctagttccccttctttaaattgtttactcaactagacttgctagaggaaacaaaaaaaacatactactggtgtcctgtttctgtaaacatagttatcttctcattcacaattcattggcatcattcgtttggaattacatgtgaaaggaaaatgttgcattagtttcttgtccatgttgatgctgtgtctgaattaatatttgctgttgttctcaaggtcgttagtaactaaattatagtatgtttttatgttgcagtaatcattaacctgtaactgaagtcatcagtcgacattgattttttttttcattttactctgttcaattcttcagtaacatatcaataaatgtaagacttatgaaacttcgaattcgtactggtatagagctttcgtgcttgcactttagttgcctgtcaagcagaagcaatgcttatgagattcttactgaaaaataaataacttcttgctgcttttcaggtgaatttatttaaccctatgacttttccatggttagtgtctccaatggccactcaactacagttgatgctattgtgacactgcaagcaagattatttggcaggatgcgcaggtgtaaatcagactgcaatgtcgcttaagcgcaggaccgtcgtagcaactgcagctagatcatactccctccatcccataaaaaaccaacctaatacttgatgttgacacatcatagtattacgaatctagacatatcgctatccagatacgtagtattaggatgtgtcaacgtccagtactagattggttttttatgggtacgcgatttagaattttgttgtccttctatcattcggtataggcgacggttgcagacttgcagatcacaacaccctccgtcagaccatcactcagtaagtatgcaggtagtttcttttagctttaggtgtaggagtgcaggacattgtatagcttacacgtaattttacatgtacaaacactcgttggtatcatgacaaatctggaaatcttgccgtcttgctcatctagaacaatgccattacaaagttttttttatggccatgaccgacattttgggtgctgcatcatcactatccactataggagtcccatgtctcagtattttgtgtattttctgcacaaatctgctcaaatgtgtcattagttttctgcacaaatctgctcaaatgtatcattagttttccgcagaaatctgctcaaatttatcattagttcatcagtaatgtacttacagtattcatttggcagtaagaacaacacctgaaagttggtcaaatagttgcttaaacaggtctatttgtgtcttacatggctgatttcaacttgttaaatttgtacaatacagtgatacgccatccttttattgattaattggcatcaattcaacccagggcaaatcatttttctgccgctgtagtccagtaggaaatggaaaacggccaaaaacaaccaaatcacaaacgttattcttaacccataagctcaaaacgaaaagagcaaaacttgaagcttaactaattatagtaccattcagcggcaaagtacccttgtggccttctctagtaagcttcagtctttctcctaatcttcacaggtagtccacccttcatcctcagcgtcaccgagagcacgtgctccggcacgccgccgccggcgatctccttgacgacgtcgacctcgaactcctcaagcacgtttgcaactatggacttcatctgcacgtacgccatctccttcccgaggcacatcctcggccccgcatggaacaccgtgaaccggaacgggctcgccggctggaacgcgccgtcgtcgccgagccaccgctccggcctgtactccaagcagtcctcgccccagatggcggcgagacgccccatggcgtacgcgctgtacgtcaccgaccagccggcgcggaggagcgtgccgtcggggagcgtgtcgtccgccgcgcacgactgcgagtcgatcggcgccggcgggtacagccgcattgactcggtgagcgcggcgtgaaggtagtgcatctcccggagcgcgtcgaacccgaacggctcgccggggcgcgtgccggtcgcctccctcaccgcacggacctcgtcggcgatgcgcgccacgacgtcgggccgggacgacaagaaccagaagaaccagctcagccccgacgctgtcgtctcgcggccggcgatgaggaagctgaggacgatgtcgcggaggacctcgtcgctgtgctcgtcgctcgccacgaacctcgacaagacgtcgtctctgtcttgcacggacgcgctctggcgccgtgtgcggacaatgtccatggcgaaggcatggacgtcggcgatggccttcctcaggcggtgctcggtgccgacgttgagccacttcttgatcttccaggagacctcgatgggatcaaagaagcggccgacgacgaggtcctgcgcctcgccgaaggtgtgcatgtactccgacctggcatcctccatgacactgccgtcggcgaggcagcgcgggtcgtgcccgaacgccaccatacagatggtatcaaacccgaatcgctggagcacttcctgcaagtcgaggacgacgatatcaccaccacgaccatcaccggcggcgcggcggagcagcgggaggaagcggtcggcgacctcggcctgcacgacgtcgacgacgaacctgcgcagggagcgcttgctgaactcgtagctggcgttcttgcgctgccagagccactgctcgccgtcggagttgaagaggccatgtccgaggaagtcctcgagcatgccaatggcgtgctcccccttgggatagttggcgaagttggtgcgcaggatgtgctcgacgtcggccggggttgccggtgatgatgccggtgcgcatcccggggatccagaagcccatcctcatctccgggctgccgacgatgagctccgtcgtccagtcgaggaagcggtggctgttgttgacgaacgccgggaggtggccgagcagcgggtgcgccttgaggccatgggtggtgggcttcttcttgtcggcgaggattcttgtgaggtggtaggagacgtagagtatcggagggaggaagaagagcatggaacagtagtaagagtccattgccattgatcgacttggtagcaagctggttgatggaagaggagtgttcacctggcattatatactgggacactggatctccaaagcaatttataattgcaatgtcaagtcgattaaacttctatcaatccactaattaattactttgaagatcaatgcaattcttaaattatacgtatattgtgaagaaccgtgtgcctgaccatgatagggataggcacatgagtggcaagttgtttcggcttgttagccaagacagggccttgcgttgcaggcaatactagttaaatccagtggaggataagaaatgttttaattaggaaccttctgatgatgaactgccctgctatacatcgatgagaacatgattctacttctatatcgatggcaatatgcttacaagttacaaacggatctgttggtgaaccgaaacataaatagcatcatcagcagctttgaacctgctgctgcttgggcagcgcgtagcggcagagaggacagaggcagctttcgctgagccaacggaagaggcagatctcgtggaaggagtggttacacggcatcgtcctcagcatgtctttctcctcgaagtccctgaggcacacggcgcactcctcctgcctcgcgtcgcacgccttcgtcagcgcgaggcccaggaggacatctcgcgacatcttgcatcggggcatccccgtcggcggcgcggcgacgtcgtcctagcatgggcgaaggacgaggcctgatcactcggccagcccagtacacctctccctggtacacccctcgacggaactcttgtagcatgtcgcggatgctccgggcatcgctgttggggtcgattcctaggcgttggagcgtgcggtggaatctcatcggaactcgcgctgccgccgctgccggatccatccatctcccggcgctacggactacagtgtggatactagggtcgacccccaattctcggagtaggtcttcgaatttttctgccgcgtatggatcagaaagtggcgccgccaactgcgccgccgcccgagaatccatcaatctgcgagccggcggatccatcgcctgcagcagtcagaccagcttttgcgttgttgcaacaactggatgagtaccagattttattatagtggacgatgtgaggcacaacgagattgattaggactcggaatcgatcggagtcggagtaatccattcccgcgcgcagcacagcgcggcgcgtgccacgcaatctcgaccactgtctacgtatacctgcttcatctgaacgtatatacgtccggttcctagtactcgtagtaggtatttttgtctcccgtacaactgagacccctcgcacgtatgcacggttgaatttctggcagctcaacaaatcaagcattgcatgcctcaacagattggcacgcgtacgcacacttcaaatgttaatagcaacacagctgagctagtgacatactgacatatatatacgcaagtggcggctgccgtgctatatatacatgaaccactgccaccatctatccatcacacaaaagcatcatctatctatctaaccagagtgataaaatggaggtgcaggtgaagaggagttcggtcgtgccgccgccgccgcgcgagacggaggagacgccgctcaccgtgttcgaactcgtcgcgccgacgtaccacgtcaccgtcctcttcgccttctcgccgcccaacccgaccacccgcgccctcctcgacgctctctccgccacgctcccgcacttcccgctcctcaccgcgcgcctcgaccgccgcggcgcccgtcgccgcccgttcttcgtcacgggcagaggtggcgccggcgcactcgtcgtggaggccgaggtgtcgtccgacctcgctgaccacctcccgctcgcgccgtcgccggagctcgcgcgcctccacccgccggtcaacacggacgcgccgacgccgcatgtgctgctggtgcagatcaaccgcttcgcgtgcggcggcctcgtggtcgtctcgtcggctcaccaccaggccgccgacgggttctccatgagcaccttctttcacgcctggaccgacgccgtccgtcgcaacggagctccgctgcttgaccgacctgtaccgtacggccccggcgcgctctcgccgcgccggccgccgcggtgcgagttcgagcaccgcggcaaggagttcttgccgcacgacggcgtcacgagcaggcaaggacaaggcgccgacaccggcgccgtccgcatcgacccttccgaggtcgccaacgtgctgctgcactacccgagcgagttcgtcgccgagctcaagcggcgcgcgcagggcaagtacaccacgttcgagaccgtgtcggcgcacgtctggaagaagatcaccgccgtgcgcgggctcgacgccggcgcgcgcacgtcggtgaacgtctccgtgaacggccgcgcccggctcgggacaggaaccgtgccaaacggcttcttcggcaacctcatcatcaacgcgagctccggcccgacagcgagggagctgaccaccggtactctcgcggacgcggcggcgctgatccgcgcggggatccgcgccgtcgaccggcgctacttccagtcgttcatcgacttcggggcgctccacgtcgacggcggcagggacgaggaggagccgcttcagccggcgaacgtggacgagcccggcgtgctgtcgccggacgtggactcggacagctggctgcacctggagctgcaccggctggacatggggctcggcgggcggctcgccgggatcctgccggcgaaggtgccagaggacggggtggtggtggtgatgccgagcctgaggaaaagtggtggggtggaggtgttcgtggcgctgtgggagaagcacgcgaatgagctcaccagcatcgcttacaccatggattagtgaaacactaaccaagatgtagctgcctaatcacgcatgtaataataacaacctatctgattactactcatgtatactactcaagtatactgctgcaattaacgaatgtgtgcgtgcgtaaataaagaaaaggttatcttagaagtaatcagcgtaattgaatccgaatccgaatccatcacgatcgacattctagttgtgcttcactcacacccgtcgtctataaattgtacaagcatctatgatctatctatctttcccaactcacagctagtaacaagattaattgatggattcaccggcatcgtccacggaggcgatggcactgggaccatctcttcctagttaacttaaccgagagaagaatcagcggcttgccaccaccaggcttccgcctaaagttgcatcgcggccagctattctgggtggctcccttcaaccaggtgtactgtgtgggacgaccagatcggcctcgttggccgacacgcatacggccgcgccgatcagggccggcgaacgacgccgatcagccgccgccgccgccgtgcaagcgcgctcgacgagtaggcacggtgtcgctcgatctcctcctgagcctggtccctacgagggcggccgacgcgagggaggagacgtgcgccgtgtgcctgagggacttcaaggagagagacttgctgaggacgacgccctgcttccacagcttccatgagcgctgcatcttccgtaggctcaaggatagcagcctctgcccaatttaccgccatgttctgcccaagccgtaatatgatgacaacgatgatatttatgttaaaattgactgataaattaatcctcagcaatgagaagaaaagaagcacattgccatgtcgatgtgtttagtgtttatttttctcttcaatgtgtataatttgtagtgtagtggagtgtgtacattgccatgtttatttcagctcacttcttatttttgtcaatgatgggtattgctaacactgtttttttattttgtcaacactagtaccagacgacgaccgctgcatgtttcgcgggctctgatgcccaatcagcagcaggatgatcatgctctaaatagaggttgaaaacagtttattacccacacacataaaaacgaaaaacatgattaacatataattaattaagtatttttagtgttagatgatttaactgtcaacaacgagacgctcgtggtgacttcataaatctcaaaatatatcggcctagtcttctgaaggtggttatagggataggatgtgtatattcaattggtgagtgtgcgcgcattgtgagcgtctgcatttgtactgtgtttctaaaaaaaataagtattaattattaaaattttaaaatgaatttgtttattttttaaaaacagtttatatagagagaaaatttgcataaaatatactatttagcagtttaaaaaaatgctaacaaaaattgaaaaagtagcaagtcaatgcctacctgcaagccacggccaacggctgatgaaccactgctcaaatgatgatttttttggggggggtctcaggctctcagctcaccaacaaatcaatcttttgcagtgggcagcagcttcttgattgctttgttttcaacagcatttgtcttcccaacaatgtaaaaatgtattcatggattgaagcgttgaacaagaacgcgttatgcatggatcaatgaagattcaagttatgattgtctcctgccttttggtttaatgtacacaaatatgctatacaattaagttccatgaaatgtacgtacgcatgcgcagcgtctacagggcgatagtaagtaattaaacaggctatcaagtcaaaggaccacatatatctgaaactgcagttttgtcaatcaccatgtaccagttttaaaactagtcatcacaatataccacatcatcgccatcatcaatttctggtgttcactttactattgctatgcacaagcaaagtttagtacagtctatcattcaatattgatcatcagcaactgtagtattttactactttagcaggatatacatctcaaaatgcttttgtttctcaaaaatctccaaaagcttgaaatggaaaatgtagtatggcagaatgcatcttcacttgattctagtcaaactagtttcatgcgcagtgcaggaatactatgctaaaccttccacacattttgcacttcccactcaattggtgatgatgtatcaaacttggagccatcagtcctactgtcctagtgtttcaaacttgaaccttagcacattctacattaaggaagtagcaagtcttcagccctctacccaaacaagatcatcatcatcatcatcatcaattgattcttgggtctccacatccagatcagccaacttatatacctctcctatattccctacaaacacattagatacaaagccaacacattaaaagataaggtgaaggttgacatgttaaaaaaacactgcaccagtgagctttccgttcaaaatattatatgactaacatttttgagaactatcatcgcaatcacataaaccaggccatatcattatctaactcaacaacaagtataagaaactaaaaaatggcggtaatatcatatacatttcaaacaatgataataaacaattacctttttataaaacgaagtcaaggggtatgtaattagattagtagaagggtcaataaaaagctagactacagctagaatggttaatgattaatattttacagaaggttgtttttttttgttgtgtgtgttttttcatgtgaaggctaatgccagttggtggttcgggtgatggtgggtgctgctcccttccccgttcctatttttctcccttactaatgaaatgacacgcaactctcatgcgtattcaagaaaaaaacaatattttacagaaaattttttggctcctatgtgaaattatagataggaacacaagttttgatcaagaaatacctgttggttgctccactttcatttcaatgccatcatcaccagagtcaccaccatcatcacgttttgatttggcacccaaccgcctctcaaactgtgcatcagaagcaaatggctggtcagaaatacatgtaaggctttcttcttgtatcatccttttgtcctcatcttcctgccttttctggatagcctcataataagcttttgcatatgcctcctacaccattaaataaaaggtgaatttatatttaacattcactcaactagctagttcttgattgtgaaacttataattgatattgaaatgcaaattttatcagctcacctgtatgctcttcatctcatctttctctgagagctgtttcttgtcactcttggcttctgaactttgatccagatctgcagtgttgctgatttctcctttatgttcccctgtgaggactgtactcttacgattcatccatgagggctgtggctttatactttccataccagattcaacaccttcctgtgctccagtacttcctaagaaattaacttcaacctggaaaggagaattggattaatcaggcagtgcaatatctagtttaaatgaagtaattagtacttacaggggcaaatcctaataatcaaaccatttgattccaatctagaaaggcatgagatgtttcaggaagtatagaagttctaacagtattcccagcataacaccatggtcatgttatatgcctcatcaatgttgcctttattggcttcacatttatctaaatttgcacctttaactactaacgtatacaactcaatgcatataccaggcttacctctgtttccccaaggaagggcattggtttactgctgtatcgcccttctgaattctgagatgaaccaactgcaccatttgcagatgcctccatagttgctctttcccaatcttgcaaactcataaaagatggaaaaggaagatcctttaccctgtcaagtactgctattaatggcttcaattgctcctgcattcatgtatgttcaatgttagagcagaaatctacaaaacgaaagcatcacaatccacactatcatcaagattccagaacatgcactttgccatccatgtttaagctaaaaactaccttgcagtcagcatcttgaggggcacgcttagccaatatgggagaacatacaccgttatatttattttatatacgagatataaacatatacaagtgatcagcgaagtgatgcttcatagatgacataaccaatctatagaaatatttccatctctgctatagatattgaaactatatatatggttcatgtcaaagaaagtccttctcacaacaatgaaatgctatattgttatcgtgctattatcacaaatgcaataatggttaaatagatgttaaattatgtattatctaagtgcaatgtaaaaaattatagaaagtttatgcacaatttactggataacaatctgattattggccaaaatgcagatacactaatttagtctttctgacaaaggcgaaacaaatttaattgttttccaatagttatagtatgtaagctgtactaaaaactgaacaattctaacatcatttatgtttgatctatgctcccaaatttggaaacaaatttctaactgaataaaaagtaataacctccattctttgctgcatatcctttagtttatcgtgcttatgctttattgcattgtcaccaccacacacaacttcatccaaagtaagcttttcactttctggaagaagttgttctttgcaatgctcacagtgaaaatagtcatccatatcgcttacaagttgcagtgcatcaaatgctgaatacctactgtcggtgacatgggaccgggagtatcatgacttagagacttgaggcagacacgatcacccacgtggcctaaccccctcggggggggggggggggtcgggcccgagggtgatacggccgcccttctctttgtctccccgaggggtcggaccgctcccgcctcggccccgagggccgaggcgccccgaccccttgtgggttttgcgccgcgtgtatgggttaggtgagcgcagcggggctcacctaaccgcatttattgcggtttgggtgagcacgtcacgccgcacgtaatgcagtacagcgcgctcgtttatccggtctgtgactggtcacagaccggtcagattgcgggttaggtggcaacaggcgatctgacacacgcctcgccccgtcccgtcaggatgagagtctctaggcactcgtccctagccagagccagcgtgctagctcctggagatggcacgttggtcctggtcaggtatatgccaggcttcatcccaaccattacaagcaagaaattgtatgaagaagggtggacatgcagattgctaaactgacgcgtggtggacaagaatgaccgatttgtgaccggtctgacactggtcatgtcgtcggcaaacagctgtgttcccacgtcgcgcctgcttccggcggaagtggaggtaggtatgggccgtcccatcagaaggtcattcggacggcaaccatacaagtctccgtctgtttaagaaaagataggataagtccccacaaaaaagagagagatggtgcatgtggtatccccttgaggtataaaaggaggaccttgcccacttagaagggggattgattttttgggggggatccagaacgatcagagagggagagagtaagagctctctggttctccagctcttttgtagcttcttcgtacatagattcaccaaaacacaggagtagggtattacgcttctcagcggcccgaacctgtatacatcgcccgtgtcttgtgtgtttccattatcgcgaaccttccacacaccgagagcttagaatctcacccagggcccccggccgaaccggcaaaggggggcctgcgcggtctcccggtgaggagccccacgctccgtcatctggcgcgccaggtagggggttctgcgtgtgttcttctaagctctcgcactctttcgtgtgcgccaagcttttcctgttcagcccaatggccgaacaagcaaaggcgcacaacctctctccgagtgttagcggtgacgacggggagccgaacccacgccgtcgagctcgtactccaccctccacgccaaagtcctaggcaggaggaggcgctcgagagggtcaaaggatccgcgacttcgacatccacgggtgatggggaagggcggcgagatggggagcgtcgcctcctcgtctacggcgacggcagcacgccccagggcgcgctccaagctgcgggcgcgctcctacgtcacccgcctattgtccctgacccggagtctccagcccaacgttggctggacgacgtggccaacttggtcatgacggcacggcagcgcctaggtgctggtgggcggtcctccgccaccaagacctctggcgctgctaccaccggctccgtatcgtcaaggcggagggcgcggcgagcggcggctgttgctcgccattcggccgccactccttcgtcagcgcctccgacccaggaagatctgcgtggggggccggatgcccgcatcagtatcgagcgccggcgtaatggccgacgtgctgcccacgcaacggagggcgcctcctcgtccggagtgtcacatcaacacggacgcggggatcagccctccgtgcccccggttggtggtgtcggctgtagagcctttgtggcgagccttcggaacgtccgttggcccccaaggttccggcccaccagcgccgaaaaatatgacgggagcgtcaaccccgccgagtttctccaggtctacacgaccgggattgaggccgccgggggtgacgacagggtcatggcgaatttttttcccatggccctgaagggacaggcacggggttggctaatgaacttgccacccgcgtccgtccactcttgggaggatttgtgccaacagttcaccatgaactttcaaggcacatatccgcgcccaggtgaagaagcggacttacatgcagtccagcgaagggatgatgagtcacttcgctcatacattcagcggttctgtcaagtccgcaacactataccatgcatccctgcacacgcggtgatctacgcgttcagggggggtgtgcggcacaaccgcatgctcgaaaagatcgcctccaaagagccccagactaccgcggagctttttcagctcgcggaccgagtggctcgtaaggaagaggcatggaactggaacccctccggttccgatgtggcagcttcggccgcccccggatccgctgctcggacagggcggcgtgacaggaggaggaagaagaggtcagcccattccgatgacgagggtcatgtcctcgccgtcgagggcgcttcgcgggccacccgaaaggggaggcctgcgagcgacaaaaagaaggaggccggcgctcccagtagggagcgcccaaccggcaagtggtgcatcgtccacaacacctcccttcatgacctcgcggactgccgcgcagtcaaaagtttggctgagcggacgaggaagtgggaggagaggaggcaggagcgccgagagggcaagtccccggcggttccttccggcaatcggcgaagtgaggccaagcagaaggaccccgccgaggacatcgatgacggcgatgatgacctaggtttccaagagcctggggccaccattgccactgtcgatgggggagcgtgtgctcacgtttctcaccggagcctcaaggccatgaagcgagagcttctggccgcggcccctactcatgaggcgacgcgccgggcgcggtggtcggaggttgccctcaccttcgaccagaccgaccacccaccgtgcgttgcccggggaggacagatcgcaatggtggtttcccccactgtttgcaacgtgaagctggggcgtgtcctcattgatgggggagcagccctcaacatcctttcccccgcagcctttgacgctatcaaggccccggggatggtgccccggccgtcccagccgattatcggtgtgacgccgggtcacacttggccgctaggtcatatcgacctcccggtcaccttcggtggatccgccaacttccgcacggaacgggtgaactttgatgtggcggacctcagtctgccctacaacgcggtcctagggaggcccgcgttggtgaagttcatggcggcggtccattacgcctacctccagatgaagatgccgggccccggtggccccatctctgtccatggcgacctcaaagtcgcgcttgcttgtatggagcagcgcgcggaccacctcaccgccgcgtccaagcccgagggaggcgacgagaggcttggcacctccgcccccgccgccccgaggcagcggatagtcacatgcgacgaggtcccggtcaaggaggttgccctgggcgacgacccgtccaagaccacacggatcggtggtcttctggacggcaaataggaagacgcgctcgtctctttcctgcgggcaaacgctgacgtcttcgcatggagaccggcggatatgcccggggtccccagggaggtgattgagcaccgtctcgccgtgcggtcgggcgcaaggccggtccggcagaaagtacggcggcaggccccggaacgtcaagccttcatccgcgaggaggtggcgcgacttctggaggccggattcatccgcgaggtcatccatccggagtggctggcgaacccggtggtcgttcccaaggcgaacggcaagcttcggatgtgcatcgactacaccgaccttaacaaggcatgtcctaaggacccttaccccctgcctcgcatagatcagattgtcgactccacagcggggtgcgaccttttgtgttttctagatgcatactctagttaccatcagattcgcatggctagggaggatgaggaaaaaactgcattcattacccccataggaacttattgttatacgacaatgcccttcgggttaaagaatgcaggtcctacttttcaacgtactactcgaatttctttgggtagccaaattggacgtaatgttgaggcttatgtcgatgacttggttgtaaagacgcgcagccaagagaccttactctcggatctagcggaaacttttgagagtctccgctccgcccgcataaaactgaaccccgataagtgcgtgttcggtgtacctgcgggcaagcttctcgggtttttggtctctgcccgaggcatcgaggccaaccccgagaagatacgagctatagagcggatgcgcccccccagcaagcttagggatgtgcaatgcgtcatcggttgcatggccgccctaagtcggttcatatcgaggctgggagagaaggcgctacccttatttaagctcctcaaacgctccgggccgtttacttggacggaggaagctgaacgtgccctcactcagttgaaggcgtatctcagctctcccccagttctggtcgccccggagccaaatgaacccttgctactctacttagcggcgaccccgcaagtggttagtgcggcgttggttgtggagcgcgatgaggacaatcctcattccgcgcacccccaccctgtgctggcttggcctgggagagagcagggaggagaggcccccgagccgaacggtggcccaaggcccccgacgaccggagcaggccctctgcccgcttgtcagacggtgccaggtgcccccgacccccaggatggcccgagggccactgcgggaaggccgcacctatcgccctctgaccccgaggctaaccctgtgccgactcgacccgggagagagcagggagaagaggcccccgagccgaacggtggcctaaggcccctgacgaccggagttggccctttgcccgcttgtccgacgacgccaggagcccccgacccccaggacggccccgaggccactgtgggaaggccgcccctgtcgtcctccgacctcgaggtcgtcggcacagaagacgagtgcaccccgtgaggccgcttggacaaagagcgccccggggatgtggcccctggcgaagaggatcggccccaccgaaaggtgcagcggcccgtctactttgttagtgaggccctccgggatgccaagacccgataccctcaggcccagaagatgctttacgctattctgatggcttcgaggaaactgcgccattatttccaggcgcatcgggtcacggtggttacgtcttaccccctcggccaaatcttgcataatcgagagggtaatggacgggtggtgaaatgggcaatcgaactttctgagtttgatttgcactttgaaccacgccacgctatcaagagccaggccctcgccgattttgtggcagagtggaccccagctcccgagcccgtctcagtccccgaggccagctcgggcccctcgcagctgccttacaccgcccactgggtgatgcagttcgacggctccctgtctcttcagggcgccggtgcgggggtcacgttgacctcgccgagcggagacgtcctcagatatttggttcgccttgactttcgggcgaccaataatatggcagagtacgagggactccttgcgggactcagggtggcagctggactggggatccgccgcctcctggtgttaggcgactcccagctggtcgttaaccaggtctgtaaggagtaccggtgctctgacccgcagatggacgcttacgtgcgccaagtacggtgtatggagcgccattttgacgggatagagcttcggcacgtgcccagacgggataacacggttgccgacgaactctcacggctcgcttcctcgcgggcccagaccccaccgggcgcctttgaagaaaggcttgcccagccgtcggcgcgaccccaccccttaggggagacggacgcgcctgacaggcccccgatgcccgtcggagtccaggcctcgggacccgaggggagcgctcccagctcccttagattgattgcttggatcgctgagatccaagcatacctcacagataagactctacccaggaccgcgaagggagtgaacgcgtccagcgcatctccaaatgctacgtgctggtagaagggaccctctatcggcgcgcggctaacggaatcctcctgaagtgcattcctcgggaacaaggcgtcgagcttcttgccgatatccatgaaggcgaattgcggagcccactccgcctcgcgcaccttggttggcaaagcctttcgacaaggtttctattggccgacagctctcaatgatgcggtcgacctggtccggcgatgcagagcgtgtcaattccacgccaagcaaatccatcagccggcccaggccctgcagatcataccactttcatggccatttgctgtctgggggctcgatatcctgggaccgtttaggcgggccccgggcgggtttgagtatctgtatgtcgcgatcgacaagttcactaagtggcccgaggcttatccggtcgtcaagatcgataagcactccgcacttaaattcattaagggcatcacagcccggtttggagtgcctaaccgtattattacggataacggcacccaattcactagtgaacttttcggcgattactgcgaagacatgggcatcaagctctgcttcgcctcacctgcccaccccagaagcaacggccaagtggagcgcgccaatgcggaaatcctcagaggccttaaaaccaagaccttcaacatcctcaagaagcacggcgattcgtggatcgaggagttgccagcggtgctctgggcgaaccgaaccacgccaagccgagcaaccggggaaacgcctttcttcctcgtctacggcgcggaagcggttctcccatccgagctcaccctgaggtcccctcgggccaccatgtactgcgaggctgatcaagatcagcttcgcagagatgacctcgactacttggaagagcgaaggcggcgcgcggccctccgagccgcgcgctaccagcagagcctgcggcgctaccatcagcgccacgtccgggcccgatcactctgcgtcgatgacctcgtcctacgccgcgtccaaacgcgtgctggattgagcaagctctcaccaatgtgggagggtccgtatcgagtgatcggcgtcccccgggcgggctctgttcggctggccacgggcgacggcacagagctgcctaacccgtggaacatcgaacaccttcgtcgcttctacccctaaagggggatcgggtgacaggtttccggctcgggccaaccccgcacccccctcgggcgtgcagggttggccgggggctaccacatatgcatattcttatttctcttatatctatatttcaataaaagcattttcgatttcctaaaggctgtatctgtgctgttgtttccttttgaaggatcttgacttgaaataagtcactcgtgttcaatcctgccctcgggggctcgggtcggctaaaatcgctaaacggggcccagaaccgagccgtgccccggggcgtagtgaactccgggggggaatcggcaaaaacccacaatcgggtcacccataaccctcggtcaccacgctcccggcttggccagtctcgacatgtggatctccccaggcactagccccgacccgagccatttgaggactaggacctgggcacgagcccttgttcaagccaagacacaaaaggaccgtggcacagacatcctcgtctcatacacacaacaaatagaattgacacaaaaaatttcctctttatttgattgcagattaaattagtctatacaagaagggggcccgaaggcctcggaagaagaaaagaagaaactatttaaagattggcgggggcctgggggctcactccgatgcacccgggtcgccagcgtcgtcgccactgtcgcccactccgccgtcatcgtcctcctcgtcggagttgagggcgaacgcgagccgaggggccgaaccctcgaagctgtggacgatatggtcggcggcgtcccggacctgcgcgcgcgcgccatcctcggtcccgggagggaactcgtccagcgccgtccatggggagaagtcgggatccctggcttggtaactcgccagtacgagctccaccgctcctcgggcgaggtccctcgaggatgacttaatcgtcctctcgagctcctcggggagccgttggagagtcccggctatctccaagaggcgctgggcgaggcccccctggttggcggcgtacttcgcagtccgcccgccccagaggcccgcctgccggccggcgcggtctagacgggagacggcgtcccgaagcatgccgggccctacctcgcctgccaagcggagggcctcgacctccccagcggacgagtctagcgcgccctgcagatcggcgatggtgtgttcggcagctgcgaggcgggcggttaagtcgctttcgcccgcggccgccccgccactgcgcaccctcgcgtccagccccttctcccgcgcctcgagctcagcggcccgctggttcagcgcggccctctcggcgcgggcaccttccagattacgacgcgcctgctcctcccgcactgcctcgcggagggacaggctgtccgccagccgttgcgccgcggcctcggcctcctcgagagctcgctcccgctcggtgagcgcgtcctcgcggaggcggagcgcggactcctcttcggcgcaggcggcctcgtgcgcagtcagcgttgcctcccggatggcaacggcggcctcgcgatccgccaggtccctctccacggcgcaggcacgctcttccagcgccatggcacgggcctcaagggcttcttcgcgccgccgggatgccacctcggtctccgccgcccgccgttctcgggcagcggcaacgtcaaggaccccccgggcggcgtcgagcttcttccctagctccgcctcctagctcccgtattgaaggcggagggtgtcctgcgcctcgttcatcacggtggtggcaatgagggcagccccccgctcctcctccacctccttggcgatctcccccagcatcttccgacgggcttcgagctctgagacgtgccggcgatgtgccttgcggcccacctccaccatggcctccaccgagcgacgcccctcttcgacacgtgcccatgcggtgtcgagctccacccgctctgcttgcaaggcctccatctgggcacttaacccgtccaacaccgtggtgtttgcgacggccaaggcctgcagaaggggttctgcgctcagtggagcaacggaaggcgtggggaagagccgcctcgaagaggatgccgcgcggcttggcccgccgatggacgtgccggactcggggatgtcccccggacctggtttgtcctgagcgtcgcacgagggagtgggcccaagcgatgcgcccgcggcctcgtcgcgagttgcctcggaagtcgtcgtcgcctcggcctggcgaagtctggcctcctcccgagcggcttcttcagcttggcgagctcggacggccacctgggcagcttcctcggcttctcgaaggcgatccgcggcctcttgccggtcagtttcacgggtcgcctcggaggatgtcgtcgcctcggcctggcggagtccggcctcctcccgagcggcttcctcggtctggcgagcccgggcggcctcccgagcggcctcctcggcttcccgaaggcgatccgcggcttctcgccgatcagattcccgcctccgggcctctgtggtcgccgggtcctcggcctcagactggccggacttggaatggcgggagggacgcgacgggatctcgctgaaacagaagaaagaccagaagacaaacaagatggatgagtgaaaactcgcgttgagggaatgaatacggccacgatgggcgtgggacgaacctgcgagggggtcggttaaacgaccaccttggaggggaaataaggtttccccgggatggttctgtcccccccatcttgcggagccgtttcttcttccgctccccctcgggctgcgacgtcggcgtggccccctccgggcgcctgctgctggcacgcgccgccccgccccctcggggaggagatgggggaggggttccttcctgcttcctcttcccccaggcgtcggcagggcggccgctccccgggcccccgtcgcggggcccagaagcacgaccccctcccggggtagattgttcccccctgcggctcccgcccgcgccatcgtggcctcgaggagcccgctcctccgacgccccgaccgcctgcatgatggtcaggatggaggcgcggtctggatcgctgcagagggggaggactccttgaggaatgagggatgcctccacggagctgagattcagcacccgttggaccactatcttgaagtcctcaggagcccagtcccatctgaccccctggtgggtcctcatgaagtcttcggacccggtgtactcccaggcgccccgggcgcgccgctggagtggcgcgatccggcgacgaagatagtcgccgaacaccatggcccctgtgagcccctgggatcgcaggcccaccaggcggtcgaggacggcgtcgtagccatctcccagatctaccggcgcccgccagttggaggcctgcgctggaggctggctcggaagtcggaggcgcgcttcgtcggcgaggggggtgtagaaccagtcgctcttccagtcatcccacttcttgcggaggacgcagggaatgtagcggttcagcaccggcccccgcggctggaagtagcaaccaccaaccaccgacggcggcgacaccggctgtacggtgaagaaccaccggaacagccgaagggatgggcgcaccccgatgaacatctcgcacaggtgcgcgaagatggccaatgtcattaccgcgttgggggtgaggtgcgccatctggagatcgtaaaactccagaacatccatgaagaaagaagaaaatggcggaaccagccctgccatagcaaaagggaggaagaagacggaccgccccgggtagcgtggcgccgggcatccctcgcccagcgagactatctcccggccggtggcagattccggcatgaagcggcgcggcagcccggcctgtctctcgctcacgatgcgggaaggcggcagcacgctaccgtcaagcggagcggagccccgtgccatgacgccggaagaagagatgtttgagagcgagcgcgtgtggcgaaggtagggcacaggaaacaaggagttagggcgcaagcggcgaagacaaggggaataatggcgagaggaaggaagcaaatctcttcctcggcgactttatacccatgccaacgctgtgcccggctcctcgtttctcgcgcccactatcttgccccctcgtttctcgcgcccacgcttccactaatcccattcgcccgtttgcggtgcatgaggtggatatgcggctgtggcagtcgagatggaacatctcgtgcgcgcgttaattacgctcgccgaccgaagcgccatcaccatatctccaggaaaaacgaaccggcttgtcccgatttttagaccggccccacctgtcatcaggccttaggaagtggcgtcacgcccgaccgcttccctcgaggagggcgatcgccctggcataacgccgggggctactgtcggtgacatgggaccgggagtatcatgacttagagacttgaggcagacacgatcacccacgtggcctaaccccctcggggggggtcgggcccgagggtgatacggccgcccttctctttgtctccccgaggggtcggaccgctcccgcctcggccccgagggccaaggcgccccgaccccttgtgggttttgcgccgcgtgtatgggttaggtgagcgcagcggggctcacctaaccgcatttattgcggtttgggtgagcacgtcacgccgcacgtaatgcagtacagcgcgctcgtttatccggtctgtgactggtcacagaccggtcagattgcgggttaggtggcaacaggcgatctgacacacgcctcgccccgtcccgtcaggatgagagtctctaggcactcgtccctagccggagccagcgtgctagctcctggagatggcacgttggtcctggtcaggtatatgccaggcttcatcccaaccattacaagcaagaaattgtatgaagaagggtggacatgcagattgctaaactgacgcgtggtggacaagaatgaccgatttgtgaccggtctgacactggtcatgtcgtcggcaaacagctgtgttcccacgtcgcgcctgcttccggcggaagtggaggtaggtatgggccgtcccatcagaaggtcattcggacggcaaccatacaagtctccgtctgtttaagaaaagataggataagtccccacaaaaaagagagagatggtgcatgtggtatccccttgaggtataaaaggaggaccttgcccacttagaagggggattgattttttggggggatccagaacgattagagagggagagagtaagagctctctggttctccagctcttttgtagcttcttcgtacatagattcaccaaaacacaggagtagggtattacgcttctcagcggcccgaacctgtatacatcgcccgtgtcttgtgtgtttccattctcgcgaaccttccacacaccgagagcttagaatctcacccagggcccccggccgaaccggcaaaggggggcctgcgcggtctcccggtgaggagccccacgctccgtcacctacagttcaacagagacaataatgtaagcttcattttttttaatggtactatatatccagaataatcagaagtatacttagtaccttcttttacagttaggacatacataatgctgaactgtatctctgtcatctaactcatcttttaattttttcctcatgcggtgtatcctatgtcttacaacatcatatacctgtatttcagaaaaatatgcacattaaaatctatatcagattatgaccagatcaaaagacatttttggatcatgggatgggtaaggtacaagcagattttattctatgactaaagatgggtaatgttatcgctaacgctgtggtgagagagatttgtctcactttctgttcaacaaattttcagtaggattctgtcctaataattctaataaagccaagtgacttagatttgccaacctatggaagagagatcaatttaatcaaaacaaccaccatgcatgcagaaaaactgcaatgttcaattgaagattatatgagaaggtccgcttgtgtgatttttggcccatgcagttttacaatgttaaaataagtttccatgcacagagtctatatcaaatctcattgagctctgccacacgtaaaaacataagaaatagatatagcgctacatgtcccactcatgtgctttgtggataaatgtgagcggccaaatatcttgtgtatgcgaaaaatttcagctaacaagtttctctttcattttttcgccgggcaagtttctctttcattagagaagtaattcttttcctcaaacaagcaagagaattgcgtgtcatttcattaagaagagaataagaggagagaagcaattgcattgaaaattaaatgttcaatcaatgagtaacctgagcatagtccaaacaacagtaggaatgtgtgtgcatctttgctttctctcctcctttagtaaaaggatgcacatcaccagcggtgccagagacattgttagatatgtttactccttttggtgactgctatgacataacacaacacaaggtgagaaggggcaaaaaaaaaactgacaatcagattaacaaacaaagatgactaatgactggacgttcatattgattgcacctccaaccacaccacccagaaaacaaaagagttcaagcaatgttcaggtcacctcgtgctgtcactaatgatcctgtgaatgttgattgtcttaagctctttggatgcttacgttcataaagtgaacctaaagttactccttatttagcagtactgcacactcgaagtgatccagtgtaccaagcaaaatagtgtaaatagaaggctaattttttagtacataggaaaacagagccgccttcatatatgtaagaaaatggctatacatgagtgtgtggcgcaaatggtgtctaaagagacctatacaacaaccatcacaaaaaacaacaaaaattccacgggcacaaatagatagtcagatttaatgaaatatgcatattccaggaaactgtttaatatgggctatacaagagagcgtagcacacacatgtttatgcctcagcagtatcagaacacagatgaaatatacatgacataaagtttcatttattgaagtcttacctaagttctgctgaacttttctgctttgtccatgtaagattatacaagtcattaatgcaccgatatagttatgcaactaattcatttcccatgtatttccattaaccatgtacaagcttatgtgaagtaggtgctcaaaaacatatttcaggcactcattctatagtctaaagaaataaaataataacgccactgcatataaatgtggataaattgtagaatatcttgacatcttgactcagttggaaagtggtcagcattttttttactttttaggataagtggaaaatggctgagggcaaaacgggcagagagaaaatagaaatgtaaacattttgcaaaaagaccccaacgtgacaaatgctagagatgcgctctttaacagtggtgattcactactcattgggagtgggtggcatatcctacagtagtacagtgccgaggtgacaatcgttgattctcactctcctatcaggtcttgctttcagaaactactaataacctaattaacaacttctgttttaagtggagtagatggcgattccatgctaaaattaaaaaaaaaagtgctatacaaaaatgagaacaactctctctcagaaattctaatctccttccgatgacatcttctcactagcttctcttcttcaaaaaactggagaatgcggcgcagttgcttagaggaaatctttaatgctttagccaaatcttcctctcggacccactggcgccgcctgcggtaaaaaagaagggtatcacaatttgtgcattgacactacatataattagttaacacgaaaaaagatgaatattgaaacgagagaaaaaaatgttttagagagagagagggggaagataatagatttaagactaaattctttgtgatcataattggacaattgaagcagcttctccaattgctgatttccatctctagtaatcaaagttttcttatttacgaaaaggcaagggctctgcctcatgcattaaataaaggaagaagagtcatagtaagagagagtgaggagtggaagccgccttctcacacaagcccgagcatatgcacgctaggaaaaactcaatagacttgacagatgtacactccggggtgcaaaagataggattaaaggaggagaaaaaaagaatacagaggcaagggcctagtagtcaaaactgcacgttcaaaactgagcaagcagcattataaaaataaaatgtgggacatcaacgagtaccaagtaacactacaatatgaggaggcaaaatgttctctcagcagttccacatggataatgagtcataagaaatcataaaggagtactcagtatatttgtttcataatgttgtgtacaaacttgatccagttggtgatagtgttgattaaccattatttgccatagatttgataaacgacaaaccatgagtagcagttactccaaaacagtccctcagggatcataacaaaattgctcatcactcactctaaaaaaaatcttcaaatgcttgtttgagcacttaacgggacgttgtagccaaccagcaagaaacgaaataatcaatttaaccttgaaaaataaatcctagaccatgccataaatttgaaatgcacaggcacaaaaggtctgcattaattatctcggtcactgtaaattctccttgcctaaaatcacaagaggccaagagggagcagtattcaacatggaggtttcctcattggcactagcgagtagaaactagcatcatcaatcaatcaggtgagtgaaaccaacacaatagaacaggtcatgaaacatgtacagaaacacatgcaacagggcacattgatcattgatcagtgacagcaccgaggtcaggactttggttgaggatttaggtttggtctcacctggtgagggcgtcgaggacaacgacggcaagcccacagttgtcgccgcgagcggacttggggtctctggccagcgagacgttgtcgtagaatgcgcgcgccaccatcctcaccatcctgcaatgccagccaaaaattcccaaaccaaaaccagtaaaattacacctcccgcggatgccagctatcatcaatgcatcatggatacacggaggggagcacagcgggaggatccgcaccggttcaagggctccatggaggccatggcggcgacggcggcgatggcgagcggcggttggggtttcgcgggttttcgccgcgatcaggaggttttagccgctgcagcgcagggcgcaaggcttgagggcaaagaagaaagcagcgaccgcgccgagttggttgggttgggtttcgtttcgtttcgttctcgagtgtaccgactcgtgtgggtcggacccgagcccgacacgatccccctctcgttttgagcggtttggactcgaacccgactcgaccatctttcttcttctaaccttcttgtggtggaaggaaacacgggcgactgagcagctgagtccaacatcgccgggagagagatggcggagacatcgtcgccggcggccgccgcggcggcggcggcgcagaccgacgcggagagggaggaggcgctggaccggatgctgacgcggctggccctcgccgaagacgcgcggctcgcgccgctgctcgcccgcgtcctcccctacgccatcacctcgctcgcctcccccgccgcatccgtccgcaagctcgtaagtataccgttcctcaggtcctgaatctattgaagtttgtatgtgagacatatgtgtaggtgtcattattctgcttcggttggtttagttggtctcttggttggtgatgtttacaatgttcctgcttcaatttgatgaaattcgagcaacagtgcctattatactgttttagtgatttgttcatgtacacataatcttctaaacgacgtaattagagagactattgtgctttatgttgcaagaattacttgcatttgttactgtaacctgaaccagttcagagtagcagagtgccagtcctgttttccttcagttctttgcatgattctatagcataatttccatgtcaattagacaatggcatgtaatggaaaataataccatttttggactccattaggttatggaaattctcagccacattaacaaacgggtgaagcacaggcctgagatttcactgcccatgctggatttatggaggatttatactgaatctacttcctccacaatagtccggaatttttgcattgtttatattgagatggcatttgaacgtctgctaagtgaggtatcctattctgcttcgtttgtttctcattttctctaggctgttttaccttttctgcaaagccaacaacatgaagttaacattctgtaacaggacaagggaagcatagcacctgatcttttaatcaacatatcaaatgttacagagcagcatcagggaatcatcttgagacttgtggtgaaggtttgtcacaatttaattaagactgctgtccaccacagagtttacacgattacacatgatcagcaaaaatatgtacattggtttaaatggtttccattgaagaattcaaggaaaggatccggcaaaattatgtagtttactaggttacacatggactggcaacaaccaaatctcacccttccagtcaaaatcataaagttgatgcacatactaaattgatcattatcagcttttttctatcatcagcccatggcattgaatttagtcaagtctataatgatttttgataagttactcatagttttcttttcttcctttggtgtatctgcatcctaaaaagcttgctagtttttctctgtttttttaaatcttgttgtcaggctattggtgaatgtaacacacataaggtgggtgacaatgttgcttcaaaatatcaatccataagtggatctaatgatgatctagtcttcgctgacttctgttttcacacagtagtgtatcaaacaccacctcaagggtaggtttccttgctaaattaggtacaagtatgaaactttttttgatttatggagagttgactgctagtattcttcagtgttggatgcccggctggactttcggttgctcaatcagatcgtgttactggaaagcagccactaaaaggtgacacacttacatcaagaaaggtaatacagaaatgcatgtatcatttattcatgctatgcctgtgtatgcaatcatgtcagcatatacattcgcacattttaagtccttgagtatagtaactgcaccttcttacagttgaatttcacttgtgatatcttcagctaggaatcttgaacgtcattgaagctatgcagttggcaccagagattgtttaccctctttatttagctgctgcttcggataggtacttttttggaattatgtttacaatccactgaaatgtttgtacggatcattaatcatgcggatcattgtttcaatgaagtcaagagtcagttactaagagaggagaggagttattaaagcgcaaagcttcagctgtgaacctagaagattccaaccttatgaagaaactgttcacactgttcaatggtatggattaaggattttgtagcatgctaactcaagcaaatttatatttcaatataatactgtcactttgttcttatgtattgtcatttttgttgggtggcatatgttattctgtccttgaggtgactaaaatgcattgttgaaatccagttccttacataaagggcaaagctaaaattaaaattatctagtataactttgcctccacttcaaaatatatatagaaggctttatagttttttcgagctttattgttgcatggtcaaaagatgggtgcggatacctttgttgcccctcatcttcataactctagcaaggtccttttggtacagcacatgtctattccatgaacatatttcctctagcctagtcccgaagcagtaggtcattgggggtacccctccaacaagtttcatttaaaatatatcactcatgagaatttactgatcctttttacaccatcttctctcaccttgtaattataactaatgttctaactaactgttctcttccgtatttttaactgagataacaaggtcatgtcctctccttctcttgttttcatacccttcttaatccttgttcccatccaaagtaagccttacattttgtaaaggtttgtgtatgttagcaggccagcatttgcacattgcactctcctgtaccaacatgtacacaatgcttctctttattttgttttgtaaaaatctctttcttgtttttatcagtgcaaatctgaatatttgtggtttctcatggtatatgatagatactgttctcttttgcctcaggtactgcaagtgcagaaaatatagctgcagagctgaaagtcgccccagcacatagttcactgcgagtccgccttatgggtgttttctgccgatcgattgctgcagcaaacgcattcccgtacacacttcagtgcatctttggctgcatctatggtattctgtttatatatatttttactttgtgtatttattttagttttcttatttgttgtcatgaccaataaaatgaaattttaataagctgtgtattaacaaatgcactcttttactagttttgattatttacatcaccaaaccgcatctttaagtagtacatagaaactgatttggtatgtttgtcattttgtacaataatctttcttttaagcatcttttagagttttatggaatggtaggagctgcagaggatgatcttctgaaaaactattaatatcaaattaacaataatgtacagcatacattacaatagaatgataaaagataaaggtgggcctagaaatttatatctggaacaagtgaaagagttgaaagatatgggctagggttcatggaggataaacaccattaggaggatagcaaggtggcagcggctccctgggatgagaagtaggcatagactgggatgcagaacattgaggaaaatggattgatattttttcttgctaacagtgacatccttatatagaggtgctagagcccaaatgatagaaactaaataaaatcataccttggatatagccatctacttccatgaaatatctaacatagaaactaataatctttatccccaaatcaattgcgcagcccataacacatatatgcatgacttcctttaaagagggaaatgcaagatgagcactccatttgctttttaagtgtctatttctatgatatggaacacattctatgatatttcttgttatgttgcattcaattcattgctaaaactactcaattgacgtttcagcaaggcaataactcaacttcagcatgccatgtatcgttactaaactcatatttgtttctgctgtgtttctatgcctgaaggaaacgggactacttcaaggctgaagcagttagggatggagttcactgtctgggttttcaaacatgtaggtgcactttgtatgttttcagttcaccaacattgattagcttctagcattctttacttgtgctcttccaattttagctttttcacttggagcagttctgttcctttctgtcaaccttgtttcatggtctcaaacttttatcaattatcattgtttccttattgatttaggcagcaaatgaccagctaaagttaattggtccagtcattctcagtggaatattacgttcacttgatggttcttccactactgaagcaggttttgcacttgtcatcgactctacttgtttaggcatgcatgtgatttatcttcacattcctttgctttgaattacttgggttttaacacttctttgacttcctattttgccatgtcaaataagttgagaaacagtgaatgatttattgatttcctttatgtccagattcttccagtagggatattaaaatatttgcataccaggcaattggtttgcttgccactcgcatgcctaatttattcaggtatgcccttttcttactcttctgctttcttgcctcatgattcatttctgttatggagactgattttttctactttttatgaacattgcagcaacaaaactgacatggctatacgactctttactgctttaagattagaggagcaatctcttcgtttgacaattcaggaggcagctactgcccttgctacagcatataaggtacttacttgtaggatatgctaatttcccccaaaatggtgctgtactgctgtcctgacctgttaaaatgttggcaaaagatggttgtgaaatgtgtttcgagggtgtagtgatttccctagggtgctgtacttctgtccttgacatttctcattattttgaatggtcagatatttttacgctgtagttgactaatgacttgatgcggaacaaacttattagttttgttgatgaagcacatgaacggatcgtgacgccccatggtccaaacatggtacaatctatccactttgctggattaaaccacatacattgcaattctttgaagcttttgatctcgtttgctgcagttgggttaacctggaattgccttcatacaccaagttttgtatgctgcattgtcacactcacacctttcacagccaacataaactgactaacccacccccatccattcacgcacacacgcatatggacctccaagttctggcttggctagatgctaaaagatgccttgtaaattgcaattttgtattcttgctattattttacggaaagaaaatcttaacatgtgacttgaaatagttattcgttgaatgtgttcttcgttctaattataacagcgtgtatctaactcatttcctgacatcaaagttagtaccgcctggagtgtaacagatacgtgctgaggaagagccttggcaagaagtagaaatatagtgctcacaagttccatgaactgagggagggagggtgggctttgcatggtatggggtagtggtaagtaggtacatgccatgattgtctagcagttgagggaggattggaggagattaccagttcagcttgcaacagagatcgacagataagtccttgggtttggttaagagataagtttaatcaggagataatcattagttgaggtattcttcttaaattgttcgggattcttgctgtctgatctataaatgcagccactagagaatgtattcggcacagagggaagatacaagaaggcaaatgttctgttgagtgttgacatttttgggttttacatacttgtgacttgtaatatttattgctttgtcctgttactgcatcatgtcttcagtcagtgtcattcatatgctgttatgttactccactttttctggaaatatatttgtgatttccttttttcttaccagggtgcttcggttgtaatattgaaggatcttgaggcacttctcttggaaaattctcaaatggtaagttcccattcttgtcattgtagattcttaaatactcaagagcccacagctgcatcaaaattttcctatctacagttgaatttgtgggtgttacttctattatttttctcagactcatctagatatacgtgaaagcaatagtttgaaaagatggaatattttattgtttatatgttgttgattggcctgatgagaagttctattggaatacaactatatcttcttacttttgtgatagttgaaagttgaaccctactgttcgaggaatgcaagtacttttagtcatttagattttgcatacttttgtgattttacattttttatcctattttttcttcaaggagcaaagtgaggtccgattttctgctgtaagatgggcaacaacactatacgatatgaagcactgcccaagccgatacatttgcatgcttggtgcttcagatgtaaaactggacataaggtttgttagaaaagatcttgccgagttgttgacatcttgtttcctttggtttctatttattttttttaaaaaatataattatatgattatgtttgtcatcagggaaatggctttaactggtctgaatctgttaaatgatgaaagggagtcatctgcaatagcaactgattccaactatcctgatattgcagacatggtaaattatgtatacagccaacagcctcagttgctacactgtgatgagcagaggaacggaaaattgcttttcccaacaaaaacatttcttgcaatgataaagtttctaatgaagtgctttcagaaaagtgatggctcggattttcttcaagaagatctatctaattgtccagtatcaaaattgtgtatcattttagaacatgccatgtcatatgaaggatctagtgaacttcatgcattggccttgaagtcattggtcgatatttcctctcgtcaaccaaaggtttctgtcctatattatttgttaaagcaaactatgctttcttcacatgtttaaacttttccttttttaattttagttggtgtcatcgcgctatgtgaaccgtttactttggctaagaactttactgggccatgttgatgctgatgctcgtgaagcaacttcacgtctgcttggtattacttcttcagccctttcaagcactgctgcactggatcttctctctgagctcacttcaacatttgatcaaaatcgcccatcaaggtatggaagagaaatttaaaacacaaatccattttctctgtactgttatgctacttctaattcacgtggatatttgatgaattgcaccagattcgaaaattaccatggattgttatgtgcaattgggtatataactgctggttgtttaaaagaatcttatgtaagtttatgcttctttcatgatactattttttttgcagtttgtttatgtcatttctttgctacatgtgctttacatgaaagtttagtgcattcgctgttcacttgacaccgttaaacctatcttgaatataatttaatggtgttatatcagaacgacttgatggacatcccattagtaataccatccatgagaatcctttttgttattctctagtactaagaatatgatagcgaaatggactagtgtaagacggttcttgtttggagtgtcatgtgagggacagaattgcaggcagggaaagaatgagagtagtacttctctttccataagttaaatgtgttttgagattggggattcgaagaaagaaagggatgaattacattataatttacctatgccatacaatgttcagttgttcacaaaactataggacaacacaagaaactatgttgatttttatttttattctctctctgtttttttcctaatataaatctttagttaattttagggtattcccgtgctggtttcttgggcggttaatgtgccaaagtggctggggtgccccagggaagaaggcacaagggagtctgtagctaggcagttaagaattctaatccactgggttaagtttggcttgcattcctaactagagatgaactgacaaaggcgatctaccatgctggcaaaataagtccatagctcagtaaaccaacgcattacctattttgttgtgtccttcctcgtgtttagatggtggcaagaatggtgctttttcatcagtcttcgataatcctttgcactgtaaaaatatatgtaatgaatgcaactgagggctactgtgctgttattttttatgaatatgtacagataactgaagaaatagtgcagaaatcaattgatgttcttgtaaaagttgtcgagtctgagggttcagcattggcatccactgcgatggaagctcttggtcatattggtctccgttgtttattgccttctattaatcgaaattcctctcaaggtaaaatgtgtttcctcgcacttctgatagacgtgaactgtgctactcaccagcttcctctactatgtatttgtttaagctaatttcgtttgacttgcagctgcacttttaacaatcctgaatgagaagctggctaagctgctttcagaaaatgatactaaagctaaacaaaagattttgatatcgctgggacacctatcttggaacgagttgtcatttgcacacctgaataatgcattggacttaatttttagtctttcacgctctaaggtagttcttttgataaattcaaaatttgtggttgaaaatattctatatttgacaatattctattcctaaatatcattattcaggtggaagatgttctttttgcagccggggaggccctatcttttatatggggggaagttcctgtgaccacagatgtaatactagaaacgaactttgtctccctttcccaggccacaaactatcttactggtgatgcacccctacttgtctcgagtaactctaataaaggaagtgattgtgaagaagcacacgcaatggctcgagaagaaattataaaacggttatttgatacactaatttatagcagtagaaaagaggaaaggtgcgcaggtactgtctggttggtctcacttacaatgtactgtggtcagcatccaaagatccttgaactacttccacaaattcaggtctgccaatcaataataacatatatttatcattgtagaagtactatatcttaggacaaacaagagtggtgcactccaaagtttacattagaattgatacaccataggttgtgtgaattattaatctgtcctaaaattaaaacaatgccagtatgctggacagggcacagaagccaacaactgttaataattgtgtacctttcatctaaaacatgtgcttgcttatagtataattcagagttcctcagaggtttcagctgtcaagctgtcactgaaaaatattaatttcagtactgatacaatcacctatgtttagacttgatccatgtccaagtgcacttctttttaggttttatcctcaatggtgtttacgcatttcagttgaagaaaaccagaaactttgagtatttgattctacaaattgtgcatgcatatactgatgtagtgtagtgttttcagttagtggggtccctgtcttggggtgaaagagtgtcctttaatgttgagctattctcatattcaaactttgtcttttgctgtcattatatgtttctcttctaaatgtcttctatcttgtatcattatgttcattccagcgtataacagtttgctctaggtttctgcttaccttttgaagttcattccttttataggaagcccttacccaccttcttggtgatcagaatgatcttacacaagatctggcatcccaaggcatgagtattgtatatgagcttggtgatgcatctatgaaggagcagctggttcatgctctcgtgaatacactgtctggcgcagcaaaaaagaaaagggccatcaaggtgcacactatgtttccagtttccattttgagagaacctggaatacccccgaacccgtacccaaaaaaaaaactgtaaaatgattaatgttttctctgtctgcattagctgatggaggattcagaggtttttcaagaaggaactattggcaataatcctactggaggaaagcttagcacatacaaggaactttgtagccttgccaacgagatgggccaacctgacttaatatacaagtttatggatctagctaactatcaggctgctatcaattccaagaggggtgctgcttttgggttttccaagatagccaagcaagctggtgaggcacttcagcctcatctgcataccttaattcccaggcttgtccgttaccaatatgatcctgataagaacatccaggtattgaactatacacttccattatcacatatgccgtgttttgttttctgatttttgtgtttggtttaagttcttaaagtgtttgtatgctataaccttatgatccttcattgcaccaaagtgagtatgaatcttgttagctatggcctgcaaaatttcagcaactccacagctgaggtcgtatgcatgtttgtaatcttacctagagaattattggtttgttttttccaatagtgtatagatataaaagtataatgcggtcttcttgttcatatagaatccaaggcagtcaggaagtactacagtgcatcagacagctcagattatctgattttgatcacttaactatttcaaaaatggttcttcctagctaactgacactttgtatttcattctaggattctatggcacacatatggaaattaattgttgcagatccaaaaaaaacaatagatgaacattatgatctaatagtagaagatttattggttcaatctggatcgaggctttggcgttcacgtgaagcttcatgtcttgcacttgcagacattattcaaggtcgaagatatggtcaggtagttaatttgttttgctaattttgatttttttaaaaaaaaatttatgtaactatgttgttttgcataagctatgaataactggttttggatttattttgagaataaaatattgcttatctttccctttgttaaggtttctaagcatttgagaaaaatatggattaccaccttccgagcaatggatgatattaaggaaactgtgcgaaatgctggtgacagtttgtgccgagctgtaagcttgttgacagttaggctctgtgatgtgtcacttactacttcatctgatgcaaatgaaacaatgaacattgtactgccatacttgctttctgaaggcatactcagtaaagtttcaagtgttcaaaaggcatctataagtttggttatgaagcttgctaaggtatactcattgtcaaattcaaaaaaagttatctgcattaacattttagtggcaattttttgctccactgtaattttctttatgtatgctgctgtcatgaattgaattacatgaactaactgcccgatgttcacagggggctggccctgcacttaagccacatctgtcagaacttgtcagctgtatgctcgaatgcttatcaagtctggaggatcaaagattgaactatgttgaggtatgctacttttcttggtttttgttaagcacggatgggtagtgattttccaagacaattaacagtttctatacttcactcatttctgaatttggaccaaagatgcatgcaggaaatgctggcatccaaactgaaaagcttgagagcttgcgtatagctgtggctaaagattctccgatgtgggaaacccttgatatctgtttaaaagtttttgacaaagaatcactggatcttttagttcctcgtctggctcaaatggttaaatctgctgttggtcttaatacaaggttagttttgatgctactatgaaccttgtagtataattgaaataataaattgttgcttttcatgtacttcaatcttattgtcattcattttatgtttgtcttatttcagggttggtgttgctagcttcatcaccttgttagtacagaaggtcatggttgaaatcaagccatatgcggcaacattgctgaggttactgtatagtgctgttctggaggaaaagagttctgcagctaaaagggcctttgcatcatcttgtgctgcagtcttaaaatatgccagcccttctcaggctcagaaacttattgaagataccacttctctgcatttaggtgaaaaaaatgctcagttgtctgctgcaattcttattaaatcttatttaagcaatgcagcagatattcttagtggatacaatgcagttgttctcccagtaatttttgcttcaaggtatgtgaacgcatgtagtcttatcttagccttttatcttctctaccattgctaatggtattacagatattaatgtgttttgaagttcactatcagtctatcacagaaacttgaaatgcacatgttctttgaactgtactctgcaataacaaaacttattttcagatttgatgatgacaaagacatcggtgcattgtatggagaactttgggaggatattcctagtagcgaaagagtaaccctacagttatacttaccagaaattatctctcttttgtgtgattccatgtcctcgtcatcatgggctgggaagagaaaggtgaagcctctatttcattattttactgtctatacacataaaagtatcatagcttggaatacacttacgatactgtgtgctacttgcagtcagccaaggctataaaaaaactatgtgatgctctaggagaatccctgtctgtgcaccacaataatattcttgaatcacttttgaaagaactacctggtcgattttgggaggtaagtagtactatgatttttctatctgtggcatatcagtgaatctttccttttattcatggaataaaataggatggaatgcttagagattttcaagaaacattatccatgactaggttcataattcatttttttcgccatgaattaccacagggaaaagatgctattctggatgcactcgctgcactttgttcgagctgccatactgctatgagtgcagaagactctggcatgcctagtgttattctaaatgctgtttgtgctgcatgcagtaggaagtcaaaattgtaccgtgaagcagctttctcgtgtttgcagcaagtaagtatctctcttctctaccctgatctctatgtgaaactgaaatttgtggctagtggatactctaaagcattttactgtttgtggaccagacttttctttgataaaaggatttttagctgttagatagctgtgttcttaacctagtgctcaaaaggtttatgatcttagatgcaacaaaattgatgagaaaattactttcatgcttaatactccctccgtttcatattataagtcgttttgacttttttcctagtcaaatttatttaagttagaccaagtttatagaaaaacaatattagcattttcaccacaaaacaaacatatgaccaaaatatattcaatgttagatttaatgaaactgatttggtgttttagatgttgctaaatttttctataaatttgggcaaacttaataaagtttgaataggaaaaaagtcaaaacaacttataatatgaaacggagggagtgggtatttagtttgaagatctttccggaaatattgcaaacagctctcttctcaaaatattatggggagcaatctagattgtcagtgttatattttcacaaaagacattcatcgggtttaggtgttgtgttgggatggcattttgacattttctatatattagaatttacttagttttctttttctttctttaccacttttcaggtgattacagcattcaaagatccaggattcttcaatattgtttttcctatgctgtatgaggtttctaatcgatctgtcatttgtaaaacaaggaactcatcttcactcactgcatcctctagtgctggtcagtcattaattccagcccctcactgcattcaactaatgtcaatgctggatgaaacatcttgtaaatgaatactagaacttctattttattatctcattctttatcacataaatatgatatagtactgatagttgccatcacaacacaatgtttgaaaaccttgatgggatcggcttaacaagacaactttagaactatacattgttgcccttaatgcagcatacgtgcatgacttcaaaagccacttatcctcctttattttttatgtattactgtcttctgcagagcaagatgaaactgaaggtgtttctgtttctcttgataaggtgctcaactgtgtagcatcttcaatcactgttgctttcctgcaagatattatcaaccaaaggaagaatatcctggaaattattttaaattctctatcccccgaggagagttggcagagtatgtatcttgtatgcaagatctattataattctatgcaactgtttttgaatctcacttatttgatacatcaccactatcattgatgctttttttatggatttctatgtgcagttaagttgtcatcgttcttgtgtatcaaagagttgtgctataaattccagaattcagatggtaataacacttggcctgaggaaacaacttacttggttgaggaggtacatcacatagttgtttagtcctacacaactgtactctttagttcagtatttggtttcttcattttcctgacaaatttcttttaatttgaccgttcagttatttcattcaacagcaccaaaagttgtggatgtcatacgcttagttaagattgctcaggtaatcatcagtatatctagccctcaccaattcatattatattgtgtttgctcatatttattacaatctcatatagcacttttaaagtttcaccataagataatttgttgtcttccttctaatgaataaacatattgtagtttactacttgtatgttttatggcaatgggagcatgtgaactgaaattgcactggacggagctgttgtgggtgttatactaaatttgatgattgcataacaccatttggcaccagtttttttatagattatttagagatgatacaaaattattcatcaaatattcagggaaaaataagaacttgtctttagaaaaaaaaaaggtggctagtctggtggtttgatgaaccctggtgcacatggtttacagattactgctttgcttctttatgtaacagttcatatgcttgtttttggcttcactgattttagaacaaacagttacaaggtttcttgcactgactgtaacatataatttatatcttgaaaggacgagctatccaagatttatgtaaaatataattgttacatactatgctagagtatattagactactgtatattgcacaaaccagcagtttctggatatgcaatctgagtttgaattgccccctcatgactaacttcttctcaggttcacaccgctgcttccgagtgtctccttgagttgagcaaattgtatagagactttccattggttgacagaaaagggcccaagttctcaggcgaacttgctgaactttgtgagtcggaaaaaagcgagcaagcaaaggcatttttgaagcaatgcatggatattctcaaagacttcgaagatcccactggattagccatggagatggactaagtgaagctctcgaggttaaatcggcatagtaaatatcaaaaacaaggctgcgcatgtataaagggcgcgagcaccagggaaggtgggttattctcgcaaattggaatcaccatgtaataggatgagcgtttcattactggttgcatccgaaggaaattctgaagctttgcatccgcaacccacttgtgcaacatgccctgccgctgttacgatttaatgtttttctcccagaatgtagtggtgagctaccagagattggtttcatgattctttcaagtctcaacttctcctagaccaggcccgcttacatctggcagctttcataggtcataaactgccctcacagaccaacacatgcccacacatgcttgcgcaactgcgacacacgcgcccgtgaaaactcgggaagaatttcccgatcggtcacccatccctaaattgctccaggccaagcacacactttgtccacactcgtgcacactcgggaagaaattctcggccaagcacacactttgtcctcactcgtgcacacttgggaagaatttcccgatcggtcacccatccctaaattgcttcaggccaagcacacactttgtcctcactcgtgcacactcgggaagaaattcccggccaagcacacactttgtcctcactcgtgcacacttgggaagaatttcccgatcggttacccatccctaaattgcttcaggccaagcacgcttaaccttagactctcatagttctttgaagattggcttccggaaaaaagttgcaacttgttgatatgagtattctattaattatattaagccttagaccaggatgtcaaaaaaggaaccaagaccttattatacccgagagtgatacttatgctaggaaacatatactcatcctaaagaacgatttttgtatgaagggcattgattattcaatccaagaacttaaacacaaatgtgtctatacatatatggtttctgtttactttcacccatattgggactaaattgagacggtttacaggttacaatcacatatgacttgtgtaaaaacattaaactgacgccaaccgatgtatcttcggacttcttttctgaatccctattatgatcatcagggacttaagtggttagcttgcggagagcagtggtggtcttggagcctgactgccttcccagatgcttggagatgtaatctccagcatccatgagcttgttgaggtcaacattggtctctatccccagtccatggagcatgtacacaacgtcctccgtcgcgacattgccggtggcgccctttgcatatgggcagcctcccagtcctgacactgatgagtccactatgttgatccccagctggtaatacaaaaggaaatgttagaccaacagagcatttctggttgttctgtgtctgtttttcagtaagatggtttgttcattggcattggcaggatgtgaagtgtggttgcttacttggagagagaccagtatgttggcaagggcttggccgtatgtgtcatggaaatggacggcgatcttgtccact

SEQ ID NO: 8282 - DNA, 67632 bp, Oryza sativa
ccgccttcttgtctcgcgccctcatcctccccacgcgcacgccaccgagagggaggggggaagccgcgccgagctcctcatcccccgccgccgccgcctctgcgtcacgcgccgccgctccatgtcccccgccgacgacgacgagagggagggggaagcggcgccgagctcctcatcccccaccaccgccgcctccacgtcacgcgccgcggccactgccgctccgtgtcccccgccgccgctgaccccgtgagagagagaggaagagtgagagtgagagagaagtgagagagagtgtgtgtgagagagaagagagagttgtgtatgacaggtgggtctcacaattttttttaaatagaatgctgactgaactgtcacgtgtagaccaaaaccaccgcggattgggtcgaggggggtaattcgtccggtattcatagttgggggtgaagaatgtccggttttgtggttaggggggtaattcggacagccgcgatagttcgagggtaattcggacagctgcaatagttcgggggtaattcgtacttattttccttctagtaaagtatgttagaaaaatcattctttgattatatcccattatttaattagttccgttagaaaattcattctttgattctatcccattatttaattagttcctggactttgtgtattactagtactactccagcacgttagccgatattaatcatatccttgttccaacaaccaacgatgtagctcgctgacctttaaataggcggttgaggtcttctttttttttaaaaaaaaaaacaatgaaacagatcatggggtctatttagagttctgaaaagcaactggttggtagctagcttctaaaaatatgaaaaatctgtgtttcccaacttttgttttctagtttattttttaaattttacaactatatcttcttaaaatctaaataaaaaactagaccgtttgagagagtttctaattctagaaggagctgcatcagctataacctccccaaacaagcccaatatatatgatccggctttcgagagaaagccaagatagcaagagagtccacggctgaaatagcgaaatgccctccacaaccacggcgccggagaccgatcctagcaagaccgtcgtcgaggagatcaccggctggctccgcctctactccgacggcacagtcgagcggctgacaccaccgggcgcggagcccttcaccgtcatcgtcccgccctacaccgagccgcgcaatggcgtcaccgtgcacgacgtcaccacggccaggggtgtagacgcccgcctctacctcccggccgagccggcaaccgcgcaccggccacggcggcgtcctctcctccttcacttccatggtggtggtttctgtctctccagtccatcgtgggctctttaccacaacttctacgcgcctctcttacgacgaagctcgacgtcgccggcatcgtctccgtcttcctcccccttgcgcccgagcaccgcctccctgccgccattgacgctggccatgccgcgcttctctggctgcgggacgtcgcttgcggcgaggacgagaacaacaacggcgccgcccaccaccttgatccggcggtggaacgcctacgtgacgaggccgacttcgcgcgcgtgttcctcatcggcgacagctccggcggcaacctcgtgcacctcgtcgcggcacacgcggcggcgaaggatgacggcgcgggggctgatctccacccagtgaggctcgccggcggggtacttctcaatccggggttcgcacgggaggataagagccggtcggagctggagaacccgccgagcttgttcctgacggaggagatggtggacaagctcctggcgctcggggtgccattggggatgaacaaagacagcccgtacacctcgccgtcgctggcggcggaggccgtggcgcgcttgcatatgccgccgatgctgctgatggtggcggagaaggacttgctccatgatccgcaggtggagtacggcgaggccatggcgcgcgttgggaagacggtggagacggtggtgagccggggcgcggtggcgcacgttttctacctcaacttcttcgcggtggagtccgaccccctcacggcggagcggacaagggagctcatcgacaccatcaagacatttatcgacagatactgattctccctaatagcaatttgcaatgaagatcatgcatgtattgcatgcatgcatgtcctgtgagataattcgtatgtgcaggtgcatctatcttttagccatgcactggtccatctccatccgtgcatggatgtatgttgtgttcagtttctgcatgtttgttacacctagtttgatcggtttggtgaatgttttctagttgggttcaaacttccctgttaaatttcctgcgtgaataaaatagagcatactcagtatgcatgagcatattggcatccaattacatgcagcgtttttcccgattacaccgaagactgcacatataccaccatattcacaagtgtggccctcaacttacattcaaattagagaatgagaccaatgccatatccttggccccataaattcctatcgacaacacactggggtagtcgggtgtgtaatattcgtggacactaggattagatgcacattttattcgactggtaaatcacatatttcaccgcaagaatatgattgcttaacaatatagttttttttctactaataaagaaaccattcttatcgttcttaatggttcaaaagatatcttatcattcttttggaagccattaagtatgtggttccaatagtaacatattgatattactgacacacaaaaacattttttttcatatactatgatggtttttaaacccttatatgataaccctttgtatagttacatgttagtgtgcaccgaactacacgtactagttgtgtgtttacatgaaaaaaacttcgtcggggtggaaataaagaaaccctaagatatcttatagtatttgttggttgcttgatattttcaaacgctatatatcacttttgaatgatccatatactactctaaggttcgaatatatagccaggaagtaatcataacccaacaagtctctctagttctaaaaataaatacaagtattgtctctcaggcctacctcacaagcatccaccacctcatcgccctctaatggcctctcaaaaaatatgacactagatgactctcctatagagaaatacttttatctcttaaggaaatatcctttcatttttacatgacatctaaacagttacaaaaaaatataataagataattaaattattcatatgcgatatatatcatttcataaacatgcatgattattcatttgacctataaaatctgaaaaagaaagaacaaatatgacatgaatcaacgaggggaaatcgcacatcaaagtatgaaaaaaagaatgaagtgcataaacttgtgtgggtgggtcatttaggttattaggtccctgaacttgtcataggtgtaatataggtccaaacaagttctaacccgctccatgcgctgacatggcattgctatggtggcacctacgtgtcaattaatggaatccacatatcaagcatatataaaaaataaaattaaaaaccatattttctcctcttaagtagatagaaaaaagatttaaaaaaatctaaggtagagaggatagaatatgtttttttccctatatgactgacacataggtccgactaacacgtaggcactgccgtggcattgccatatcagcgcatggaacaagttaaagcttatttggaactatatatataacacctaagataagtttaggatcaaaaatgcatcttaagagacctagatgacacacccgtatggccgcataagttttagaaaccgctcgagcagttctctctatgaaaaactatctcctcctctcacaccgcactagtacagatccttctatctgtgacgggctctaatatgtttagaaatagcgggccgtcacaaggaagtcatctcaatcgggccgaaaagtgtccgattgagatatggtcgcacagacatattagatgggcataaaacttaagcccgtcacggatgacacctatcagtgacgagccacaactttaggcccaattgagataacattctatatctcaaacgggcttaaagttgtggcccgtcacagatgaccatcatctatgatgggccacaactttaggtccgtttgagataacattccatatctcaaacgggtctcaagttatggcccgtcacaaatgaccatcatctgtgacgtgcaccaacttgaggcccgtttgagataacaactaggcccgtcacagatgactcatcagtgacgggctatatacttaatctctatcgggcattaactaaagcccgttaccgatgactatttttccatttttcatatgaaatgtttatatttgtaagttgactatagcaaaataatttagtgcagtataataattcattttatgagtcaaaataattttacgggtagtaaatgatttcaaatagaaaaatgtcaataacaaagttgtataacttatgaatatttacaacttttagtttggtcatttttcaatataacatttttttgaacagtttgaatttgaatttaaaaatatgacaacttcaaacaacattttcaaatactaaatgatttcaattgaaaaagtcatcaacaacaaagttgaataactcatcaagatctaaaactttaatttttgttatttcttcatccgactaaatgttagtaatattattcacaaattttacatatatgtgttatagtttataaaaccagataagagatatgtcaattttgtgaacaatgttattatcactttgtcgtatgaagaaatgaacaaaataaaagttttagatcttgatgagttattcaactttgttgttgatgactttttcagttgatatcatttagtatttaaaaatgatgtttgaagttgtcatattttcaaattcaaattcaaacggttcaaaaaatgttatataaaaaaatgaccaaaataaaagttatagattttgatgagttatacaactttgttgttgatgactttttcagttgaagtcgttcactgatctaaaattctatttgaacttttcaaactttgaatttcaaattttgaattgtttaaatagagtcagatggagaaatgaccaaaataaaaattttgcacctcgatgagttctacaactttgattttggtgacttttccatttgaaatcatttaataaccctaatttgatatcctggcctagggcataataggattaatagaatactcatacaacatgttacaactatttttccgaaagccaatctccatagaactttgacgttaagtgtgcttagtctggagcaatttcgggatgggtgaccgaccgggaagtttgaacttcccgcgtgggtgcacacgagtgagggctagccaaaaaataaagtttatttatttttggaatatactcatctgtgacgggcattaactctagcataagttaatgcccgtcacagatgactcatctgtgatgggctagtcatctgtgatgggctagtcatctgtgacgggccatagttaatgcccgtcacagataagggtcatctgtgacgggcactagttgtggcccgattgagataggtcatctgtgacgggctatagtttgactggtcgtctgggtcaaagctatcggtgacgggctttacttagggcccgattgagatagaatcatctgtaacggccgtttgttcgattgagatagctcttaacatcagtgacttctagcctgtgacggacgccatgcccgattgagatggggcttaccgcccgattgagatgaggatatccgttctagtgccgtgccatatcccgaacatccctcgatcgaatgacagctaactcactgaaaaactgcggcattggcgatgtggtttcgctgcttggtcatcactgctccgtcgtcggcttgccgggaaaggactccgtgttagtgatatttgaagggcaatttgatctatccaacggctattgttagtcaactgcatgggatttagggaattgcagttgactgactttagcaaatacgaactgaaactccaacgaagaagcaaattaacttaattaataagttgagcagcctgtaggcctgtagttggttttggacatggacattccaaccacattactatatatcaacctataagttattggagcaaaatagtaatcctccattccagagagatttgataggacacaccattttatcggaagtgttaggtgcgaagaaggccaccattttctgtcgatcgagctttattaaagctagaccgagacgaaacgactcaccaagactaagtgaaagactcaaattaacatactacaacaaattaaagacgacttgagccaatcaacgatggcgtcaagccagcgcgtccacacgacgtacgtatgcgcgcagagtttgcaaggccaggtcatccatgctcgccgtgaatccgtgctgcgtctataaaacacaaacgcagcatagccagttcatttcacattttcactgctacgtactcgatcatctggccagctgctgccatggcaacattgccacaaatggccgcgaccaaggagcgtcaagaggcggctaacccgaccacgacgaccaggacgctggtcgagtccgtcaccaactggatccgcgtctactccgacggctccgtcgaccgcctcggcccgccggaagccgccgcgttcatggtcctcgtcccgccgtacgacgacccacgggacggggtcaccgtccacgacgtcgccacggaccatggcgtcgacgtccgcctgtacctgacgacgacgacgccggccgggcgccgccctgttctcgtccatttccacggcggcggcttctgcttgtcccacgccgcgtggtcgctctaccaccgcttctacgcccgcctcgccgtggagctcgacgtcgcgggcatcgtctccgtcgtcctcccgctcgcgccggagcaccgcctccccgccgccatcgacgccggacacgccgcgctgctctggctccgtgacgtcgcgtgcggcaccagcgacaccatcgcgcaccatgcggtcgaacgccttcgcgacgccgccgacttctcccgcgtgttcctcatcggcgacagcgcgggcggcgtcctcgtgcacaacgtggcggcacgcgccggcgaggctggggccgaggctctcgacccgatacgcctcgccggcggtgtcctcctccacccgggcttcatcttgccggagaagagcccgtcggagctggagaaccctcccacgccgttcatgacgcaggagacggtggacaagttcgtcatgctcgcgttgccggtgggaaccaccagcagggaccacccgtacacgtctccggcggcggcggtgacggcggcggagggagcccagctgccgccgatgctggtgatggtcgcggaggaggacatgctccgcgacgcgcaggtggagtacggcgaggccatggcgcgcgcgggcaaggcagtggaaacggtggtcagccacggccgcgggatcggccacgtgttctacctcaactggttcgccgtggagtcccaccccgtcgcggcggcgcgggcgcgggagctcgtcgacgccgtcaagagcttcgtcgatagccactgaatcgattccaagtttgaatcggtgtctgcttctatgtctgaatttgtgtcgaaatcctgtatccatctcaccgtcacgtagtacatgtctacatcgcaatgtctctgtagttaaacaagtttcccgcgcaatgcatacgtgttttcgtttctccgatccgcttacgaaatttcgatttgatggagaaacacgtcgagaagatgctcagtttaggctttcgtttcaacccgtctgcagaggatctcatcaccttctacctgccacggctgatcgccggcaagccaatgaaagacaccgagaaattcatctgccgcgctgatgtttacggcagcgagcccagtgacctcgccggaaagttcgcgccggtgcccaggtgcgagaaaggcggcaggttcttcttcactagctgcaagcggcacaaggggagtagcaccaagaaagagcgaacggcgggggctggcacctgggtgaggcagaacagcaaggaggtgaagaacaaggcgggggtcaaggtcggcgagacgcagaacttccgtttcaagaaggacgggagctacaccgactggctgatggaggagcaccactgctgccggcagcaagccgtcgccggcgacgaggagcccgtcatctgccggatgtacgtgtccccgcgggcgcctccggattccgcggcgcgccaggaatccgctgctttcgtgcagcagcagccggcgccgcaggtttccgagccgccgtgcgacaagaagaagagagatgatgtggcagaagaagcccctgccgcggcttaggcgtcatcagaacagaatatatgatttgaactttttttaccaactgtatgtgcatttccagtgggataaagattctaaccaaagcagagactaaaaacatgtggggtaatgttttttcaatgaccataacaaaattatttcgagagcaatacaggtgcaaagttgaagaaagacttcctgctatctgaactggggtgttgccacacatacaatgaactctgcaacccagacagcactaacctatagatcaggcatcccaattccagccttggcatcataggttttctccagcacatgttcaattcgtgtatcctttgggccagctgcatgaatgaaacaaaatggccaaatttagtttcctcacaaaaaaaaaagaaaatatatacatcatatgccgagtaatatattgacactttgacaggaaatagaacgcatttgcttgcatgtcaattacatattagtcattcgataatagatagccaaaatacaaaggcatgtaacaaacatatttagtattttgactccaggtatgtaaaggtcatggatagatcagagtcatgatttttctttttcagtttgtattattagttaactgctattatcgttccaatgcagaacaattacaaaacaaacaatagtaccacaagccaaacagcaaacaccataagaaacatctactgtagtaaactagtaattatgcatgatgttacagtaccaaagattattataagcacttgatgctttcctttattagtatttattattattgtgatctcagttgaacatcaaactggtacagcttaatttctgatccaggaaaagaacagcatagacaccacaaaagtatatatgcacttgacaagggaaccatgcaatgaacagagacatacgtgatgtaggtcttggctttcttcgctccttcaaaatttctggcctgggtatcacagcaccagatgcattcattcctctagcaaacctgactttagttccatcttccaaatacttgtatccaatcttacatggtttcctgttgccagcgttgtgtggataaatttaccttttaccagtaaactgcagtagaaatggaagaaaaaaatattctatctagatgacaagatggatggttaagtatcatacccagtgactggatcaagtacttgaacatttgaaacatgaagtggagcttcaattgagaaaatcccacctgtatgtccttctccttgcttaatatgtttcttaacctgaaatgatattaaggcacaattattattatccaaactcttatgtacaagagaaaacactcacatacataagaacaagaaactgttgtctgtcgttagttgttacttcctccgtttcacaatataagtcattctagcattttccacattcatattgatgttaatgaatctagatagatatctatctagattcattaacatcaatatgaatgtgggaaatactaaatgctaaaatgacttacattgtgaaacagagggagtactgattacagctgcccagtagtcaaaaagaaaaatgtgacacgtaacaacaaacatgtgaagattttagaaggacaaggtttttacagtttcaccattcttctattgcacccattaaaatcaattcctcaagatccatctggatactggacgaaactaattcagtatttactcctctttgttatggcatacaaatgatacaaacacacatgatatgatccaaaatagatacagcatgtaccattatgcagtacatagaacacaaggatccagcaggcatctacaatttctgattattctatgcataaaggcagatgctaaattatttgaccactgcttttgttggatcacgcatagctaattgttgagcttatcataaacaccactctctatatacgatgatatgcacaggtatccaaatcctcttgataaaaactctcttcatattatgctatccttgtgccatgatggatatatagtccgcggaataatattacgttatgagtatttacaggttcaaattcgtatgaacaacactccaatggaaacaatggtcgagcttacatctgttacagcaagtcataagctatgtttgtgacagcagtcaaaaactatgtttgcagctcctacgactaatctgaactcaggacttgggagtttaaaaaaaaaacgagtgcaccatggagatcaggtcacatactgccatctgacagatacagcgttgtaagctcttttatctcattattaaatgaagcttttgtgcctctattctaaactttcaatagttgggcttaaaaccttttcaaaaaaaaaaaggaaaaaaatgcagtagtttgcatcaggctaaataataaacggtaattttctgaaccagttaaaccgatgacacaaaaccttgaaatctttcaaccaatcagcacaaaatctatgcagtatttgacaatttctggaggagggtgcgtcagtatagcaataacttaccaaattctttccctcgacgatgacacggttctgcgaccgaatgacccgcttgatgagcccgctctcccccttgtccttgcctcttatgatcatcacctggaaataaacagcgccgaaattggagattttgctagaaagaggagaggggcgaagaggaatgcgaggacggggaaagataattacgttgtcaccgcggaggatcttccagtgtctgatgagcttctccgcagccttccaccccatctctctcgactagatccctcctctctacccagccagcggctcgctcctgggctccccctccctcccagtaagcttcaaaccttggttgcggcggagatgggggtggcggcggcggcgagggagccggcgctagcggcgaatgtgatgctggacagatcagagtgggccgagaagaatgattcgggcatttaattgggccgtttccttcaaaaggtttcggattggaataagttcgggagtgactccctttactagtgaccttatctaattcgtatccctgaaccacagtacgaatatctcgacccctaactattaaaaccagtgcaatttaactttaactgttttgctgacgtggcggtgttgacccagtcttcatccaacatttatgtggtattagaattaaaaaatatatgtagtacccatttgtcactcacacaaaaataattgtgggacccacttattatacgggcccacatgtcatcccctctctctccttcccttctccctcctcccccctctctctcttatctctctttctccctcccccctcccatggggcctttctcttcacctgggtggagcggcggtgggagcggcggcggcggggtggggagcaacggcgccctgagggagctgcgttgcacacgtagccgaggaggaaaaggcggtggcgcagcggcgcgagggcggatggggagcacatggccggcctgcacgccatggcggcggcaaggacgggcgtcgatccagctgtagaagaagagcggtgggggtgtggctccacccgatgtggacgcggtcgacatggcaagggaggcgggtggtgacaccaaggaagacatctgtgcgcaccaccggatgcctccgtcttcgctacccaccacgccaatgtctccgcttgccactgtcgccgcccttcctctggccccaacacgctgctcccacctagcaagcggcaaccacccgcctctccccacctccgccgccgctgccaaccaccggacgccgccgccgtccccactgtcatatatagtcagataaagagagaagggagagagagaggaagaaggggaggagagggccccacatgtcatcctttgtgtaaattggtcctacacataccctttttaattctaattctacttaagcgctacatcaacgccacgtgaacgaagacccggtcaatattgccacattgatgtcacatcagcaaaaccaccctccaaaactactaagggagttaaattacaccagttttaatagtttggggtcaagatatccgtattgtggttagaattagattcggccactggttaaaggagtcaacgtaaacttattcctttcggatttgtttcgtttcgcaccaaaaacctatgggcttatggtgggttttgtgaaatcctctccggcctatatatagtcatctatctctcctctctcgatttggaaaaagaaaaaaacagtttctggtaggcattctcgaacgagatatgagtaatgaaatcgaagaggcgtgttgagtgagctcaaatcatcggagttcccattcaattgccttttgtttgtcaactgtgcaggttgatgctggcatgctgttagccagcttagcacacgttcttgtcaaatactcgagtgacaagaggtgttatgcagttgattctgtttctgattaatcttaaattgttaatcctcggatccaacgcacaagcagttgaccagttgagcaaagtagcaactgagtagtgtgtatcaacgacccttctcttcgcagcaaccagcaataccattaccagtacagttcagcaactaatcgtgagctgattagctgaagcacataacacgtaaagcgtccatgacgatggagaaacgcacgtcaccgcaacaaccgccaactttattacccaccaactgctcgacgcatttcctctacgcgcgcgcgcccaccaccgccggcgtcacacctcgccagccgcatcaaagcttccgctcctacctcgcccaaatgggcggcaccggcgacgatggcgccaaggcccctgcggccgccgcggccatggacgtcgtgtcgtcgtcgtcttcttctccggcgccagcgccgtcggtgctcaagtcggtgctactgtcctatgcgtacgtgagcgtgtggatcacactcagcttctcggtgatcgtgtacaacaagtacatccttgatcccaagatgtacaactggccattccccatctccctcaccatgatccacatggcgttctgcgcctccctcgccgtggtgctcgtccgcgtcctccgcgtcgtcgccgtgccggcgtcaccgcccatgacgcccagcctctacgccgcctccgtcgtgccgatcggcgcgctctacgcgctgtcgctctggttctccaactccgcgtacatctacctctccgtctccttcatccagatgctcaaggcgctcatgcccgtcgccgtctactccctcgccgtcgccttccgcaccgactccttccgccgtgcctccatgctcaacatgctcggcatctccgcgggcgtcgccgtggctgcctacggcgaggcgcggttcgacgcgttcggcgtcatgctgcagctcgccgccgtcgccgccgaggccacgcggctcgtgctcatccagatactgctcacctccaagggcatgtcgctgaaccccatcacctcgctctactacatcgcgccgtgctgcctcgtgttcttgacgctgccgtggtacttcgtcgagctgccgcggctgcgcgccgccgcgggcgccgccgtccggcccgacgtgttcgtgttcgggacgaactcgctgtgcgcgttcgcgctcaacctggcggtgttcctgctggtggggaagacgtcggcgctgaccatgaacgtggccggcgtcgtcaaggactggctgctcatcgccttctcctggacagtgatcaaggacaccgtcacgccggtcaacctcgtcggctatggcattgccttcctcggcgtcgcctactacaaccatgccaagctgcaggggctcaaggccagggaggcagagaggagggccgcgtcaatggcgacggcgaaggacggcgacgcagaagccggtgcgcggctgctgccggagaaagatgccggtgagcagaagaactgatcaaagtcgaacaccaagcatagtacattaatgaaggttgataaatcaacggcatttttttcatctttagatagcctgaagctgcttagtattatgtttgtaaacattcattattacagaggatacaaatgatcagtgattcgaaatatgcatgcttaaattgcagcattcattttttttctcattttaaagattcagtcatcgtgttaaaactccttgctccctgggcactagtgttcatctaacatcactgtcacatggttgttaatcgtagcatactagcattctgtttgttgattgtgctatatatgaatgatttggtgcacgatgcagtaatgcagagctccaaacctgataatccactggctaccaaatactaccttcagttttactcaaagtgcaacaagaaaggaccaaaagacaaacaaatgcagcaaggaaatgacgcaaagtgtcattacagtgaagatagtatattgagtgactagtaggtcagggtagtagaagagaaagggatttgctagcttcctactcgtacttagggcaagttttataatagggatagttgtcacatctaattttatccatgtaagataagaggtgatatatataatacaccatatctacaccacctctattattataacccaaataattttattttatttgtttgtccaatcccctctttctttcatcttctttttcttggggtttgtgtggaggttgccccttgcatgatagggggctcaccttctctttcctcaattattacttccacctcatcatccaatcatacatgatatttttagaggcaacacattaagcatcatagtacttgcccttactgctgcctacgatataggagtatcctcctaaaccctataaactctaatactaagggcttctttaaaacacaggattaaaaaaagatacatttaaaaaaaaacaaaggattttgatagaaatgcaaataccaaatagagaattataaaacacaggaaaaaaacacgaatgatcgtttgattaggctataagaatcaggataagagatagacttcaaagaaattttcaaagaggttagagctcttgttaactttcctctaaaaattttaaagaaaatgagagaaaaattcacaaaactacaaatattatgactaaagcactaaaaatttaattagtgtatcacaaaacagcagatttaacactaaatttatcacaaaactatacgtttaagatgaagtgtcacaaaactacatatttagtaacaaaattatcacaaaactatgggtttagaaccattttagtcacaaaattacaacacttattgctccaacataacaatggtgttagggatttaaattctaaaatatgtacttttgtgatgaattcaatattaaatatgttgttttattttttaaacacattaaatctgtagttctgtgagaaatttggtgccaaatttgttgttttgtgatagtttggtcaacatacatgtagtttgtgaaatttacacaaaatgatatgattcaatccttgtttcaaatgcttttataggaatttttataggaattttttcgatatgattaaaatctttcaaatttgaaatcaaagggggggggggggtaagtagtactatctttaggttcattaaaagctagcaacaagaataccgaagccatcatttcgcttatttgcgaactaagagaaacgacatatttgcaaataaaaagtaatttgtgaataaaactttttatatatatgttcttaaagatctaaaagcaaaggctaaaaaataaacttcgatgaaaaaaacctcaaaattagctccaaatttacggttgaaaattcaaaatttggctgataagtataagtataaacgaaaagcagctccaaatttaaggttgaaaatttaatttttgactgataagtataagtataagagaaaagatgaggccctacatgaagtcctgtccaatcatatatgcatcattgactctctctctcctttcaattgtattaatcgagtaatatttcgctgagtctgattaacctaggccgcgttttgttcgtgtgccaattttttttaagtatacggacacacatttaaagtattaaacgtagaataataacaaaacaaattacagattccgcctgtaaactgcgagacgaatttattaagcctaattaatccgtcattagcaaatgtttactgtagcatcacattgtcaaattattgtataattaggctcaaaagattcgtgtcgtaatttacatacaaactgtgcaattggttttttatctatatttaatgattcatacatgtgtctaaatatttgttgtgacgggaatttttggaagtttgaaagaaacaaaacactgccgtgcatttcgccgcacattggaggcccatcaagattttatatggccgccatggtccaaggcctcagggacatttcctgtattgggctgagccggactcttcgtcaaggatgaatttgtaatcagtgaaaaaatcgaggggctggatgcaaatctccattcccatcgtattcctctccttccagctcgagactagggctcgcaggtggcttattccccctaatttgctcgggaccagaccacacctccccaaggtgagaaccaaatctctgattccaatcttgttacgttcttggttgttctttgccttgcgatttgggagcggcagcagcagtaaggcgctcgtcaagatctcttcttttcaattgttggggtcgcgctagttcgtcgaaatttatcctttccgattgctggattgcgtcatttcgttaatatttctccttcccaatacctatcttgtgctatttggaaacgagagcactaatctacttcttcgatctaatatgtttgtacaggcccttgtatataaacgaacaaactttactcatatattcagtccattaattttaggtcctaatagttgttttttaacttatgcgaaaattgcaatgtgctgaacagtgcaggtgatatctctttcttaacgaaaaatagagtcagcatgtaattatctatatggtacttaagatcctaaaaattaagcaagggctaggttgattgcttgctgtttgaaaattgttccagttagcattttgctccattctttgttattagtcagactctcaactgctgtcatgttatttactcaggaattagatttttacttcagatatcatattatgcaaattgtattctatttctcatcgtgcttttatctctgtgcctttttcttttcttttcctttcccttccatttcacggaatatattggcatcatcagcttgttgattattcttcgcattgcatcatctttgcttcccctcttttgcatgctcttgctgtccatgctgattggggattgtatcttgagaacctccccgtgtaatcctttgtaaccataccactgtttcctcatttgttccatatacattttctttctatccagttggatacccatggctgcatcctgtttgacattattgcataacaagtactcttgtttatttggttgtttttcttcctatccttgtatcatcactttgctctcccaatattgttggctcctttgctctttccaaagttgccttggaactttgagcttttcaagatgccaaggaggacagataatgctgcttctgccaattcagttgaaccagaaaaatcagaagaatgtttggagtttgatgatgatgaggaggaggaggtagaagaggaggaaattgaatatgaagaaattgaggaggagatagaagaggaggaggtagaggaggatgaagatgtcgtggaggaagttgaggaggtagatgaggaggaagatgaggaggaagaagaggaatctgatgaaactgaaggtgtaagtaaaactaaaggtgttcaccagaaggatgttactgaaaagggaaagcatgctgagcttcttgctcttcctccccatggttctgaagtatatgttggaggcatctccagtgatgtatcttctgaagatctgaagagactatgtgaaccagttggagaagttgtggaagtaagtactgcttacattgttcattttatgtttccatgtggcctgttttgttctgaattacatattctcccgttttatgcaggtgagaatgatgagaggaaaggacgatagcaggggatatgcttttgttaattttagaacaaaaggtttggcattaaaggctgtcaaagaattgaacaatgcaaaactgaaggtttgttttctgttgaacttgagaaatgtctatactgtcactccatcagtgccattgatttttaacctaagattggtaattgatcaagcaagttctggacatttttactacaccttttgcagtttccaaatgtgaactggtagagaacaaaatagtgatttcactcgaatattatcatgcaataagctttccttttttttaattttttttcagtcttattgcacttatatctgcagttgacttctgttgattttgacatagcacagtaatttcacacatcagctgtgctccctgtttccctggatatgtaggaagaaagagggaggggcacacacatatctactatacatgatctctagtaatatcatggttttgtaacgtgtaatatttggttaaaactactgattatgccattaacaggaaacacttgttcatgattgggagtagtggtagcttatgttctcttaccaataattttggaaaacatagctttgctgccttgatcacacacatgtgcagaatatctcctggttccctgttatagctgacaacttatctatcttgatcttttatacctactgaattttttcattatgcttctcgttacagggaaagcggataagggtttcttcctcgcaggctaagaacaagctttttattggaaatgtaccccatagttggacagatgatgatttcagaaaggttgtggaggaagttggtccaggagtattaaaagctgatctcatgaaggtatggatctgggtagttcaacaactttgttatgcaccctcgatcttgtttctcctaaaaatttctttgtacttgtaggtctcaagtgcaaatcgcaatcggggttatggttttgttgaatactacaaccatgcatgtgcagagtatgcaaggcaggagatgtcttccccaacattcaaactagattcaaatgctcctacagtcagctgggcagatcctaagaataacgactcggcctctacttctcaggttcgttcaagcataacatgaacaattttactttgtttgtgtataattcttataccatgatgttttatttgaacttgattattttgcgtgtgttttcaggttaaatctgtatatgtgaaaaatctgcccaagaatgttactcaagcacagctgaaaaggctgtttgagcaccatggtgaaattgaaaaggttgttcttcctccttcaagaggaggtcatgataataggtatggttttgttcactttaaggacagatccatggccatgagggctctgcagaacacagagagatatgagcttgatggtgagctttcctcttgcgctgtaatgtcccactatgcttgcgtattcccccaaaaaatgtcccactatgcttagtctggtttgtctggtgcattcaaggtctcacatatttctcttaacaggtcaggtcctggattgctcacttgcgaaacctcctgctgctgataagaaggatgatagagtaccactacctagttcaaatggagctccattgctcccgagttatcctccacttggatatggtatcatgtcagtaccaggtgcctatggtgctgctcctgctagtactgcacaggtacacgagtacatcatcatcatagacccctttgcccaatcaatgagtaaatacatgtagtaaaggatgattgatgcccttctaaccattgtatgctctgcattttgcagcctatgctgtatgctccaagagctcctccaggtgcagcaatggttccaatgatgttaccggatggtcgtctcgtatatgttgtgtaagcgctaccaaccatcttttcttcagaaaagctaataacatgttatcacctatcagcatgagatgagatgaaatgacttctgttcagttacatgtcattttggcatttccattgctgatgatatcttcattgcttctttgcagacaacagcctggtggacagttgccgctggcttcgccgccgccgcagcaagctggacatcgtagcggcagtggaggacgtcatggcggcagtggcggccgctatggcggtggtggtggcagctccggcagtagcaggccaggtgcaaagcggcagagaggagacgacaacagcagtagccgccacaaaggccggcgccgcccgtactgatctgatcagcatagctgtagctaccacttagaagatgtagtgtcgttgcagaaaattaccagaaaatctggtagaaataatttatactgtttgtactcgtcgatttattagaggaatgcgtttctgaaacaagactgtacatgcgtattttacctgtatcgcagagtgctgaatctgatggtgcactggtacagtataagccagtttcaggtctctttgtaagcctgttttacattatctttcgcttttgcagtaccgtcaattcacccctgtaagccacatggactatgagatttctgggccagaatctgaggtagacagtgaggtgtggcttggctgggtggcgcagcgacgtgtgtgctcaagactggagacacggttgatgctgcccgagctgaacacgtcgtgttgactctctcgagaggcggacgggtacgtgccgcccctccatccattctagccttctaatctaaaagcatccacgggctctctggtgcgctgcttctcgactagacgcctcctccggggaacctcgtacagggcggcgcgggccacagctccatattccggtcgacggcgagtccacgaagcatcggacgccggcgacgacactgcaatccggcggtcctggcagcaggtgaaaggtgcgtgctttctccgcctgagaatgattggttaattccctttgcaattaacttgcaaattctttttctaatttgtgcatcaaaatttccggccatatggtgattgtacatgttgtattggacttctaggcgccggattggccaacttctaaatttatgatgcttttgcgcatgacaaaaatgacagatcatatttatccatttacttcattctaatgaaataactcctagttaattatctttaggttgctcatagagtcatagttactcagggttgggctatccggctatgctgtaccgttctatattcattgatattttgcctgcccaatattgtacgcgaagtgctacagttaacatgatcatcaatgatgctaggtgtctgatttccctgaaacatgttaggttcatgatgctgatctttatttatatacgaactgttatgtatgctctatctggtcaagtcatgcttgatagttgatacatccttttgttctgaagaattctagtacaaatttaggtttttgaacaacagggcaatgtcaaaggttgcaattgttaggttagcttcaaatatacatttgcagcataaactgccatgtctctgtccagtagttatgccaatgtttaacctagattatttcatttacttgaggaaacattttttttgaatttagtttctctactctctgaacaatccaacctggtactgttatctgattctgtgaattttctgaactttatacagggcctatttggtgtaagaatttatatatccgcccactcatttagtcatctgcatcttctaagttgggtgaaaaaatatggatgacggggagatagagctttccagccaaatgatgtttccaaatccagagattccaaccagccttgatgacttcctgccaagcatcaggacaacatgcacacacactcatacttgcaacccgcctggtccatcggcaacagagcacacccatacatgctaccacactcacacccgtgtcttcagctcagatgatgatagttgtggaggtgacaaagccaagccaaagaagagccgcaagccattgggcaaccgcgaggctgtccgcaaataccggcagaagaagaaggctcatacagcacacttggaagaggaagtgaagaggctccgtgtcattaaccagcagctggtgaagaggctgcaagggcaggctgcacttgaggtggaggtggtacggttgaggtcgttactggtggatgtgcgatcgaggatcaatggtgcattgggtagttgcccgatccaagcacaatgtggagttgataatgttttgggttgtgatggaatggctcagtgctttgctggaaagccggagttgggtgtgagacagagttgtgcaccttctacagtgaattgccatatcagctcggattcagggcagaacctggtggtgccccatgctttaagccctagcgatgttattggaagcttcatggtctcatctacctcaaaggatgagtagatattgtaggtattattttgttgagtaaattgcatattggtccatgttttttaaccatggtttcacattggaccaccattaactgaatgctttcactttacaccagattttattaccaaaatgtatcactttggaccagtggtccacttgccagtgtggctgaggggaaaaaaaaaaggaaacttctcggttgggaaggaaccagcgagtccgctgactcatctcctaccacaccgttgatctctttccaacttcacccaaccatctcatggcggtgtgggcagagatcacgctaaagccttgggggcaacatggggagcttgtgactggaaagactcgtgtggaggtcgatgttaggcgacgtgagcaaagaggagctcgtgtacgtccaggtacagcagaagtcgagtcacggaggcgacggcggtggagaggagcttgagctccgggatggcgcgcgggcatcggagtagccgtggagatcgaggttgaaccgggacggcagagaggagcttgagcccaagtacgatgtgctagtgctactgaatatcgaggtcaagcgaggtgcgacgacggcggagaggagctctagctcggggacgacgtgcgggcgtaggtgaagaacgaagtcaagctagcgagggccgacggcggcggagaagagctcgagcttgaggacggcacgctggggcgacggagccacgtaggtcaagctggggtggtggataggagctcgagctcaaggacagcttgtgggtgctgatgcctgctggtgcctggaggtcgacgtcgagcggggggagacacggcagaggtcaaggccgggggtggcgcgtcggcatgggactatgggagagttcgaggtcaagacggggcatcaacgtcgagcggggagagacacggcagaggtcaaggccgggggtggcgcgccgacatgggactatgggagagctcgaggtcaagacggggcatgacgacagcggagattgaaatcgagactgggaaatgcgtgtgtgcgggaacaggcggaagtcgaggtcgagccaccggacgacatcggcggagattgaaatcaagccagggaatggcgtgcgagtgcgggcggaagtcgagatcaagccaccagacatcgagcttgagcctgagaccggccggcacgacgggaacaaaagtcgagctagtgtgacgccgtgttggcggaggttgaccccgtgctggctggactacgagcttgagatgcgcgggcgtcagctctgttatatatgctcgagctctcttaggcgtcgtggtctttgtggtctacagccatcgatgaaaacagttggagatgatcagatagggatgagagattggctctgagagactgactatgggccatacgcccaaagtgaaaggttttggtataaaatctggcctaaggtgaaaacattatattaagggtagcccaaagtgaaaccatggtaaaaaaatatagtccaacatgtaatttactctattttgtttctagcctttttatcagaagataagacagtagtattacagtgccgtggagcctggagggttgatgcctcgtttcctaggtggcattttacccctgaaatctggtgcaagttagtaattagttttcaggttcattatcaaatacaaatttttggtttctacgtagtgtaaaatgtctttggtttctatgcagtgtaaaatacacatttccccctcttttccagagataatgttcagttttaggaatttgtgttttaggagctgttaattctgagcatttccttcttttgcagatactctgtccaattctgtgagtggttgggtgtgatattctgtagttgttaactatgcacttttacttcttttgtagagatgatgttctgtttttggaaagatatttaggagctgcatgactcatgaatccgatggctgtataatattttctgcgtgccaaatctcatgatttttccaactcattaactggattaggacacaaatctgcaacagtcagctggagatccctgatgagcagcacaaaccggtcctgaaactgttcaaatacaacaagaacaaatctattatcttattaaagtaatagaaaaagaagccaccacatttgttctcacggcctagaaattaccacgttaatcgaagaaaataagaaaaataaaaaaggcaagcggagaaggatatgttaatagcatgaaaatatgaaaagaaatagtaaagcaatcaatcggacaaggattcatggaaactgtaaaagtgtcaaacatcaataagaaacagacttagtgtgtggaaacggaaatacaacgatacaagtaaaaatagactccggtcacagtgcattagtatcgtttagagtccaaaagtaaaaaaaaacaaaactatttaaaatacctgaaattcaaaatataactaactattgcaagaagaatctatgtataaatacaatttatactaatatgaaattacaattattttttttaggaaatctaaacattgagaccagagttatatagaatttacttaaaaaagagtccatataaaaatataatttaaaaatatctgaaattcctaattaaaaaaaaagaaatattcaaagagaagactagactccatgtatatacaatgtagaactaattaaaatttggaactaaagttagagtccataaagaaacaaaatttagaaataactaatatttggaattaaaaaataaaaaatattgaaagaatattttagattcattatggaaatacaatttacaaataacagaaattcagaattaaaagaaatatgggaagaggagtctagagttcatatagtaatacaatttaaaaataattggaattcaaaattaaaaataagaaatacttattgaaagaaaggtttagagtccatatggaaataaaatttataaataatagaacatttaaattagaaaataagaaatatttttaaattagaaaataagaaatattggaagaggagtctggaatccatatagaaatccaatttagaaattacaaaaattcaaaatttaaaaatagttagtaactatcacgtatatacaatacaatatgaatattatatgtgatatacaatacaatatgaatattacatattggttggtgctgttaagttagtacaaaatttaaaattatgttgctattttaatatattttaattatattatgtgaaaatatatgctactatgtgaaaaaaaataatgatatacaatacaataaaaatatcacacatttgttagttcaaccaagaatttaaaattatgttgtcattttaatatattttaataataaaatatgaaaatatttaagctaatatatgagaaaaaaatttaacgatactagccgtgcaatctgcgcgggccaccatgctaaatttttttttttttgacaacagaggtacacaagcaactccaacttcatttcagacgtacacagaaaacaggtacaccgtacacgaacacctttactcataggcgtgcaagaccaagtactccattcacatcgcatacacataaaaactcataaatctcacgcaaacaagaacatcataaaaataaatataaaatataagatactaaaataaccagagcaaaggagatcactaagatgattcactcatagttatacgaaaagaaagaagcaacagagagctcaaccacaatgtttcagttccagacaaacgctgcgacggcgagcacagcggcagcaacagcaagtgagcagctcccaccggcggccatggggcccgtcgccgccgcgccgttgttggacgatccgctgtactgggcggtggcatcctcaaaacagctgacgatgcatacgacgaacagcacgagcgcaatgaccggcttgggagaagaacgctccatcttgttctgcttttgcttgcctgttcagagttcagatctcagagctgagacgatacacttgagcatttcgctcaaattgacaggatttatatagaattgcctcaagttgacatggtaaacatagtacacagatgcacaatacaagtttgtccatttctctacatcgtgttctgctcgccaggatgagttgggtttgatctggacggctggtttgttgctgcatattcgtctgaaaaattcaacaagcagatgaggtgctggctttgtttctgatgctagagttccttcctttttgtcacttgtaagttgtaactttcactatccatacaacaaacgtaacaaaatttccttttcagagaacaaaactgatgatctgattgacaacgtcagttcttatgtgtgttggtcgcatcgcatttatcaatgagcttagatgatgcctatgttcagctgatgcctgatgccatcagccacagccatgtcgatacgctggctgattagctgatcgatgactccaatgtaagcatggaaaccacctagtacatcatatggcactccggtgatgagaggagttcgtgttttcttggggcgctgcgttgctggagttcatggggccagccgcgccgccgtccgaagccgccgcggcggccgacgatgtggtgctcccgtacatctcgcgtattctcatggaggaggacatcgacgacgacatgttcttctgcctgtaccccgaccaccccgctctcctcgaggcgcagcagccgttcgcccagatcctctcctcctcctccggcatcgccggtgaggtgaacagtgcacccatggaggattctgctgccttgatgatgcaggggagcggcaatggtaggggacggaagggtagtaagcatggcggggacgagctggaggccgaggtgggcagggcgagcaaactgatggccacgccggaggaggaggacgacgacgacgatggcgtcggcgagatgttggagaagatgatgctcaacggggacgaggagatgaacgcgccacgcgtccccgcggagaaaaacggcgggaaggcggcgcggcggaagaggaggcagggcaagggggaggtggtggacctgcgcgagctgctcatgtcgtgcgcgcaggcggtggcatcgggcaaccgccggagcgccggcgaactcctggagcagatcaagcggcactcgtcgccgacaggggacgccaccgagcggctggcgcattacttcgccgacggcctggaggcgcggctggccggcgcggcgagcctggagcaccggctgctcgcgtccgcggaggagcgcgcgtcggccatggagttgctggaagcgtaccaggtgttcatggcggcgtgctgcttcaagtgggtggcgttcacgttcgccaacatggccatcctccgcgcggcggaagggaggagcaaggtgcacatcgtggactacggcggtcagtaccacggcctccagtggccatccttgctgcagcggctggcggagagggaaggcgggccaccggaggtgaggatgacgctcgtcggccacccgcagccaggtttccggccagcccgacggctcgagaggacggggcgccggctcagcaactgcgcgcgcgcgttcgggctcccattcaagttccgcgccgtggcggcggcgaggtgggagacggtcaccgccgaggacgtcgtcggcgtcgaccacgacgaggcggcggtcgtcgtgaacgacgtgctcagcctgggcaccctgatggacgagagcggcgtgttcgacgacccgagccctcgggacacggtcctcggcagcatccgcgacatgcgcccggcggtgttcgtccaggccgtggtgaacggcgcccacggcgcgcccttcttcccgacgaggttccgggaggcgctcttcttcttctcggcgctgttcgacatgctggacgcgacgacgccggaggaggggagccacctgcgggcggtgctggagagggacgtgctgaggcgggcggcggtgggggtgatcgccggggaaggggcggagcgggtggagcggccggagacgtacaggcggtggcaggcgaggaatcggcgcgcggggctgagacaggtggcggtggaggccgacgtggtggaggcggtgaggcgcagggtgaggaggcggcatcacgaggaattcgtgatcgaggaggatgcagggtggttgctgcaggggtggaaggggcgcatcctgtatgctcactcggcgtgggtcgtggcagaggatggtgcgcactagcaactagccgccatgacggtgttcgtgtgtactgggaatgcttgtttgctgttggatcagtggagtttatggtctttggattgtttcatatccctgcagcaactagcgttggagagctcacagtagtaacaacaagcttagtggcaataatcctttcagctgcttcagcacaagacgagcttccattgtccaccaatgaatgactaatgtaatataccaggaaaaccataacggcataaccactagcttcctttcagcacaagacgagcttccattgccatttgtccaccaatgaacgaccaaccaatgtaataataccaggaaaaccacagaccagaccacataaccacagattagagttcagtccttgaagattgctgaagttcgatgctgatcccacgggatctttcaactgttggcgttacagcctttctttctttggtgcttagcttgggcaacgtacaggtacaggcaccgcccatatttctgcagttctgctctttctgaagcttattgggcgaaagatattgccgtgtcaacattagtgaccactgaccagccaacacaacataagatacttctcaccgagatcaccccaacacacacacacacaactcaaaaacttgaagaaaccggtgccccctccacttttatccgggcttgggaccggcactggcagtgttaggcacccccctacccccaaacataacaccccaacacgtcaagtgaaaaaacaattggagcacctctgactgttaaacagtatgaagttagtgagtataaagaatagatcgagttagctacccatagcccatcatagcatctaccaacatcaaggagagcaaaaacgtcgaataaagcaactatcgtcataatcaaatactagtaattcaccacaagcaacctaggcagaaggagctatatataaccataccgacgaaaataaacaaatgcaaatgcagtttgcattagactaacaatgcaaatgcgcatagaaaaacagactaactaccaccactaggttccggtaattatactagtatatgctagtttgccaaacaggcagataacataaactaagttcaacatctaaggataactggaacgctacgctaataaatttagctaaaaccaaattttccgaatgaaatcgtcttatcattgattaaccgattttctgtgataaatttttagcatccgacaagtggaagtccatactcaatattgccttcaaaggatatacatgaaatacaaagtcagcacaagtgcattttcagaacttaggacattcaacatggttaatactcccaacacataatttaggatattcaacatggttaaataccacaacacatatctcaattattagtgtactatgcaaagaaaaaaattagattgagcatggcgacgttacggagtaaaaattatgttcggattatatattccctaaataaatgttagctcatgtaaacaaactgacagaaggtatatgccaatcaatacacacacaaaagggaagatattataagaacaagttatcattttaataatatttaatttaattacatattcatcatcctgttaaagatcatatcaaaccacgtttgaatggataagttgaaaatattttaaataatatagattcaaaactatgtgcactatattaaatttaattccatatccatcaccctattaagtaacttactaaatcagaactgtagtgcatcaaaggaaatagctgaagaaaacacgacataaatcagaagaaacttggcaaatgatcaagtcataataaaattacattaatgtaagcattttaagtgtatcacattgcaaaaaacattttgaagacatcttctgatatgtactttatgcacaataataggaggtaaatcaacgataaccacacagaatgggcaatgacacacgaaatatgattaaacaaacatgagctggtaaaagaaaactaaatacataattactagctcagcaatttccataaaaaaaacatacaaacactatatctatttgacctcaatctcatgaattactagatcttcacaagtattcgcatagtaacacaacatatattgacatcaaataaataaacatcagaaagcaaccatagaacatggatatgatactttctagcctttggaacagaatgcagatggaaaactaattagcaagaatgaaatgttaatcacgcgaacaaaatttagtaaaaaacaatttttgggaatgaaatcatcttatcgtcatgcaaatgatcatttttactaaattccaaacatctgacaactagaagtccatactgtaacatgaaaaagacaatatttggcagaaagctcatgtaaaatatattctcacacaactgaaatcatctggtgccagtggatttcagaatttaggacatttaacatgattaatacttgtacattccaacacatacaactctaaattagcaccttattatgcaaagcaactaaatttggattgagcgtgtatagcaatcactattaacaacattaaaaatgttaggattagattttcctaaaataactgttactaggtcatgtttacaaactgacggagcatatatagcaacattattaacacagtaaagaaaatgttaggattagattttccctaaataaatcttactaggtcatgcacacaaactgatagaacgtacttacgtacatgccgacacacacataagggtaaggcattaagagaacaagttatcaatttttaataatattcaatttaattgcatgttctaaatcctgttaaagatcatatcaattcaggagtcaggtggtggaaaggataggtttaataagtagctatatagattcaggagtcaggactatgtgcattatatttaattaaatccatcatcttgttaaagtaactacgaagactatcagaacagtactgcatcaaagcttggttagggatcaagtcattatcaaaatgatattaatgtaagcattttaggtgtatatcacacttaaaaccattttaaagtcattttctgatatgtactttaagcactttcaatatgtcgtacgtcactgcactctaataggaagtaaatcaaagaataaccaaaaagcattggcacatgcaatataattaaacaaaattcttgcaggagctaaagtaaaagaaaactctaattaaaccaaattagccgccttatcgccttatttataaaaacgcgaaaggtgtgaaggcatcaaagcttttaatagcaatacaaatggcagctactagcttagtaatgcctagaaagaacacacacaaacagtatttatttgaacttgtatctcatgcattactagacatagacacaagtaatggcacagtaattgcattgacgtcaaacaagcaaccatagaacattgatacgatatttctaatatttggttatgcagatggaaaacaaacaatctgggaattaataattagcaagaaaaaaaatgaaatgttaaggcgctagctggatataggatatatttagcacaaagaaagcatcaagttttagaccataaaataaaactatttgcctagaataaattaatgctacaaaaactaaagcacctatacatttagccaaaaagagattactaaaaccaccagataatgtatgaagagatttaaggttggttcaaattaaaaagacaaactgaaaccatgcacacagagttgatgcacaaataaaacaactggtggacaatcaaggttctcaaaaccactatactagtctaattagacaaataaaatggagaacttgtatgcagtttcaatcacagatttattgacaagagaaataaccagttagtgaattctgtagcttgtatgcaatttcaatcacacaagaaaaatgatgcaacaaaacaagtcttaaggacaaaattgaaactaaggaagaatgctagccatctagcaaaaacatgcaagggccaccctagaatgaaatggaagttccacacatgcaggtatataaaaaaaatgaaatggaagttccacacgtgcaggtatataaaaaaaggaagaagggattctacacaaaacaagaaaatgaaatggaagttccacacatgcaggtatatataaaaaaaaaaggaagaagggattctacacaaaacaaggtcccagttgagctaagtttatcttcacaacgtataataaaattgataactatataaagcattacactggacaaaaatactaataagcatgcacatttaagtgaattaatacatgcaaaaggatgctatatattagttgttctgttagtatggcactacctcacaaggcaaaaaattctcattggcaagcaacaatgtgctcttgtttaaggtcctttcttggcaaatcttaattggggatactatgttgaatgagatataataattataaagaaagaaatataccagacaaactgtaagaagaaacaagttagtgataatgtgttgttgtgattagcaactaagttcaagggattcacctcaattcaaaagccctggacataagatatataatttaggacaattcctatcaagcataatatttaaaaaacatccacatttccatcttttatgagcctaagcaaaaattgcctcgacactgtaaacttcagttatctaccaagttagtatagaagatgaataactttcaaaactgtggaagctgcaagacgatccaaaatattcctggaaatatcctagttcctgaatgaagtgctacaatgctacattcaacactcacaaaatgaaagcaagagagaacaatgccacaagagccatagagtttcattctatacagactaaatcagtatatggacaaaattaccatgttacaactcaggattatcaaaacaaattaccatgttacaactattatacagactaaatcagtatatggacgtctatatcatttgataattacaatttccaacatcagagggaagcttaatgaacacacaaattacaagatgacaccaaaccaacatacaagagggccaatcatatgttgaaatgaacccatatcctagctagttatggaacagtacaagcccatatgtaaaggatactactggagatgcaagctggaccaagtagaaatcaaatactgctactgagaactcctccatggttcataaagcaattgtttctactcagaagaaacttcaaacagatggctttataatgttgaggtccataaatgttcttgaaataaatcttcaaattaatttcacccaaagtagtcaaaagatttcagaatcaccttcacaaccttgtaatattgttcgaaagaactgccaaatgaatcgtctaccacagaaactttaggatgtgtcttcttagttactacataaccaccctcacagcaagttaataactgactgatatagcttttccggaagtaaacaagttaacgtcaaattctcggagaactatggccatgtctatgttctgacaagacaaccataaaagcgcagcaggatggacttaaataaccagagttttccaagcagacaaatggcctccaaataatatcaatctcacttgttattttgacccaaaagcgtagcagcagtcttgaatggaatggagaaaacatcttatacaccaaagactattcctaacaatgaccaatcccatacaacaagcttcaatttctctggtttataaatgttcgtattacaaataaaatgttcttggacagttgcttgtaatggaagcaaaccaactgcacaatattgacatattgaaatttcaataaattgcaattaaccatagccctaaaccaaagcatcaaggttcctaaaactaacaccagtaaacagggaaatcacgagatctgtacctcaaactgagcaggtcaagcagcaagtaatctgtagttcctgtactaggataaattaatccacagggaaggcggtcaaaaagagctccttaaatcctcgcgagaaatcctgatgttaaactttaactaagaactgacacagaagaatcattccaacgccctagcacatagtgacgatttttatcaaagccaaaaagcaatacatggtccggttaagatgacacacaaccatattcaagataatctgaagagtatgtcttgccgaaattgaacaagttaaagccggtgatttgaaagctctgaacagaccttaaattttctgatatgacttgaccttatcataaaaattactagatccgaaggaaaaactgcatagctgcaagcagacgaacggtctcaaacaaaaccaagcatcacgaacttgaaaggaaccgaacaataatctgaggccagtgagcaatcctaaccatgaccaattcagagcgaaaacttcagttcatctagcctttgatcaagcccaaaatatccatgacaaatccatcgcaccaaacatgaattgacacaaaccaaccgatcgcgcatattgtacccaacacagcaaaccacaattagccataaaccaatcgaaagagatactgtgttcagaaaactaacacaacagcagaagcaaatcgccgaaactagaccccccccaaaccgaacggatcaagcaccagaaaaggacgagcaagcgggcaatctatccggctagttggtgcgcctgatcatcaatcaacaaacggcagcgaacgaggtgagatcgaaaccgattgatcccttacctaccgacttaccagcccacccgcggcggaggggaaaaggggaagaatgaccgcgcgagaagaggaaggaagccatgggaccatcctcaacgaagaaaaagcagcgaggatcgggctgcatttatagaggagcggagaggagaaccaccgaggaggaaaccgagtcggtgggctggagccgggttgcgagcggaatcggtggtcgcccgcctattcttgtcgcggtcggagtcggagacgagactaggcgatgttatctggcgctttttccggtgtcatggtggggacgttcttatcgctttttcttttttttttagaggacgttcttatcgctttttctttttttttagaggacgttcttatcgctagccgaagcagacacgcttcaccgtcctaatcggctaatcctcgatgattcgtcgttagcagcaaccagttgtgcagctgtgattttacgtcatgttccatcttccatgcttccatggagcacagtaaaaataaattatttgtcatttttgtttttcaaccgaaacaaaccgtgttcacacttgatcaaccatcgatatttggatggttgctggttcacgaaggttccaagttccaaccatagctggaaatttaaaaaaaattagattcgaccaaactatggtgatttcgtggtcaattccacggaactaaattaagcacgacaattgcattccacaaagctagctgatctatgcatttccacaacaaaaagtgtgcgtatttgacggggaacatttcaatggtcttcagtgctggaaatatttttgtcaatgactgctgaacatgtcttccaaagttttcagccagttcatatattgccaccgctccttctcaaccaaatggtggtgaagtgagcttgccagtttggaattaacgcctcttgccaccagatatcctttcagtgcaacctgtaaccgaggatccaaatctctgcaaaaacaatggggaacactgtcattgattgcaaataggtacaaggaaaccaaccttgtaatgatcttaatcgaaacaacaggaatagagacccctctaacctcttatgttgccaaaaaaaagggaaacaaaggctatttgatgtttaagggaacagaaataggccccttcagtggagcaatgtgatacagtcaactttcaatttcataagtaccatttcatgaatgagcagtaaaaagaactatagaaacattatagctcaacaaacataaaacatgtttgccattgaaccagatagtaaggatacaagtaatggctaaggttactttaactgctggtgacaatgaaatcctaccaccaagcctcattacctagaaattatagaccattgagtccctaaacaatcacatcacgatgctatctatttgagatgacatgtcctgaggtcattttgctaacaaaaaaaatacaaatgtagtgatgagccatctaagcatagtctagtcccaagttaacacatgtagcgtgtaccaagtggctgatgagatgcttacagcccactgattctataaatttgtactgactcgcttaaatccagtcaaaacaataaaatccaaaaaaaattgggatgaggaattgattaaatagaataaaaaggtccaatattcctccttgtttattttagaatatctattttaatccgaaaccaaggatcgattttcagactttcatagttatatgctgcttagttggttcttactacacttgtacctccaaaaagatcagcatcgcccttatgctacaaaacactttcaaccaacaagcttttcttgttcattttgcactttaaattaataaatggaggcgaacatgtgaaggttccaaattttagcatgagcatactcacagtatggccaagtaatcaatatgtttgaacaaattcatgtgaatccagccacattcatgttgaacatatttggacatggcgttgcaagccaatataaaaaaaatctctaacagaagacatcgtataaatttactctataaaaaaattaactgagaattgcaggtgcaagcaagagtaatggagaacaggaattcgtgagacctctccaccaagtttaccaaagttccttttaaaaaccatccatcaagatagaacgcaagaaaaattctacattgaattttgacaatagggtataactagatattctagcaaatgaagaccctgcggcttaacatggagttaataacaaggacagatacttggttcactgtcatgacaagactgtaggaaaataatacatagtaatagattttcagtctaccaagatactatgttgtaagacaatgtaatcaacaatcagcgcgttagaacagtaaaccacaaaaaaatatacgcatgttcctctacttttgtagaaagaaaagataggtggtactgaatttcctggaaggcataggctctcctgaaattgatcatgtgctaattttttttctaccggtcactagaattacagagctccaccaaaatgccatgaaagtgcttgtttttccagatttcttggaggaactccaagtttatgagcccactgcgcgcatcacaatatccacaaacattgtgtttggttcattgcttcaacttgccacaccgtactttaggctgccacacctccttagccttggcaatgttagttaagaaccaaacagcccctaaaatcacatgaatgaagaaacatcacctgaactcaggcccttcatacttgtcttccccagcgtcgccagcaaacgggtgataacaagcattagtaacatcatagtcagcagagccgccatcaccttcatctgcaaacgcgcggcagtcgaaccgcatcaccggcttcacatcaggcttactgacgaacaccttcatgagcgcgtccctgggcaggggctcctccccttcgaaccgcagcggctcgagcaccgccgacacgaggacctcctcggaagcatcccggcggcgcaggagcacttcctgcccgcgcggcgggtccgacacggtggcgaagtcgggaatgtcctgcgagaaccagggggaagtgagtggcgctggattgggggcgggaggatgcggtggtgggtacctgggattggagcgacgggggagaggagggggtggaggaggagagctcatgcgcgatctcggcgcggacggcggccaggacgccgccgttggcgccgccacggcggagggcggacgcggccaggcggcgcagcaacatcacgccggaatcattagcgagctgtcggtcggtccgcgaaccaaatacagtggaaggcccataaattaaattggccaatcctgcaaggcccaatccgttaagagtccatgaaaactgaaaagggcctggtacgtcaacgacccagctatgaaaacatttgccttaaaatgtcgtcggctatgaaaacattttagtttcactttacccccaaaatatcgtgggaaatcacgttcacaatttcgcctaggttcttctccttcacaagtttaacggcgaaatgaagaatgacttctgcggacagcaaaagtaagtataagagagaaagaaaaatagtgactttgtgctgtgcttaaccaacactttttttttgaacattcaatatattaaacattaaaagcacaaaacgtgcactggagatacatgattgtctttccaaagagcagcttgtaagagttgctttgtaggacaagtattgttattacaagtatgactaatattttgacaatttagcacttcagattcagaagatgttctagcttttttagataggtagtctgtcattttgtttatgtctctgggaatccatttgatgttggaggggccatcacctgcaaaaatttttaaaagtgcaagaagaggtaaaaggctccagtggcaattctgattgatgtaatcagtattttgaagtaacagtgttagctcttgattgtctgaaagaaaaagaggatttgcaattttaaggaaatcacagatgaagagagcaagtttgaaggctgcaagttctgcttgcattggtgatttgtagagacttgatttcccctgcacaaagatagcttgatgattaattggattatgaagaaagaggccaaaacctgttagattgtccttccaagaagcatcaaagaagcatctgtttcctggtaaaaagtttagacaaacagtaggattttcatttatgataggagtgtcattattatcatcatcatttgataaagcagtaatgtagctcttagacatggcattggaggcattacaaatttgtaaaggttcccaatctttttttctgaagaagtgatcatttttagctttccaaatataccaaagaagaatagagataatttgaaagttattatcaaaactattagaagcaaggagatagtgtcacgcccagaaattcccgaatagaattccaagcagaatgtgcattaaaatccccgtccaggaccggccggggtacacaaacgacaatgttgacattcagatccacgtcttacaaacatcataaaagtcttacataaatgcagcggaaaaacgaaagacaacaagagctaagccttgactagaactgcagcgggaacaccactccacaggcatcctcgacggcacggacgaagcctactcctcggagaaacctccatctgacacatactcatactctggggttgggaaaaaaaatagagcaagactgagtactacccactgtactcagcaagtcataccggaataggggtatgatgcagggaattatcaaaggagagctagagtggttcgtttgcataaaacgagcatttataaacagaagttgaaagaattaaacagttgcaataattaattaatattgatcatccgctgtccaacgctatcccacgttgcaacagggccaaccatccacctatactatccaatttcattagactaaactagggtaagactaatcacggtgaatctggttgaccgcccataaccgcgggcacggctattcgaatagttttactctgatcagaggtgtacaactgtacccacaagacatagccccacgacacgtttccgtgcgccgacatgccaccacgacataccggaaagaggccgtgacaggacccttcgcataaccccatctaaccaagcacaccacacctcaggtttcaccccccactcctcgcaaggcagcgggcagtcccctctcgtgcctaggtgaatccggaagcgacagaggccgtcgcagggcccgccccgctccatcacgcccacccttgcctggatgcgtcagctagaggaaagctacactataagcccagccgttgcccacgctggcttgtggtaagtacgataagttcttccagggcatcccgtgaaccggtccttaactgtcatgggtgtgactagcaaaaccatgcacccacagcccaccatgtgattcattttaattaaccaacaccaaaatggtggtactaaaccaaccttaccaattgaacctaaagtctatattttagtgagctttccccattgtgtgctagtggaactaagcatggctaagcaattcctagtccaaaatctattcaagttataacccaagctaacaaaggagcatgatatcaaaatagcatggctgtaacaataggtaaacaccccatagtaacattataaaacaatgcaatatttgaagaaaaacaatagagcatttgcaatataggatcaacatgttcaagtgacaagcatgacttgccttgctctgctgctggaggaacctcggcgactattttgaagtacaccggagcgtcggaagaaccggaatctagcgacatacaaggcaaatattgcaaacaggctataagactactgaaacagggaacaaaaccatttttaatggattctacacatttttcttgatttactgagacttgaatgggcttaaacggagctcggatgaattagttatgaattttagaagattcactgtgtttattactataaaagaaaaaccttaaatcatttattgcgcaataaatcccagggctgacgtcatcaagggggacgcggcgccgacatgcgggccccactggccagcggctcgggagagggaggaaaaggggcgccggcacgcgggcccactcggcagtggctcagggggggcggttcaccgtggaccgggaccacgcgggtggtccaccgccggtccacgggaccgacggcccagatcgccctcggggccgatcggacgggcggtggcgacccggctcggctcaagaccggccaagcggccacggcgacggcgacggcgcgcgcacacgcgttgccggcgactgcaaccggcggcggaggcggcggcgcaaaggcggcgccgacgggcggtggtgctaaagcgacggctaacgggcggcggcgctaaagcggcggctaggagggagagggaggggaatagaggggagagggcgcctcaccgagggtggccggcgcggaggaagacgacggcgaacggcgacaacgagccacgggaggacgacggcaaccggcggacgggattcggggtgccctaaggaaggagaagagagagattagagggagggagatgaaccacggcgaccggcattcatggccgaaggcggcggtagaggttgaactcaccggagcgcgaggggatgcgaattccggcgatgaatcccgacggggaaggggcagacgagatggagttcggcctcgcaaacctgacggcgacggcggcgcggcgcggcggcgaccctagcggcggctagcggcgtccggagtagcgggggcggcggcggcaagtggatgcacggtgcggggacgatggagagctcgggagagagaggcggcaaaaggaaaaacgaggaggagagctcggggatggattttataggggcgggaaggtcaggaatgacccgagcgcgtccgatttcgccggcgacgtggggaaggagagagagaaggtgagggaggattcaaaatcgaatcccgcccctctcgtgcgcgggcgcggccgggagacgcggggagagggggcggcgacgtagcgtgggcgtgggcaacgcggcgtgggcgcagggaaagcgggggaggtggggcacggcggcggcggtttcgggggtggtgaccagcgcgggcgccaggaggttgggggaggacccgacaggtgggccccacctgtcggcgaccccgggagaggagggaggcggggcggcctggctgggcctcggcctgcggccggcccagcggggaggagggggagaaaaaggagagaatgggctggcggcccattcggaaagggaagggaaaaagaaaaagaaaaaggagaaaaggattttccctagaattaaaatattgcttgctcaattttaattggttaaaattatttctagggctctgaaaattccactaaaaatcctgttagtgaatttcgacatgtagaactcaagaaaaattccacatgccagattcgattactatttgtattacttccttagggttttctcttgatttgcaccggcattttcttagggtcatttataaattaaattttcggcttgggaggagaacttcggggtgtgacagataggcaatgatttcagaaacattatgcctagagtcaatgatagaatgattgaaatatagctcagaaattttccaagtgagtctagcaaaggtgcagtggaaaaagagatgagtatcagtttctgggctgttgcagcgagagcaagaatctgaaatgtttgaaactttagagtgaaggttagcagcagttggaagagcatgtcttagggcagtagcagtgcggtagcgcacttgaggagcccaaggcctccagctagactagaaaccggttagagaaccacacctcacaatgcatgtgtcttagacagtatctatgttagtgggtcccacccatattagtaggacccacccatccctcttttcacttccatctctccctcccatgcatgcaagcatgtgaggggaccactcacagtttcccttttggcatgaggaaaccgcaccctggctaggggatgcaatccttagcaaagatatgggtcccgccaccttttttcattcacatcagattttgaactagctggcaaacgaggtaaccctccagctaggagtactgtgaagagccttataagtctccaaatgaaagttttgaccttaggaggaatgcattttgtagaccaagtttttagaaggatactgcgatgtacagagttaaagttggaagaatttgagtgagaattgctagaaacctgtttgtaggcacttttggaagtgcaaattcatgtggttgttggagtccagcaaagtctgtcttcattatcttgtgggacaatctatacctgtgttataatttgtgccatttcctgataaaaatttgattcagcttgtttaggtcccaatcttttctgtcattccaaagacgaggcttactgacgaacaccaagctaaccaacagtagcttaaagcattgtgacagtgtgagtggtacccgtcaaatgtcatccatgtcgcttcactttgcaactactcctgcggcgatatatatggtgctttctcagcattatcgctcagtacctaaacattcattcatcatcgggcgaacacagcaaagcgccgagttactgtgctcttccatcagaggacggaaacagcaaggcaagcaaaatcagttgtgtgcccttagccgtcagagtccaccggattcgtcggatccatccatccataaattcgagttaacggaaagtcctagccatcgcctagtcaatatcttttttttttaatggaatcgcctggtcaatatcaatctctcgtcaaaaacaaacgaatttgaatctaattcagtacaattcacacaggaaagaaagattcaattagaaaatggcgatccgatcgcctgccattttccatattctttatcccaaacatacagggcatatgcagttgtcttcttttattagaccaagaagttgtaagctttggagaaaaaaataactcctttccctctctccccttcctctccggccgggcagagcagagtagtagtggaaagtggagtggtagactgcgctgcgtgtgcgtgctcaccggccgcggccggagatggagaagctggacaggtacctgcaggagaacttcgatgtgccggccaagaacccgtccgaggaggcgcagcggcgatggcggcaagccgtcggcaccatcgtcaagaatcgccgccgccgcttccgctgggtgcccgacctcgagcgccgctccttggacaaggccaaggtccgctccacccaggtactaactaaccacgaactagccgctctaatccattcccctcacatcgttctccatttcaagatatcacggtttttctgtttgatcccctctctctttctaccgcatctcatcgtgctcgtgggtcgatttgcctagcaagaacaacatttagctaacaaaaaagaactgcttttggtttgtgtgttcattgttcagtattcagtaaccgttgtatgtcctgtcttttgccatcagatcgtgacacataatacagttctcctcttgtttagatcgctctacatgtttcgtcccgttcatttgctcatcggtgccaaacaattaagacaaaaaatcaggttatttatgctattgctccatcgtactgggcacagacgcacagtaggtccgtatcatgttgacatgtataaaagatcaattactttcaaggaaacttccgcgaagcaaccttacaaaaaagtacgaaataaatggtgttagaaaaggacaaatatatcaccctatcacatcgattctgttatgtaggagtatgtatagttatctccacctgtcagtctttgcaaatatgagatcattgtttaaagtccctaatttggagtactattgatttcaacttttcttgtcttcatgggaaaagaataaagaactctatgtttgtttggctgggagaatccaattatggccttgtttggatcctccgggctattaaatagccctccggatccaaacagggcctatgtcttcagagttgatactcttaattcagggattaattctacattactatgtgctgtatattttagtgatgtatacgctatgtgctctaggtttggtggatagggtgggcagattcctatttctgacttctgagccaccctatcagatactccctcggtcccattttgagtgtaaccattagtttctgtgcccaactttgatcgtccgtcttatttgaaattttttataattagtatttttgttgttatgagatgataaaacatgaatagtattttatgcgtgacttatgtttttaaattttttttaaaattttttcaaataagacggacgatcaaagttgagcacggaaaagcatggttgcatttaaaatgggacagagggagtattatttttatcacacaaattcacaaaagtccccctattttacggtttattcatatgaaccatctaactccagtttcactagggaccttcttgttttataaattcttctagatgattgagtgcttaacattttgttctctcatatgccgatagttttgattggaatgtcattactttatgcttaacaagtcaactaatttaattttaacaatcatgctgggaaaattcgcaaacatcagcttcggtatactggttggtctgccttttcagcctagaaaagtagtgatggtatttatatattaaaataaaatgacccagtatgatgcaggtatagtggcaatgtgacttcacatgtaataggagaaaaagaaactgcaataaagtagccgactatcatgtttgcaacacaagcataaaaccatatttcttgtaagaacaatcaaatgtggagatcttgcactactatattttgaatattgtgcacgactgaagttatttatattgttgccatccgaagtgttggattaattaaattcattttcatggactaaacaacagtattgctattccttatcagttacctttttgtaattttgtttctgttaatggaaacaagagaaggctggctctctttctcaaaaaggaaaaaaaatctctaccagtttccacattatacagtatgtgattttatcacacagctacaggaaaataattataacatatatataaccagtaaaagcgtttccattttttgtgtttgttgtcccaggaaaagattcgggttgccctctatgtgcaacaggctgcactcatttttagtgatggtatgggataccttttttacgttattgttcattttgttgcattatcaactctctgtaacttgatttaatcttaatgttttaaacaaaaggtgccaaaaagaaagaatacaaactaacaggggatattattaaagctggatatgccatcaatccagatgagctagcattgatcacaagcaagcatgattcaaaagctttaaagatgcatggtggggtagatgggatatctataaaagttcgttcatcatttgatcatggcatatatgctagtgagttagatacaagacaaaacatatatggcgtcaaccgttatgcagaaaagccttcaagaagtttctggatgtttgtttgggatgcattgcaggacatgacccttataattcttatggtatgtgcattgctatctgttgcagttggtttggcaacagaaggttggccaaagggcatgtatgatggcttgggtataatactcagcattttcttagttgttatggttactgctgttagtgattataagcagtcacttcagtttaaggagctagacaatgaaaagaaaaagatatttatccatgtaaccagagatgggcgtcgacaaaagatctctatatatgacttggtagttggtgatatagttcatctgtcaattggagatcaagtacctgctgatggactgtatatacatgggtactcccttttgattgatgagtccagcttatctggtgagagtgacccagtgtatgtttctcaagacaaaccattcatcttggcaggaactaaagtgcaagatggatctgctaagatgatagtaactgctgtcggtatgcgcactgaatggggaaaattgatgagcacattgagtgagggaggagaggatgagacaccactgcaggttaagctaaatggagttgcgaccattataggaaagattggactggtatttgccatattaacatttttagttctgctggttagatttctcattgacaaaggcatgacggttggtttgctcaaatggtattctactgatgcattgactatagtaaactactttgcaacagcagtaaccattatagttgttgctgtacctgaaggattgcccttggctgttactttgagtcttgcatttgcaatgaaaaagttaatgaatgataaagcacttgttagacatctttcagcgtgtgaaacaatgggatctgctggtaccatctgcacggacaaaacaggaactttgactactaaccatatggttgttgacaaaatatggatatctgaggtttcaaagtcagttaccagtaacaccatttcaggagaacttaattctgtggtttcttctagcacattgagtctgcttttgcagggaatttttgagaatactagcgctgaggtggtcaaggaaaaggatggcaagcaaactgtcttaggaactccaacagaaagagcaatattagaatttggcttgggcttgaaaggagatcatgatgctgagtatagggcctgcaccaaggttaaggttgagcctttcaattcagtcaagaagaagatggcagtgctgatttcattacccaatggcacgtccagatggttttgcaaaggtgcatcagaaattattttgcagatgtgcgacatgatggttgatggcgatggaaatgctattcccttatcggaagctcagagaaagaacatcttagatactatcaactcatttgcttcagacgctttaaggacgctgtgcctggcatataaggaagtggatgatgatattgatgacaatgcagatagtccaacaagtggttttactctaatagccattttcggtatcaaggatcctgtgcgccctggagttaaggatgctgttaagacctgtatgtctgctggtatcacagtaagaatggtaactggtgataatataaatacagctaaagctatagctaaagagtgtggaatattgactgaagatggtgtagcaatagaaggaccagaattccatagcaagagcacagaagagatgagggacctgatactaaatattcaggttcataatgttttcctcagtctatgcgtttactaaaatcttgaccaaactttatatctggaaatattttgcaggtcatggcccgttctttaccattggataagcatacactcgtgacaaacttgcgaggtatgtttgatgaggtggtttctgtgacaggtgatggtacaaatgatgctcctgcattacacgaagcagatattgggcttgctatgggcattgcaggaacagaggtactgtttcctatgcagttcaaaacttatgaacgtagcatcaatagacattaaaaaagtcagatatttaggacgaatatgtcagtattcactcttactgaattaagttgatcctgataatccatttttcatcttctgaaatggagtaattttgtcttgtatttgtgcaggttgccaaggagagtgcagatgtcatagtacttgacgataatttcacaactataataaatgttgcaagatggggtcgtgcagtttatattaacatccaaaagtttgtgcagtttcagttgactgtcaatattgttgctttagtcatcaattttgtctcagcatgcatcataggtgagggcaacattatagtattcatctgatgctatgtatttccattaagtggttctccatgatctccaagacagtactaatgttttgctcttccgtcacagggagcgctcctctcactgctgtgcagctgttgtgggttaatatgatcatggatacattgggagctttagcactagcaacagagcctccaaatgatgaaatgatgaagaggccacctgtccgaaaaggggaaagtttcattaccaagttcatgtggagaaatatcatggggcaaagtttatatcagctatttgtacttggagctctcatgtttggtggggaaaggcttctgaacatcaagggtgcagattccaaatccatcataaatacactgatattcaactccttcgtgttttgtcaggttagtgcattatggaacactgtaaccgtgctagtatttccacaaaccactcacataaaatgatgtttcttttttggccttaagacctatggtgaaactgaggtctttccgaagtctgccacaatatgtgtttggttggtcacagcttatatttccaatatcatgcttaagaatcctgaactgatagagttatcttttttttttaaaaaaaatcatgatttggcaaagggaatttcttgttctaatgatgatgttctggcaaatgttgtaccaggtattcaatgaaataaacagcagagaaatgcagaagatcaatgttttccgtggcatcatcagcaattggatcttcattgcagtcatagcagcaaccgtagcatttcaagtggtgatcatagagtttcttggcactttcgccagtactgttccactcaactggcaacattggctgctcagcgtcggccttggctccatcagtctgattgttggtgtcatcttgaagtgtataccagttggttcaggtgaaacctctgcaactccaaatggatacaggccacttgccaatggccctgatgacatatagctgaagagtaatcactaataagggaaagtagaatccagggtgcaatacagcatccagctgcccagctcagttcagttgttttggaatacactaaccaaccactgattttgttcaaattttgccaaactcctgtcatgtaattgttactacatcacacgttactgatgtgcacccttaccactctgctttcaacttcagacttcattgtatcagtgaattcatattatcattatgacggttggtggtttggattcactctgaaataatcttttgatgccatatatgccatttgaaacagatatatattagcacccttaaggtcctgaacaggagttaaattcataaaacagagtaaataaagaactagaagtatcattcatgaacagaacagaacaatctcctaagatctgtctacaaatcagtaactacattgacaaagaatcatcagatatatgttcagttcttccatcgtctcaaagaaaaaataaataaatgaataatcatcgactactctaccccagcgattcaattcattcacatagtatgtggccgtggctgtctccaccctcgttgggattgggattgggatcaccggcgccgtcgaagtcgacgaacaaatcgttgaagaaatcattcatctccacctcacctcctacttgtggttcttgtctcacctcctcattgaagccaacaccatagccgttcatcggtgagaacaaggtcatctccccgttggtgttctgcattgccaatggcatctgtccctgcgtcccgatgccaccgtggccgttgccgcagagaaccagctccccgtctgcgttgatgccgatgccgtagtcgccgccgtcgtaagcatctggcttgatggcatcaacgtcgccgtagtagtaggcggcggcattggccgtgtcgtccgccgtgtgtgtcgtcgtcgagcagcagtagtccatcgaggcggtcgcttgagacgtctcgccgccgccggagtacgagcatccgacgtcgggctgtggcgtctccggcgccggcgcgtcgtagccggtggcttccgcctctcggagcctcttgggcccgggaaccacgttggtttcttggcgttcctcctcgtcggccgtcgcctccttggccctcggcgagaggtagaccttgcagatgaccatgatgccctcgtcggtgatcgccgccggcaggttgctggcgatctcctccatgagccagttcgtcttcttgttcccgggggcgcggtactcgaaagcctggcggtcgccgtagccctcgatgacgcggcggcgctgcgagttgtgccacgtgccgccgccctcgacgcagcggttgagccggccggcggtgccggcgccgcccctgccgcccttccacttggcgacggtgaggaagtaccacgacttgccgtcgtggccgtacgccctatgcgcctccgtcagcgtcgccgggtcggagccgtagacgtcggcttcccggacgatgtcccggagctcctcgatcggccggccggtgatccagtggttgaggtagtcgcggatgagctgctccggcttcggcacgaagaagtatcccgagggcaccgtcacgtcggggcccttctgcttcttgtcatcttcttccgccattgatggtgatcctcgtcgtgcgtttcaaaactaggttttcgcgcgcgcgctcgatcgatccgtgtcgctgtgaaaggaaagcacaggttggtgttgaatttatttggcatgatctcgttggttcgagttcgaatcggtgaagaatctcgagtccgagaaggcaagaaccctttcccgtctcctctcgcgttcgctaggggtggagcggcatctagggtttgtgcgccggccgccgccctccccgctcggcgccggcgccgccccttctcctccccgcccgacgccgccccttctcctccccgtccgacgccggcgccgctctgcttgtccccggccggcgccgagcgtgctcctccccgcccgacaccggcgccgctctgctcctccccgaccggcgccgacttgctcctcccagcccggagcccgacgccggcaccactcatccaggtacatgtttgttgtgttcgttggttgcagaaaagtaatcagattaggaccttgaacacagcagcaaaaacccagctaatgctttagggtgacaccttggttgctgtcagttgttagcatcataatctttttttcttgcaaggtttggggtttggttggttgtccccatcagaaaaatttccatactgtcagccaatgggcacccaacacattccccaaatggagttggtttgtcttcttaaatgtaaaagtggggtaattatgtatttattcatgatctactagtaatgcaaaatggaatataattctgtagttgtgtccttcaaaagaagcaatcttgtaaaaaagttctgtacataatggttgacagattagaaatggggacctcactgaccatactagtatcagtacactggtaatagacagtttctgcttaattagatatgcagatgcagatgattcaacagaatgatacactcatctgcattcagcaagacaataatcaattacatgatcttgtttatcaggacaagaattttgcacatcttcagtgtacaacattatattcagttaatgtacatatactattattctcatcatcgcatttcattttaaattctaattgaccgcccttgccgcccgacgccgccccggctccgacgacggcgtccgcagcccgcccgacgatggcttgacaggtgctccgacgacggacgatgagagtgaagatgcagagaatgatgataccatgaatactatttgtactaggatagctgatgcattgagtagtgcatgaggaggatagttattttgagatatggcatcattgtatgaaccatttatcttttgctctgtttatgtggaccatatcactttgatatatgaaaaactaatatattttgatgaaaaactttgatggatgaaaaagttataaatttttttctttccaattagccttttaaatacgaaatattgaacggattaggtttttacgagtaattagcatataaacagtctcataggcctttaggggcattacaggtatttcttctacaacctacagttttgcaactgctctaaccaaacgggtttctacttttcccacaactgatttcccacagctgcttttccacagcccacagtagcttttccaaaagccacagctcaaccaaacacaccctaagctgtgttcttcgttccatttcgtttagtactgcactgtttagtgacatggagaatggcgggcacaaatacactgctgcatccatggattctcgctaggccaggtagtgctagcgtcgtaacccaagttttcgggggcaaggtggtgtgtgggtgttaacgaccaaatttgataaggccatgggccggattcaaaaccagagtcaaagcaaatttggaggaattctatttagggaaatctatacggagctaccccggaggtcgccttcactcctagaccgagtgactgctccagcacaccaccacctttttttttttacaaatttagaaaatgcagttatttgaccacatcttcatatatctaccgggtaaaaatgagcttaacattaatatattcatatattggcagtttatttggccacatcttcagacatctattggacaaaaaatacagtttttgcagtttatggcacattaacgcgccccaccccaaaaccctagtagaaaaaaccggaccgggtcaacggttcaaccggaaaaaaccagaaccagaggtctccacacggttcggttgcgcgttcaaagaccggacatgcattcgacccggattgaaccggctgaaccggccggttttgcactaaaccggatgttaaaccggcccggtctggccacacgcctgtttttttcctcaaaattcgcagaaaaggctggcgcggcatgggattcgaacgtgggtctgtgcgatgagagcacttggctctagccatccggtcattcgccactttgttatacaggaaatatacaacttttatatatctattgaaccgtggttcaaccggcggttttccggtcggaccatcggaccggcgaaccgagaggttgttcggtcctctccggtccggttttttacactatgccccaaaccaacatatgccgggtaaaaatgagctcaagatagacatgtcctaactagcactttatttgtcggaacttcttcccaagagagtaccaattctttgcgtggctactcggaaaagatgaattgaaatcaagtgcagtcctaactttgctgcaagtaatttcaaccatccattttttttcagcaaatagttgagatctgatactacagtctacaattctattattgttacagtacctctatagttttctccgcgtgtgaatagtactacatataatttggacccttggatttacatcaaacagtccatcagatccaaatccacaaaggaaaggctaccaacaacgcaaaatctattcaaaaagaacatttgccaactctccaatatgtgagatatgcaaccaagacctggaagacgctactcatttttgtttccgttgccctgttgcgatggaattctgcactgcaattaaagttaaccccaaaatcacccggactgaaagactacacatcagctacaactgataattcaagcgatatcaaagcacttcgaaactttcatttcactcggcttcgtcctctctctgagtcatttcacaaatgcattgaatttgtcggctgatcgatatgtgatgtctatcggaagagtcatgacatcattttcggagctatatatcctcacatacatgagcgttgtaacttgtaacatgcccgatcagggaagcacttgtatcatttcaaatccaaacaataaactcagttaaaaacaagtcgatgaacacacgttacagaaccgtttcaacacaatgggcatggtctcctgaaaggtcgactgtgcagcacactgccattttatgcaatgagaaaagggagtacagtcagcatgaaagcctcgtaagtaaaagtcgcagagcccgagaaggctgtgtctttttccttgaacttctcagtcagaccctgtaaaattgttacaaatgaatgttaaaagagtgaaaacagaacattgtgctaggacttaacagcgcctgtgaaggcattagtgtattaccttaactgtgaggcagcatctgcaaaggcaaacaaaatagtgttaggactgttatataggccgaattggaatgatagaagatatcaagattttaaactatatccaatatttaactttgaggttaggacttgcttggctgtggcttataataagccatgacacgtgaccaaagcaacaaaagacttttatatttctacacttaagtggtttaaaatccaaggctgaaaaatagaacgatgaaaaaacaactagatcaattcaaagttttgcatcagaaaacagaagtagaaagactagttgatgcatacattatctttttagttattgcctcaaaatgtgcaagaaacaatttaacaattatatttgataggaaatatcatctttaaccagacatttgatcccaaagactacttttgtgtcaacaaatgtccaaacagaaaatgttaaaaataaggctgaaacgaatttgaaccaatcctattattagctgaccatataaacatatgctaaccaagttttggattttttttagataatgattggatgattggataagctaatagcttgaacaattactaagaaagcaatctgcaaaacataattggagtcatcttactcaatgaagttatcatattcaatggctttgttcttgcccccagtcttgtcaaactttgacacaagcaagtctagcacagttggagaaactgaatatcccagactgagaagagcatcacgcaattctgttgcatcaattttaccacttcggtcacgatcaaacctctcgaaaatggactgcacagtacaagcagaaaatgcacgtattcagtttcaacagtaacttcattagttccaccgcacagaagaaaaggaaagctgaagctgtagcatctcaccctccaattctgaagactgtaaaacacagaggtaaattccttgggacctgaaaggatcaaagacacatattcaatgtggtttacataaaaacgaataatataagaaatgcttaagttcaaagtacagtatctagcaatccagtatttgttaaatcaggtgcatttcacaggttagaactaaaagtccaaaattccatatacaagctcactagctgatagcctgaaacatagcactggtttcagagtatacactgctcaagcaattcaaagctcatgattcaatctctagttctctacacagaaaacagatgccaaaagaataggacaaatggcattgattaaagttgcaaatatctagttttcagtttagcagtaatttgaaattgtaaatagaactgacaaacaaaagttagtatacaaggtaacatgtataaactgccaaagtagcatgcccttttactggagtaaacccaaaattctttctacatcacaagccgggagaacttacaagttcattgtgcaaataaaccagtatatgtgtctatgctgtaccaaagtagaccacaacaaaatgagctaggattttccacaattctattgaatcctatcccacaaagaaattgatgcaatttaagaaacttaattaaaagaacccgcatcccaacacctaaaagtaaactccagcttttaacaagttgccactatatcgttgcccccaccacgttcccccgtcttcctcccaaacgacaagtcctggccgtatgatgcaaacactgactacagccctggctggaagactccatctccgcatcggaagccaaaagtcgcatactggcatcgcaaataccgtgggaagcttgataatcccgcggagagccacgtgccaatcgcgtgccactcgtttgactacacatcgcccaaagcacaaccaccattacgtatgccgctgaccaggacaacgcgcacgatagcaaccatggagcgatcagactaacgcacaccatccccaaggccagaactattcaattcgcgggtgagaggatgaaacgatgaacttaccaatcttgcggacgttggtgttggtgaagaggtacatgaggaggtggacggtgcggaggctgaagctctggctgtacccggacagcgcggactgcagctccttgtcgtcgatcatcccgctgccgtcgcggtccgccgcctggaagcacgccaccacgttgggatccgtcccgggcgggaacgccgacggcaccagcgacgcgaacgggctgccgtacccgccgggcgccccgtagggcgccgacgagggcggcggggccccgtacggcgcgccgtacggctggctggagggcggggcgccgtagccgcctccgctgccgtagggctgggtggatggcggggcaccgtagccgcctccgccgccgtagtaaggggcggaagaggaggaggtcttaccttccttgggaggcttcgccccgtacggcggggcggagggggcgggggaggagccgtacggcggtggcggggcgccgtagccgccggcgccgccgtaggggtagccggagccgggatttggcgggtagccggccattggagagagggggtttaggagagagcggaggttgcgatgcgcagctgcagcttggggaaatttggggattgtcaaagtcaagctgtctgcgtcctctgatattttgtgtgtttcgaaattcaaaatggaagaaagcagtggagtacggtacgggttcatatattgaagaggatgatgacgtgggaagtagatgcggtagttgcaggcttgaagaggtgaggacacacggtgtacgcgtgagttgtgaaacgtcgatcgataccttgtatttgaggacaccgggacatatgtcacgtaccgttgggtcgaaggtggtagaagaaagggcgtaatgcgcgtgggcagcgacggcacggccgcgcggccgccggcgaattgagtgtgtggcttaccgttgcgctgcatgtttcattgttcgttcttcaaccaaaggataagcacgaagcatcggggacgcgtttggtcgactggcacacgggaatacgggatgatccaatgaacgcatgcttcatgcttggaagtggtccatccctcagttagaccgtcggcccaaagaaattcgaggacatgccacttgatttgtctgcctctaaattttcgtcacccaatccacgtgcttttgaaatgtgaatattttgatttcgtactactttcaccggaggagggcaagaggcggcggcgacaacaacggcaatgtgcggagcttgggacctgggagggagggggagggggggcaagcctgtaagagaggttgaggtgatcggcgagcttgttcaagctcaagctcactcggcatctatgcaaaggaggtggccaacgaccttcatcaaagggtaggcctagctttgccgctggcacaccgagctcgcccttgcccctagccccccctccctccccttcttcgggcttcgcgtgggtctccagcacgcacgcacggacctaggaccattgctatcgtcagtgtcctccaccggcttcttccccgttgccagattccacagccgctacctagggacctcctccacctcgtcttccttcgcttcaccaagcttcgcacaatgaggcgttgccgccttcgcttcactcggtagctgactgtcgcgttatcgttgatgttgctgtgagggatactgtcacgcccagaaatttagcctaaatttctagactattttgtgtattaaatctctgtccaggcatcagccagggtacacaaaacgacaaattaatatacagatccaaacgtaaataaagcgtaaatacttacagaagaggcacttagtcctcgcaccgaaacaaaagcagcagtagcggaaaaaaggcgatcctagcgaggcttcagctccactccacaggcaaaactcaactggggtctgagccttggtcctctaactccatcttcagctcagaagtagtacacttctgaaaatggggaaacaatagcaaggctgagtacaaccaccatactcagcaagccacaccaatgatgcagacgtgcaaggagaacataaggacggtttgtggctatttgcataaaggcagttgtaaagcattttattgagcaaaacagtaaaactattgagtaattaaggtaatattaaatctccattgatcaacgctacaccacgttgaacaagcccaaccaacccacctgaactacagtgcattgagtcgatttattaagtgtgagactaatcacggtaaatctggtcgatcgcccataaccgcgggcacggctattcgaatagttttactctggccagaggtgcacaactgtacccacaagacacaatccaccggcatgtcaccgtgtcattatgtgcccatgatgaacacgtcaccacgtcgagtgattgtgacaagaccattcatataactctcccctaaccatccacaccacgttaaggtttcacccacactcctcgcaaggcagcgggcagtcccctcgtgcgccgcggtgaatccgacagctggacaaccggacaccccggccgacccaactccatcacgcccacccttgccactggtgcctaggaaagggtcgagctatacttcagatcaagcagttacccactcccgcttgtggtaagcactgtaagtcttccagggtttcccgtgaaccagtccttaattgccatgggtgcgactcgcaaaaccatgcacccacagcccaccattcagtcgcattttagttggataattacgaccatgaaacatggccagatgtcttgagcacgcagctcgtcatgatactaaaaggtctaatactataattatcccatcaactgagctagtggtaattaagcatggctaagcatatagttctagctaggtcaacataagtaataccagctagtcggtttatcactcaaggtcgacaaaggacagatatcaagtaaacatggcacaagtgagcagataggtaatacccggatcccatgtaattagcaagacatgcatgtttatttgtaaacggtaaaacatttataaattgggatcaacatgctcaagaggaatgtgtgacttgccttgcttcttcaaaacaatctttcgaactcttttcctcgcgaccgcgatcttccgaaacgacggattctacacgctggcaagcaaaacgaggaaaaacactaataaaaaccaagaaaacagtacatgaaaagtaaacaaacatgtagagctcaattttagatgaattttgcaagttgaatggcccaatttggagttcgaatgaattatatatgaattttagaagttgttgagtcattaaatgaatttctataactatatccgaattattgcgcaattattaattatttcccagaggaaaggcctgctgctgacgtcatcaaaggggccggcgccgacaggcgggtcccacgagtcagcgacacacaaggggttggcgcacagtggtcacggtccaccgcggccggggcggcaccgtggaccaggaccaccacgggtccacgggcggcggcccagatcggcaaaaagggagggggctggctcgccggccaacccgacaaggcggcggcggcacaaggctggacagctgagaggcggtggcgcacgagagggagcggtggcgcggtgcggcaaggggaggcggcagccggctgcccagcattgccggtagcgacgctggcgcggagcgcagcggcgatgaaccggccggacggccaccggcggcggcggcgcgtcacgagcaggcccgggaagcggtcggcgaaagggaggaagagggagagggaggggagtgctcaccgagaggccaaatggcggaaggaggcggttggcggcgagcaaggtgacggcgggcgccttgggatgacggtgggacggcgctccggcgatggattggggaagaggagtggtagacggggtgcggtagggcgtggcggcgctgtgggtagcggcggcatggccgggcaagacgacgctcgccggcgggaggcggaagtggctcgggtcggcggtggaagcagcgctacggcgaggcttcagggaggacgaatggatgtcggggtgcagcgcggcgtgacgaagctagtggtggcggcggcgcagtgcggcgacagcgggaagcggcggctggaggcacggcgacgagcggcggagcgcgggctcgcgcggggagcacgggagagggtgcgaggagctcggggaggagggggaaacggaagaggagagcacgagggtgctttatatagggctcggggatggagatcgtggccaggagaggtgggatcggccggcaatgtggggcgccgacgtggggaggttggcggcggttcggcgctgattttgcggggcggagtgggggaaataggggaggaggaggtggggatcgagtccacgcgttcgcgaggtgaggtggagcgcgggaagcgcggcgtcgtggggtgaaaccggcggccatggcggttgcagccggccggatggagggaggttggggatgacaggtggggcccaccggtcccacctgtcggagagggaaaggcgaggccggctgggggaggcaatgtggacttgagaaggaaagggggccgagcgggccgagagagagagggaaggggagggcggccaggccgggaaggaagagggggaggacttgggccgagcccgaaagggaggaaggggaaattatttgttttctttttatataattggataaatgatgtttgtgactttaaaattacttcttgagctccgaaaattcgcgggaaaatctggagagtatattagggcacagagaatattataaaatatttccggccaatgatttttaaaggaaaattttaatttcccctataattcacttaattaaattgctttaacttttatttaatttctagaaaatgtattatttaatgatttttaaccccgaacaaaaatcggggcattacagataccgcccgccgccaccaaggaccaccgcctcctaccctccttcgacgaaaatggcacgaaatcaaaagattagcacctccagtggcacttttgcaagggcacacagattaggtggcgaaaattcaaaggcatgcgaatgaggtggcataccctcaaatttctcctctggccacggtccctatatacatatggccttgatatgttcagtggcggagccatcggtcttgcaatatggcaatacctaaatacttgacctttagttcatttcctatccctaatctagagattgtagttagactgagtactcagtttgtgattttccatcttttcaaaataaaatagaagatggttatttgtgatattattggtagtttaccttgagaggatttagcaataaggactagttttaaactgccaatgatattattaaaaagctaaaatttagttcttttgaagaggactagtttacacattgattattatcgaccgtgaatattttatctcctttcctattgacactggttaggtcttacacacccaacctgaaatcccgctttgtcattgggtacgttgtgtcatctcacctccggatagttcatactgaggcccaagatttctgggtatgtttggattgatgccctaccaaaattttggtagtgccaaatcttggacaagttttggtactacgaaaattttggtagggtagagttgaaaatgtttatttggattgaagccaaaatttgcccataagagataagttcataggcaaagccaaatttatggcataggtagagttttagtagaaatgtttagtttgcaaccctactaaaattttggtagggcaaattttagtagggtaacaatccaaattggcccagagttaagtcagcccatcttaagcgatctacagggagggaggaaacagcagttagatggatggataatccgataggcgaccgaaccaacggcccaccggcttccacgtacccaaccaaacaagcaccgccttgcgccagccatccctgagagcacagagcactctaacaccactcggctatcttcgccggaggcccggagcggagcgagccaaagagcgaatggccaccgtggtgagggcatgcatgccgctgccacctgccgccgtcgcctcctcatccgccgctccctccacggacgcgcaggcgcagaggagtccctcctcctccagcgcgcgcgtgctcgtgctcggcggcaccggccgcgtcggcgggtccaccgccaccgcgctctccaagctccgccccgacctcaacatcctcatcgccggcaggaaccggttggtgccccctatatgctatgcctcctccgcaccgcactagtctgttacatactttcctcgcctgttttcatctgcagaatgaatttgcttcacttgtgttgcaatttcttacgtttgaacgaatgcaaacctcatctagccatttcgtagttcacttcaatagtgggaacagtttctttcttctgtcaatagcatcttggctggatgcctgcaatcttgtgcagttccatctgtacaatgagacgattatagtagtatgaccatttgtcgagtatcttttttttttttttggccagagagaaaggtgaatctttggcatctaaactcggggaggaatcggagtttgtccaagtagatattcgcgacaggaacatgttggaggaagtgctacagggttagtaatggagctacctgcttatgttgtacttttaagttgaaacaccgtatgatttcaaaaaattgttgcaaatattttgaaaagtcatccacaaatttcttctgatgtttgaccattctagtttttctttttttttcccagatgtggatttagttgttcatgctgctggacctttccaaagggagaatgagtgcactgtcctacaggcagcaatagcgaccaaggttagaaatgtgcaacgcctgatcatcaaatgcataagtttaataacacgttgaaatcagtgacatccttaacctttttttttttttacagacggcatatattgatgtttgtgatgatacagactattcgtggagagcaaagggtttccatgaacaagcaaaagattgcggtatcccagctattacaactgccggcatctatcctggagtgagcaatggtcttacttcgcatttctatcaaacatatcagtttactttgaaatttttcaagttacactgtccagatatcatcatgtgctctttcacaatgtccatcagtactcatggatagtatccattgctctttgaggcagtttacatatgtgtaaaatcaccaacttgattaatgccatgtattagtacataatagagagttagagacatgatctagcagtaaactatgaagacaatgttttgatctagctaggtaagcttcatatcttaattttttgagtgcttagaaatacactgttttcttcttttggaacagtgatggctgctgagcttgttcatgctgctagaagtgaaaatgctggtgaacctgaaagattaaggttaggagttatttatttcctgtaaaaattaaaggtcaaactagtcatgaagtatggaaagcgttgtcgtattcatcagaatctatgctagtatgttgctaaatcctttttctagattcttttattatactgcaggcactggtggtgctgggccaacaatattaacaactagttttctgcttcttgcggaggatgtaatcgcatataacaaaggtacttttcgataatttattagtgcacttataggatttctctatgaggaaaatctaagttttgttctcattacaaattcaggagaagaaataaagttgaagccctacagtggagctctcagcattgattttggcaaaggggttaggaagaaagatgtttacttactgtaggcactgaacattaattactttttgagatcttaccacaataaggaaaaaccactttggttagaattcaaaatggaagctaataaattttatattatgccactaatccaggaatttgcctgaggtgaagagtgcttataaggttttaggtgtgcctactgttagtgctcgcttcggtactgctccttttttctggaattggggaatgcaggccttcgcaaactttttacctgttgtatgtcttacttctcaaattatgcactatcaatttacttctttcagacacaaccggtgctattagtattctagtactagtaaactctactaaaaaaaatagaagttttaacttttaagcaaccaattgcttacattttattttattatttaattatgtagttggtgaaatcaactaatactattattactgttaaaccaacatggtttgcttgttttctgctgaaatcttaaaaatgggataatattaaactggtgatttggtgctaatgcggattacacctgactgcaacttgttcgtgttcaggaattcttgagggatagaaataaggttctaaaattggttggatttgttgatccttttgtccgagctatcgatggtattgctggagagcgtgtttccatgagagtaagtacctaaagctgtgttctggaggtgaggttgggaactcacttcatgcacccgcaaaattaattatttacttttttttttgaaaaaatgtattaatatgattttttaaagcaacttttgtatagaaattttttgcctgtgtgttttagaagtactagtttcttccaaggctccaagctatttccagagttaactgcatactctttcaagctgtggccagaataggtatttgaatgccagttttaaaatatttgttcagccaatttttcttcagttttttaaaataatttactttctaaactttgatttgatcaattataagattgattttatcacttcttcaaaaagggagcgaagtatggaccatgtaactctcaatagccatcgatttccacaaaatattggtacactgagactattgtttttactagttactggccaagatttgtttccttggtccaggttagcagcctagaagcatactacttctagtatttcctcaagccatacctggagtaagagtaaattaattatactcaaactttgtccaaagttgtatatgtagctactgatcactaccttttgatcaaatttatttcatttatatgcaggtagacttagattgttcaaatggaaagaatactattggattattttctcatagaaagctatctgtgtaagtacgcacttctgcacaagcagttgagcattctcaaggtccattacctaattgatatttaccatattagtcatcaaatatcaagacttttttaaaaaaataactatcacattttttgccctagatcgcaggaagcttcacataagtgctctctaaatgagaccccagtttcaaaaacttacatcctatgtataagagtttccttttattcaaaaagggattcctgagaaaaccatgtaaatctgtcctcatttaaaagctaacagggtatctacttcccagagtgattattccttagcatttgaatgatccagcatttttgtaatgctaacaccctaaatcctaggaattcatactcaaaacttggagcgatcttactacatggttgttttgagaagttccgatttactttgcagttttaaattttaagaacaaacaaaatcatttggtacaactatctgcattgcatcttagcattaatttttattggattttcagatcggtgggctatgcaacagcagcatttgttttagcagttcttgagggcagcacacagcctggcgtatggtttccagaggaggttagtggtgcactaatgggaggacaaaataacacactagtcgacacaatatactcactctgtccctaaatataagggatt

SEQ ID NO: 8283 - DNA, 4291 bp, Oryza sativa
ggggtcgggccgctcccgtttcgaccccgagggctggggcgccccgaccccctgtgggtttggcgccacgtgtgtgggttaggtgagcacagcggcgctcacctaaccgcgtttatcgcgggttggacgagcgtcccacaccgcatttaatgcagcgcagcacactcgttcggtccgtgacaggtcacagtgtgtgaccggttacagaccggtcagatcgcgggttaggtggcaacaggcggcctttcgcacgcctcgccccgtcccgtcggaatgataagagcttcctggctctcgtccctagccggagccggcgtgctaactcttggagttggtatgtcagtcccggtcagatccattccaggcttcagcgcaagcatggcaaggaagtcgctggccattgaatgaaggttgaaatgggcgtccaccgggaaagctggcgaggggggcaggaggcgtgtgctctgcttgtcagaggtcacttccggctgtagactagccctcattgtaaaaagcatgtttcctttcttaggcagctggaggcccttgtggtgacccctgaccagataaaaaggaggcccaggcctaggagaggagagggggagggagaaaaaagggaagaggggttgggactctagcgaatgggttctagaccctgaactctcgctcgctaggagaggagagggggagggagaaaaaagggaagaggggttgggactctagcgaatgggttctagaccctgaactctcgctcgctctccggctctctgtattccttcacgcacagatccaccagaacacaggagtagggtgttacgcttctcagcggcccgaacctgtctacgtcgcccgtgtcttgtgcacttcctctctcgcggacgttccttagatcgagggcgaagaacctcacttagcgcccccggccgaaccggcaaaggggggcctgcgcggtctcccggtgaggagccccacgctccgtcaaagtgctatgggtaataataccaccttcgaaatctaagtgaagaggtctcaacttaaatacggagctagtcgagagtctctgttgaccggttgagatggtgcgcggacaaccaggcggggcgaggcgaggcgaggcagacagttgctgctgcgctctctcattttgtaacagacggtaataaacacggagaattgatttcgtatcaatgaacgcgtcggttacggaattaaacgccgtgaattgatttgattccgtcggttacggaattaaacgccgtgaattgatttgattccgtcggttacggaattaaaggccgtgaattgattccgtcggttacggaattaaatgccgtgaattgatttgattccgttggttacggaattaaacgccgtgaattgattctgtattaacgagcgcgtcggttacgaaattaaacaccgcggttgatgactccgaacgttactctcgcgctcgcatatatatactccgcagcgaccagaacgacgacaaagttcttcacgactcttgtacttcgagttcctcctcctctgttcctgagctgcagaatccttccccggttctgttcacctgcacgcacaggtgtacaggacgagcaggtgcctccggaactccgtccgcttgagaacttgcacgggtagacgggcgatcaagtttttagatagcgcttcaagcgcgactgctcctgttcttcgcgactactactgctgcatcgacgccttcgtcaacatgtcgacggagattggagacaaggaggtgaacgacatcaacggaggcaatactgcctcaaaatccagcggtgggacgttcttagggtatagtttcattctcctgattctattagatgtttctttgttgatgttcttcgcaatggcagcattgcgttactatgtaaatgttgatgcgtatttcattttaagcatgctcaagttgtatacatcaagcattatcactagatctactcatattaaaaatgtcatgtttattgtcttaatattttggattagaatatgccgaattatgaccaaatttccaacagacgtcggccgcatgtcacttcgctgacatcaaacacgagccgaactgagatcgatgcccaatcagaggacgagaccggcgccgtcatcctcctcctcacgctaccatcgccgtgccttcctcgtcctcctccggtgaaccgacttcccgaatcctataaatagccggtgaagccctctcttttccccacatcatccgagctctacgagctctctcttctctctccaccatgaccggccaccactaagtcccggccgatctcctcccatacagctccacttctcgaatccatgcaccactagtctctcttcactccggcgaatccattttgtccatttcccccttctctctccctccaaactaagccaccaccattaccaccttagccggccgaaggtgagctcgtgttgccgctgttccggctaactcacccttcctctctcccagccaccaccctccccgggtgcgcgttgctcgggaacacgttccgccaccgacgtcgccgtcccccatccactggagcaccggcgtccctctctccctctcctctcgtttactcggctgaaaaagaagaaggaagatacgggaggaagaagaagagaaagaaaaagaaaagaaaacaaacactgacaggtgggcccctgcacagtaactctcctattttccctatttaattcaaatccaattctttagaagcccatatctcctaaaccgtagatccaattccaatgaaacctagatctaaattcatctaaattcaaaagctatattttgatacctaatttgctattttataattttatttgaatttattcaaatatcatttgaatttatatttgcctttttcaaatactttcttttaccccaaaatacctattagccactaaaatgcggccggttggaactttacgtcttccatggggacgtttgcggtctattggccctgacgtcgaaccgttggttgtaaagcctgacaaaacccaaaccaaaggtcgaagtgctgctcctggcatcttacgcctcgctgcgtacaacggtcggagcttcactattccctcgaccaccatagcacactgcacagttagctttcgggccctgtgtgatcctagccgctccgccgccactcacggttgtcggagtaacacttccgcctcgctaaacctgcacaaacctcccatccctctagccgttatattgtctattgacaccgactagagaagataccaaacctagtcgtcatgctttagcgatgactagcgaacacccaaaccctagccgatatttatcttaccttgatatcggcttagacaattgaagccagacccccaccagctataatctcaaccatttaccctccaactacccatagcatatacatgaaatacgagccgatatgctatcctatttcagcatcgactcgagaacaactaaatcctagctattcttctaccaaagccaacctcgatcaatactagccacatatccacttaaccagttagattattcaatatatctcctactctccaagaaaccaaaacccacacatgaaatataagcgacattagttgcttaatcccctctagcctccaaccctttagaacctccacatataatattagctcaataatccctatgtcctataaaagagataggctatatcctaaaaccaagccctctttaccgtttatcgttttctcgttattttatgacttttattgaatttggttcttcgtctttcttagtagagtctattatcttttggatggcaacctgtggtatttcgaggatcggataatcaggttgcttatcttgaatttatttgcgttggagcaaggcaagttattatctctctcctttgagcataattatcctttattctatatctccattatctcatgcattagtcattcatgatttcgaatgcgtaacctgaacatagcaaaccagatatgctagctttgcttagccctgcctaattggactgcataaaatataatgaacttagattggaacagtatggtagaaatggttgatttccaggtggctagtactgttccaaccgacataaaactgccaagtacatgtgaagaacatacgagtacgaccgcaattctcgtatgggcatagacctagctgattaagttatctagcaaaggtggtacctgtgtatagtggttcttcttaagtcctcgcgcaggaggcaaatttatgccgcgaagggcaactgtgatatttaccgaggcgcaggtaaat

SEQ ID NO: 8284 - DNA, 20900 bp, Oryza sativa
attccgtcggttacggaattaaaggccgtgaattgattccgtcggttacggaattaaatgccgtgaattgatttgattccgttggttacggaattaaacgccgtgaattgattctgtattaacgagcgcgtcggttacgaaattaaacaccgcggttgatgactccgaacgttactctcgcgctcgcatatatatactccgcagcgaccagaacgacgacaaagttcttcacgactcttgtacttcgagttcctcctcctctgttcctgagctgcagaatccttccccggttctgttcacctgcacgcacaggtgtacaggacgagcaggtgcctccggaactccgtccgcttgagaacttgcacgggtagacgggcgatcaagtttttagatagcgcttcaagcgcgactgctcctgttcttcgcgactactactgctgcatcgacgccttcgtcaacatgtcgacggagattggagacaaggaggtgaacgacatcaacggaggcaatactgcctcaaaatccagcggtgggacgttcttagggtatagtttcattctcctgattctattagatgtttctttgttgatgttcttcgcaatggcagcattgcgttactatgtaaatgttgatgcgtatttcattttaagcatgctcaagttgtatacatcaagcattatcactagatctactcatattaaaaatgtcatgtttattgtcttaatattttggattagaatatgccgaattatgaccaaatttccaacagacgtcggccgcatgtcacttcgctgacatcaaacacgagccgaactgagatcgatgcccaatcagaggacgagaccggcgccgtcatcctcctcctcacgctaccatcgccgtgccttcctcgtcctcctccggtgaaccgacttcccgaatcctataaatagccggtgaagccctctcttttccccacatcatccgagctctacgagctctctcttctctctccaccatgaccggccaccactaagtcccggccgatctcctcccatacaggtccacttctcgaatccatgcaccactaatctctcttcactccggcgaatccattttgtccatttcccccttctctctccctccaaactaagccaccaccattaccaccttagccggccgaaggtgagctagtgttgccgctgttccggccaacccacccttcctctctcccaaccaccaccctccccgggtgtgcgttgctcgggaacacgttccgccaccgacgtcaccgtcccccatccactggagcaccggcgtccctctctccctctcctctcgtttactcggctgaagaagaagaaggaagatacgggaggaagaagaagagaaagaaaaagaaaagaaaacaaacactgacaggtgggcccctgcacagtaactcttcctattttccctatttaattcaaatccaattctttagaagcccatatctcctaaaccgtagatccaattgcaatgaaacctagatctaaattcatctaaattcaaaagctatattttgatacctaatttgctattttataattttatttgaatttattcaaatatcatttgaatttatatttgcctttttcaaatactttcttttaccccaaaatacctattagccactaaaatgccgccgattggaactttacgccttccatggggacgtttgcggtctattggccctgacgtcgaaccgttggttgtaaagcctgacaaaacccaaaccaaaggtcgaagtgctgctcctggcaccctacgcctcgccgcgtacaacggtcggagcttcactattccctcgaccaccatagcacgccgcacagttagctttcgggccctgtgtgattctaaccgctctgccgccactcacggttgtcggagtaacacttccacctcgctaaacctgcacaaacctcccatccctctagccgttagattgtctattaataccggctagagaagataccaaacctagtcgtcatgctttagcgacgactagcgaacacccaaaccctagctgatatttatcttagctcgatatcggcttagacaattgaagccagacccccaccagctataatctcaaccatttaccctccaactacccatagcctatacatgaaatacgagccgatatgctatcgtatttcagcatcgactcgagaacaactaaatcctagccattcttctaccaaagccaacctcgataaatactagccacatatccacttaaccagttagattattcagtatatctcctactctccaagaaaccaaaacccacacatgaaatataagcgacattagttgtttaatcccctctagcctacaaccctttagaacctccacatataatattagctcaataatccctatgtcctataaaagagataggctatatcctaaaaccaagccctctttaccgtttatcgttttctcgttattttatgacttttattgaatttggttcttcgtctttcttagtagagtctattatcttttggatggcaacatgtggtatttcgaggatcggataatcaggttgcttatcttgaatttatttgcgttggagcaaggcaagttattatctctctcctttgagcataattatcctttattctatatctccattatctcatgcattagtcattcatgatttcgaatgcgtaacctgaacatagcaaaccagatatgctagctttgcttagccctgcctaattagactgcataaaatataatgaacttagattggaacaatatggtagaaatggttgatttccaggtggctagtactgttccaaccgacataaaactgctaagtacatgtgaagaacatacgagtacgaccgcaattcttgtatgggcatagacctagctgattaagttatctagcaaaggtggtacctctgtatagtggtttttcttaagtcctcgcgcaggaggcaaatttatgccgcgaagggcaactgtgatatttaccgaggcgcaggtaaatatatgagatgaattgtgcacaaattgtttgtgaaccctgattgcgatgacatggtgtcataaaatcagttctctctaaagacctcgggaacgccagaactcctctcgctgctgataacgttacgttcagagtgcatggggactagagttcatggaacaggtaccactaatgttagtaaccgaaaagctttgccatgacaaggctaatgtgtttggcacgtcatggattgtgggtaaagcgtacatctactgtttcttaaaactattcgaatagccgtgctcgcggttatcgggcattgggactcacaatggcatcttggttagaaacataattctagattttattaaatactgttgcattataaacattatagactttctacttctacattctcagctttctgcaattaaacctagctctacacatacattaccatttcatgcattcattgttgattaatataatagcttgctgagtacgttgtactcacccttgctttaacccccttctttcagagttaatttggaattcttgccgaagccgggagttcaattatataagttagtcttatataagttagtctcttctcaacctaattcgcaaatatagattagatagatggtttaagtctatagccaaacattagggtcaagtcattctatagcttctgttgtaatagttagccacaaccttgtaaataccctattatatcacataaagaaatctcctttggagccttgatcaaatgtatgcgatgaagatccagattgttgaacctatatcaatctactgattcaggacttgatacagttaaacatgtcggtttccgaatcattagttctgggacccgatagtctggaatgtaatttttatgttagcatttaaatatagtcaatatggatattaaagtattgttttcactaaaaaatatagtagttcaaacatatcacaagttgaatatgtgatttaaaaggttataattattttatttatattgttcctataaatgctagtaagaggagaaagagaagaaaaggaaccatggaagagctggctagacctgatatgtggaggtccattaatggttttctccccataaagataatttaaatttcaattatcataaggataaaactaagagaaaaggatgaacgacgcacaccacatggggatagggagggccggatatttttcttaaaaaaataattgatatgatgacctaaaataatgcgttgcatgtttaagtcgaaaccgatagtcaggtgttttgttttttatcataattttgtacgattcttttaacttatgagagacctgtatagtggcttagaaatatttataggatgtttaatgtataagtctttaacattgtttgggtggggagcgtggaaagaaggtttggtattgtcttaaataaaaatctaataacaacctaaatggtacgtccatcggtttaagtcgaaaccaatgattagatgttttgttctgaaatttttaagatttttctctaatttagaagtgtcacatagtgttttagaaacatttataaggatggctaatgggttttaatgctgcataggatcgcggtgggagtttaggatgttttttttttgtaagaaaaagatatatctaataacctaaaataatgtaaacgttactcgaatgttttatttttttagattttctctaatttagtagtcctatatggatgtttaggaatatcccttctttctataaagttaagacccaaagctgcctcttcaattcgccacgtcatcaacattatattagccgttcgatcaatatgtacatcagatatacaccattggatcccttatcctcttgcccagcatgcatggtaatcaccttgctccttcccattcccctcccttaatcacatgcattaatttacagtagaaacagccaaatcaattgagccaggaggtgcgatggttaataagattcatgtgcctcttgcgattctcttccaaaccttttaataagcccctttacaatccccactataaccaagtctcttcccctttgcatgaatcttttcatcgtatgttggattctatttggtaagcctgaatttaacatttattttaaccagattctatttgagtacacattatgatttgaaccaagcatgagcactatgaaagttttgtccattggtttctctgaacttcaagaaagaatccctatcctatgcatttattgttgttttagtttcttaagaaaagattcgtcatacttgcagccaatacttatatgtcctatcactaatttatttgagtagttgggaaggatatagaggattacaatatagctgtcctgacatagcgagaagcagcttaacttgctcggtatgtattttgttttcaggttcaaacaatacaatctaattgtccatactaatatgcatatttacatacgttctcaaatgtgcctgcagcgaagcgcggggtttcatctagtttatatgatgtgtaatgaacttattaggagaggctagaggaagagctaaatagatctagtaggttaatgcttttaaggcctgtaatttttttaattttaattattatggaaataaaaaaggaaaagaaaggaaatggagggatcgtacctacattgctgtgaagatgaataatgcgtacgttgtggaggcgtacggtagggatgaaaaccgatcgaatacggtcggaaactagctctatcatatttgttttcatattttttctcggaatcgaaatcggaatcggaaacccggatacgaaaacggaatcgaatattatcgaatacagatacggagcgaatacgaatcgaaatgaatacggtaacgaataattatcaaaatatcaagacccctcaaaataagcttcttaaaacgaggaagagatgtagccattagttttcaaaaacaaaacaatagtattctcaagctgttgactgagttttcagggtggtagatgtctaagctaatctaatctagcaaggcgatttagccaataccggcataaaccctaaaacgagaagcagccgatagagctaaattgatatgctaagactagattaacagagacatatgataaataggtaggcaaatatatcatccaaaccagagcaatccaagaggtcgaatgtactgatgcagccttgaacaacgccggcatagacgatacaattgcctaggccgacggaatattgaacttaccccttcgccggagatcgaacaccgatgcagccccgcatcaggtgccaagtcccgccggacgataaaataaagtagaaaaggtaaaagggtggcgatgcgccgaattgtattgatcgtcgagatagattacatagaccccgggtgtacatatttatacccatgggttgatacaagtccttgttggacaagaaagaaactttcctaaagataaaaggaaaagataaagtccttataactaaacacactttcctaaagataaaaggaaactaacaaactattcctaattaatagataacttgccatgccgcattctctttgaactcggtctcttctggataagcttcctttagtagatcaatttccttaaccgaatatagcaagaatccgacaactgacgacttgacaactctcatcggctaatctcaggacttcgaagccgatgctgactctaagccgatgactacttcgggctttccaaattccactgttaacagtcatgtatcaggtcatggatgaaaaaacgccgaaggaaatttgggacaagttggcaagcctgtatatgtccaagtcgctgacgagtaagttgtatctcaaacaatagctgtatggtttgcagatgcaagaggagtcagatcttaggaagcacgtggacgtcttcaatcagttggttgtggatctaagtaagttagatgtgaaactggatgatgaagacaaggccataattcttctgtgctcgcttccaccgtcgtatgaacatgtggtgactaccctgatgcacggcaaggatactatcaaaactgaggagataatttcgtcgttgcttgcacgagacttgagaagatcaaagaaaaacgaggcaatggaggcttctcaggctgagagtttgctggtcaaggcaaagcatgatcatgaagcgggggtgttgaagagcaaggagaagggggcacggtgctataagtgtcatgagtttggacatataaggaggaattgtccgttactgaagaagaggaaagatggcattgcaagtttagcagctcgtggtgatgattcagatagcagtagtcatgagattcttacagtgtctaacgagaagtctggagaagcgtggatgttggactcagctagttcctatcacgtgacatcggagcgggagtagttctcttcatacaaatctggtgattttggtgttgtttacttgggcgatgacacgagttatcgtgttgttggaatgggcgatgtcaagttcaagatgtgagacacgtgccgggactaaggaagagtttgatttcgcttgggagcctacatgagataggttggttgtatcaggtggattctgataggaagaccatgaatatcatgaaggacggcaagactgttatgattggtgagaggacaagctcatgtttgtacaagttacaagggagtgctgttgcaggtggagtcatggaagatgggtatgctggtgttgctgtgcacgatcctgaaggcggcgagcctggcgtaagctcgtcgggcggctcggcgtgagctgcggcagaaccaactcaagtcctggtacacgaaggttcgagctagtaacagattcggattggcgtggcatattcgccaaggtggagtttgttagagtttgtgtcgaatatgtgtacgtagtcggttacagtttaggacttggagttgtaataggtattaggactagagtatgagttggactctatcctaggttctctcataaatagaggagcgtgcctgttgtaaccgcatagcgacttagcatagcgagagggagcggctgccggcggcgaccggccgttagtcgttgtaactctgatacgctgtatatgctggatcggggaggagcgcccgtaatcagtaccccggagatgtaggccttggctgaactccgttaccaaatatcgtgtctcggtgtcgtcatcgttttggatctcctatggtgttttcttccgcggtttggtttccggtgtgatttcggggccggttttataacaccacgcatgccacacgctcgcacgcgcacgcacgaggacgaacgacgaacgaatgcacggacgacacctccagcttcccgcctccgtatttccttcgtttctcaactagaaggctcaagactggaggcaaaagaagcgcaatttcaacctatttcacctcctcaaatccgcccctactcccactaactcaatcgtcgtcaccggaggaaaattccccgaaactctaataccggcgccattgattgagctccaaaattcatcgcatacatcgccaatcctctgaaattgaaggtaaaattggattctccatgccgagtactccatttcccctctcattacacatccaatccatcgccggaatgctgccggcgctgcctcccggcgtcgccgctctgttcggccgcagccagccgcatggcgcgccgccgctccagggcgccctagctttggccgtcgccaccctgggactcctctcgcctcactaaacctcaccaggccgcctcccgcaccggagtttgccggagtcgccgccaccatggccgcctccgcctcctattactgcccgccgccgccagcctcgccaccggcgcttctctcgctgccgaccacaaaaacggaatcgcctcgacccctagataacaaaatcggcgcccccttgtccaaaaccggcctcctctgccgccggcaatgtgggattccggccagttcatgtgcagaacgagaagaacaggaaatccaattttcctattgaaaaataaatcagaaaaatcctttttatttttctatcaggttgaccatccgtttgaccttaaaatcgaaatctgagacctattccaaactcctagaattattctgaatccatcagtatcagttttgttgcaatccgagcacccgttgtcgcgaccctaattttagccctagggttcgccattctccgaaattccaaaaatccctaaatttaattatttaaaatcctttccacccattgttgcactttgtgatactattttcttttgtttatctttgtttttctgttatttattgtggtgatgattgttgcgtaaatagaaaacgctgacgttggtccggtagtcgaagcgagtgaaatctccgcaccaggaggagacgatttgtacgactacatcgcgcccgaaggttgcaagacatgcaccctcccttgaacaatttaatcccagcagttagagagttattttggtagcgtacttgtcctttggagtatgatagactgcacgaattattttaaattaagtatattactattattgcattatattttctgttgttgttataaacaccttaatgagccttagagtctaactaacttaggataaaatttgagaaacacttaaacaaactgttaattatttaatatgatattgatttaatatggatattattactgcatatgaaaacatgcttatggaactatttatggctatatgctaagaattgatcacaccacatgtgagcgggtggtacacatgatagagttcatgtgtttggttttatggacctgcttatggtcatgatggatatatggatatatttatggttatttcttatttaaaattgatataataatcaacccccttgtgtcaataagaatgacatagtttcgcccatccacacgatcgatttgtcgaacctgcccgtatattgctccaattgattgaacttctgcaggcctttcggtgcactggccattagctttcaagtatgtgaagcaaagtgacatggttcatgtttatatgatttatatatgtgggctcgatgggccccgagagttcagaattaccctatgggtccatgaagttctaggctgcccatcgagtaacgaacaatggtaagtggatgcggaggtaggttggcacacacctcggaccagatcactccgagcaacatcccgagcatcctttaacttataattactaggcagaagggagagatatatggagcaatattacaccttgttacttttcagcccggccagctgtgggtatcgtgtgggtaaagctgggcagacactgcagagtcgttgagtattcgaatacgccatgctcccggttaatggagatgtgtctatgggtgattcctgattatgggcacaagttaaactaaatggctatgaattaatatggttaacttatttattatttaatgttctattcatgttatttataagtaacattcatacttttatgctcgttattattgtttaaattaaatgttcaatagtgttgtttataacaaatgcttattaagataggctctatgaaataactgttaaggttagggtttaaaccttccagctctcaatactgcatgttgtatattgcaattattgtatttattatcataagcatgtcttgctgagtaccatttgtactcataaatgggttcagatcatgaagaggaagatgcatgtggagaacctgttgatctgttagagtgggacaactatggtttctaggtcatcctatgctcagacagttcctgtggtggagtctagcagtttatctgtttgtagaaataaggctttataggccatatatgtaatggtttgtatttatgttgtgttgtgaattaagtgacttaagtattgtatgatggaagtttatgcttttatatcatttcatgcgtaactgaacatcctgggcggttacgtattcgtgggtgcaccatgactttatcgggtgtccccacactcgagcggcgcgccgtgcggcggcggcgtcggcgggccccaacgggttgtggcgggcgtgctcgcgcggcgggagggctcgagcgacgcgccgcaaggcggcgacggtggcgggtgggagccgtggccggcgacggcgtcggccggcaacgggcggcggcagcgggcagttggcacggccggctagccggctaggatttctggtttttttttttgctgaaaaatatctccggatatccgatgaaaaatgccagatagtttccgaccgttttccaattccgtcggatatcacccttactgtattcgttttcatatctgagaaaaaaaatccgaattcatttctgaatccgagaaattccggatatttccgaccgaatttttccgaatccgaaaattggtccggacggacggaaagcatccgaaccactttcatccctaggcgtacgtggacggagggagattttattttaatggaaagaaaaatctaacattaaaattattgggttcaccaatttaaatgtaaatcgatggtcagattttttatatgatgtgtaatgaacttattaggagaggctagacgaagagctaaatagatctagtaggttaatgcacattttaggcctctattttttttaattttaattatcatggaaataaaaaaggaaaagaaaggaaacggagggatcgtacctacattgctgtgaagatgaatagtgcgtacgttgtggaggcgtatgtggacgaagggagattttattttagtggaaagaaaaatctaacataattattgggtccaccaatttatatgtaaattgatggtcagatttttctattttattaaagtgacatgtggcgactcggggagagagagagagagagagttcaaattaatggatccactagtttgaattatctacacttcaaatctaatgtttaagatagtaggtttctggaaatggaaatggacagtaagttgtttcatttcttttatattttttctacattaaaattagtagctaccttcagaaattattagctatagaatagaataggattatataggaaggagagatgtagtactagaggaggaagcgtacatactacgtgtatgtccgtacgtagttgtagtactgtgggccggtgggagaggggataggagggagttgggttgtgggcttctttttttaaagataatctaataataaaaaataatgggtccacccatctattaaaatgccacgtagcgattgaggagtatttatagaaataacacgtggcagtttaggaaagtttgtaggaagtttaatgtacttttagtatataatagatagataatagataataaacttgtagaagttgaattttaacttgcattttgtggattgatatattacatattgatctatcttattcatatttttttaattttttttataactatttagatgacgcgcaataaacgggtgtatgtccactcaagctgttaaaacagtttccctgtatacgtggcaacgtccttcgataagcagagagactgacttcctaccaaattttcttcccttgcgaagcgtggctgatacgcggacaaggctttaccatttttcaatgctatagctgttgtgtattaaccttcttgcgaaattagcttttccaatacaaaacccaaatgcgtgcgttattcaagaacacataataggttatttcaggcaccacgtttcaaggttgggcaaattgctaaaacagaaaattatttctctcggcgtcagcatttcatgagcataatgtgaccatgcagcttcaagaattcctccaatgctgtcttggacgaaccaccgtcctccagagttcgaccaatcatcccctgaatctgcttcacactctgtcgtatcttgtccgccttcgccgtaatccccatcaccatctccacgacctcgaccaccctctcacgctccagcgccggggagtccggccagttcccgcgggacacctccacgcacgcgccccactcctccagcatctgggcgttgaagaactggtccgccgtgagcggccacgcgatgattggcacgccgtgcgccatgctctccagcacagagttccagccgcagtggctcaggaacgcgccggtggacgcgtgcgcgaggatgctcacctgcggagcccacccgtggatgagaagcccaatgttcttggcacgcatcctctcctcgaacccttccggcaaccactcggcgctgaactcgcggccgttggtggtctcgatgtcaaacccgaacggcggacggatagcccaaatgaacggcctgccggtgagctccagtgccatggcgaggtcaaccatctggtcaggccttagcgagttattagacccgaatgagatgtacagcactgacctctcttctcgggtgtcgagccaccgcttgacgtcatcgtcgttatggtcaccgatgtgatcggagtgctccgtccggcgacgcactagagggccgatgggatagaccgggacgcccatcgttttccggagcatgcgcagcccggtcgtctccaactcctccatcgtgctgatgagaatcgcgtcggtgtcgtacccggccgatgtctgccggcggtggtgggccgaccaccggtccgtgccgtcggcgtggagtaggtaaggcggaagctgcgaccggtggacagtaacctccgggtggtccgggaggcagaacgcgtcgtcaccgggcgcacgcaggtgcggcaagtggttccacagcgagtggaacaccacgctgccgaacgcgccgcaggagacgaagatggcgtgcgcggcgccacgccggcgggcgacgtctgtcgtccacgcgaggaaggggtcggcgatgacgcagaccctggcaccgttcgctccggcgtcggtgatcaagtcacggacgaagctgtcgaagctgtcctgtagcgagcgcgactcggtggcctcgaacagcgtgatgaagtggaggagcggcacggcgtcggtcgactcgatgtctccgggcaggccgtgctcggctggcgcgaacggcagggcgtggaaccggaggtaccgcgtctgggagctcgaccggcggcggaggtcttccacgttgcgcggggtggagacgatggtgatgtcggccgtgggctgggcgtcgtggaggtgggcggcgagggagaggaaggcggagaagtggccctgcgccgggaacgggaagaggacgatgcggaagctgccatcgctgggcatggtgaacacgttgttctttgacttcgaggttctccactggaaggaaattaaatttttgctttgtctgaaaggagaggaagcacgacagcaccggtcggtgtgtgtgtggcaatggctctgggtggacaggatgaacgatagggtggggagcgaggctgggaaggatgcgcttggcagttggcagacaggctttgggatgaacgacgatctcgcggcgtggggcagttggtaaggcttccgacgcgggatggggcagggaagcaatggtgtcgtggacttgtcctttggtttcctgtccgtgagatcgtgacgtgaggtggggccgttggatttgatggtcggggtacgacgcagcgcgattccgggcagaaaaagggcccttgccctgtttgcgccacagggctgatgcgaatgcgagggaggcgtcggcgtcgctcgcggctcgggtgcgacgtggtgctttgcgtgcggcagcggcgcacggcaggctccggcttgaagggcgggcggtggtcaagagcgggaccggaggcgacgtgatgggacggagtcgtttgcccggcgtggtgtggcgacgagtgcgcaggagcagcacactggagtatagcaggcgcggcgctgcatcatgctcgcggtcgtgggcgtgcgtcggcgcgagactttggagggcgaccacggtcgacacggctcacggcactggcgctacagtccacacgattgagcgcgagactggttcgtcacggtgtagcggcggcagctcgtgctgctacgagcagcggcgcaaggcaaaggcaggcatggcccgcatgggcgcacggcttggctggcttggctggctgcttgaccagcaggcgtcctagccggcctggcttggctgtgggctgctagctgtgctgggctcggccagaaggtggcgacctggcctttttgtggttgccccgactggtattttaagaataactagcaatagtgccattgcgttgcaacggcaaaaacaccgtttgatagtgttgcaccttgaaaaccttaaatctgtaaaaatcaagtctaatttgatacattaataaataggtagaaccgagtctaatttgatcaattagcataggatttaggatttagttctagatttatttttctagactacttaagagtttatccaacggactttaatttgaaaaatgtgagccacattgtttgatcaattttgctttcggcctaggtcttcccaagccggcctaaacttgagctggcccatcttcagcgagttagagtcaattcgacggcccgcaagctgagcagctgagcgcggccgacgtatgcggggacggtccgatgcacttccgcggtccattgggcgcagcgtaatcaacggcagcaacggcctgacgctgggcgaatctgagtcgtccgatttaatggacggctccaatcgtccccgcaccggatgaagcgccgaccggggagaggggcaaaaccctagctcccaaatccctctctcttgatcacatttcctctccggcgacgagcgagcggaacgacggagcgagcggaggatgtttttttttctttttcatagtacaagttttttttctctttttttgttttttctcacctttatttttctccaccgaggagtcggatttttttagagtcggacattttttttgtcgatggaagttttttttctcttcgttttttgttttttctctctctttttttccaccggaggagttggacttttttttttctgatcttttgcttttatcgctttttttccggtctttttttcacctgtttttttttgcgcttgttttttagaatcggaaagattccctttttatttcttttcgcccttttttttttactgcggaatcggattcatttttcttttctttttttcgcgatttggtttctcttttcttttttttcgcccggttttttcggccgttttgttttggatcggacagattctttttgcccgttttttttttgacagtagagaatagtggtaaaactaaattttaagaagaaatagtggtaaaattaaattttaaaaataaacagtgcctcagcactatacttgatggcgccgagccgaggttgaacatcttagctttcaggtgttatattgaataaaatctggtggcaaggctgtgattataatcgatgtggtgtttgatgaacttgctcgagctaaccgatccttattaggaccaagcgctcagatgaaattcaagaagtgttgtgagtttttctctgtggttttattccagttggtataaaatatactcatacgtcccataatatatatatatatatatatatatatatatatatatatatatatatatatatatatatattgacggagcgttggggctcctcaccgggagaccgcgcgggcccccctttgccggttcggccgagggcgctaggtgaggttttaagccctcgatctgtggaatgtttcgcgagagagcaaatgcgcaagacacgggcgatgtagacaggttcgggccgctgagaagcgtaataccctactcctgtgttctggtggatctatgtacgaaggagttacaaggagctggagatcaaaagagttcaaactctagagaccctctcactctttctctctacgagctctgctctcctctttcttctttttcagctccctacagtccgttagtccgtcagtcccctctcttggtaggcatggaccttcttttatatctcaaggggataccacatataccatttctacctacccttcttttgggtggggactcatcctactttaaccaaaacttggctcgtaccttcgcatgccaccgggttaaccctgtccttccctcattaatgggcggagatttgcaatggctgctctccgaatgaccctccgatgggatgggtcataccaacctccactccgccggaagcaggtgcaacgtgggagcacggttgtttgctaatgacgtgaccggcgtcagactagtcacaaaccggtcattcttgtctaccacgcgtcagtttagcatgccacccatcagcccttcttcgtaaaatgacttccttgtaatggttgcgatgaagcctggtatgaatctagccgggactgacgtgctaactctaggagttcccacgccggctccggctagggacgagtgcctaggggctctcatcattccgacgggacggggcgaggcgtgcgaaaggccgcctgttgccacctaacccgcgatctgaccggtctgtaaccggtcacacactgtgacctgtcacggaccgaacgagtgtgctgcgctgcattaaatgcggtgtgggacgctcgtccaacccgcgataaacgcggttaggtgagcgccgctgtgctcacctaacccacacacgtggcgccaaacccacagggggtcggggcgccccagccctcggggtcgaaacgggagcggcccgacccctcggggagacagagggaggggcggccacatcaccctcgggcccgacccccccgagggggtcaggccacgtgggtgaccgcggctgccccaaacctctagtcaagataaccccggtcccatgtcaccgacagtagcccccggcgttatgccagggcgatcgccctccacgaggaaaacgctcgggcgtgacgccactccttaggcccggtgacaggtggggccggtctctacaggcgagcaggaatccagtggtcgcaaatcgcgcgcatcggcaagggaaaaccgaccgacaataatgagcggctttcttcaagaccgctacattacttgagtagcacgcaaatcgggacgagccggttcgtttcgcctagagatgtgatgatggtgcatcggttggcgagcgtagttaacgcgcgcacgatatgtcccatctcgactgtcacggccgcacatccgcctcgtgcgccgcaaacgggcgaacgggattagtggagtagtgggcgcgagaaacgagggggcgagatagtgggcgcgggaagcgaggagccgggcatagcgttggcaagggtataaagacgccaaggaagagattcgtttccttcctcttcgccattattccccttgccttcgccgcttgcgctctaacttctcgtttcctgtgccctaccctcgccgcactcactcgctctcaatcccctcctctgccggcgtcatggcacggggctccgcaccgctcgacggtagcgtgctgccgccttctcgcatcgtgagcgagaggcaggccgggctgccgcgccgattcatgccggaatctgccaccggccgggaggtggttgcgctgggtgagggacgcccggcgccacactacccggggcggtccgtattcttcctttccttcgcaatggcagggctggtcccgccattctcttctttcttcatggatgttctggagctttatgatctccagatggcgcacctcacccccaacgcggtaatgacgttggccatcttcgcgcacctgtgcgagatgttcatcggggtgcacccatctctccggctattccggtggttcttcaccgtacagccggtgtcgccaccgtcggtagtcggtggctgctacttcccgccgcgggggccggtgctgaaccgctacattccctgcgtccttcgcaagaagtgggacgactggaagagcgactagttctacacccctctcgccgacgaagcgcgcctccgacttctgagccagcccccggcgcaggcctccagctggcgggcgccggtagatctgggagacggctacgacgccgttcttgaccgcctggctagtctgcgatcccaggggctcacgagggccatggtgtacggcgattaccttcgtcgccggatcgcgccgctccagcggcgcgcccggggcgcctgggagtacaccgggtccgaggactacatgaggacccaccagggggtcaaatgggactgggtccctgaagacttcaaggtggtgatccaacgggtgctgaatctcagctccgtggaggcatccttcatcccccaaggtgtcctccccctctgcagcgatccagagcgcgccaacatcctgaccatcatgcaggcggtcggggcgtcaggggagcgggctcctcgaggccacgatggcgcgggcgggagccgaaggggggagcaatctaccccgggagggggtcgtgcttctgggccccgtgacgggggcccggggggcagccgccctgccgacgcccgggggaagaggaaacaggaggataccccctccccatctcctccccgagggggcggggcggtgcgtgccagcagcaggcgcccggagggtgctgtgccgacgtcgcagcccgagggggagcgaaaaaagaagcggctccgcaagataggggggaccgaaccatgccggggaaacctcatctcccccccaaggtggtcgtttagccgacctcctcgcaggttcgtccccgcgccaactgcggctgtattcattctcccatctcccaaggcaagtttttactcacccgtttttcatcttctggtttttcttctgcctcagcgagatcccgtcgcgcccttcccgccattccaagtccggccggtctgaggccgaggagacggcgaccgcggaggcccggaggcgggaagctgaccggcgagaagccgcagaccgcctccgggaagccgaggaagctgcccaggaggccgtccgggctcgccaggctgaggaagccgttcgggaggaggctagactccgccgggccgaggagtccgtccgggagacggaggcggcgcgcgcacgccaggcggcctgccaagcccccgacccgactccgcccgaggcgacgacgacttccgagtcctcccacgacgaggccgcgggcgcaccgctcgggcccgacccctcgggcgacgctcaggatgagccaacttcgggggacgtccccgagtccggcacgtcgatcggcaggccgagccgtgcggcatccttaccgaggcgactctcccccatgccttccgctgccccactgagcgcggagccccttctgcaggccttggccgccacgaacaccacggtgttggacgggttaagtgcccagatggaggtcctgcaggcagagcgggcggagctcgacgcggcgtgggcgcgtgtcgaagaggggcgacgctcggtggaggccatggtggagacgggccgcaaggcacaccgccggcacacctcagagctcgaggcccatcggagggagctggcggagatcgccagggaggtggaggaggagcgggagactgccctcatcgccaccgccgtgttcaacgcggcgcgagacgacttctacctccaatacgggagccgggcggcggagctagagaagaagctcgacgcgtcccggcagcgcgaagaggcccttgaggctcgcgccacggtgctggaggagcgcgcccgcgccctggacacgaaggagagggaactggcgggtcgcgaggccgccgtcgccatccaggaggcaacgctggcggcgcacgaggccgcctgcgccgaagaggagtccgcactccgcctccgcgaggacgagctcactgagcggaagcgagctctcgaggaggccgaggccgcgacgcagcggcgggaggagcaggcgcgcctgaatctggaaggcgcccgcgccgagagggccgcactggaccagcgggccgctgaattcgaggcgcgggcgaagg

SEQ ID NO: 8285 - DNA, 20143 bp, Oryza sativa
caagcactgatactatttttatcgtttgacttcaaactctgatagttcgattcctttattaaattcggaaggattgcagcaagcacattattgtacggtaaattgattgactaatactgtaggacttttagagtctgaggttatgaagaaaaaaacggatcgtcacatggctaggctatatatcttcactcattaaggtttactctaccttgtctatatatatgctcctctgactttcttgcgaatggtccatataaacctgtcctggtttgcatgatgactagggttttaacgtgttagctggtgatctgctttaatgcttttgttgatattttcagagcactgaagacgctatgattggctttactggtttttacaatgtggacttttttcttttcacattatcccaacagccttcctaggggttatgagaaacacaaaagaaagttgggcgacgaaccacgcaaaagctaaatggttgtttatatctcatgaaaggtagtttgcagttgtactggcatttaccacaaattatccaattcgcagcattaagccagccatcctctcggccccttcccctacagagaagtttaaaccaatttctctttgtttcccctacagagtgtgtctgatgtcaaattttaagatttgtcagcgcacaatgattatatatgcttatatcttctcatatactttgaagaataaaaattcacttaagccatgttgaccttttcatatgatccagaatgaacataaataatttcagttaaacctttaggcatctcatatactgttaatcccatggtttagaatatctctatttattattttccaagagcacagtcaccttttgggccatggactcatggaatttttaaaagataacttggatctttgagatcaataaacttcattgcatacatgtcaatacacactattgactatatatttaatcaaactgtcatgggctttgggccgggagtcctaggcccattagatagagttagggtttgttaggactagattaatgagtcatccatctatataaggaggagatcctatcctaggtcaattaggtattagatcaaaatttatcttagtgcccgtcggtctgccttctcagtgcgacggagagcgtcgcgccgttttggttcagaaccgttccttgttatttcatctactataatccaatctatccccattcttccctattcttctccacaaatccttgcacgtgacaacttggtatcagagctttggttctgtgcccatgggtcccgagatctctacggttcccaacatcagcgaaggccttgtcgagatctcgaagaagatgatggacttggcggcgcaactccgggccatggcggctcagtcagccaagccggcggctttcattgaggaggccgaaccattatactggcatgcggtggccttgcgttcgcgagggcgcgtcttcaagcagcacagatggcggcaatatttagcggtgacgctgcaaccacgcgggggcggcgtgactcgtggcgaggtgctcatgtttcctcttccggcggcgccaagtctgggagtggcaacgcaacctcgacctcgccgttgggactggcgatggcgccatcgccgttggcgccctcaacggcggcgatttccacttcaacggcgatacaacacggtacgggcgtttggttttcaggcgctattttccggcgatgcggctttgtttccgcaggtggaggcgcacgtaccagtgatggttggagcagagcttggcgacgtgcgtgcggcgcgattcgcaggcgcgacgggtgggtgtggcattcacgtgtcgcaatggcgcagatcgtgccggccccacgtgctggttcgcgaagttggcggatcgaccacggctgcgtcgctcctagcggtgtggtctcctgaaaggaaaggagatagggtttctgccctctcttagttgggctaggtggtttccacgttggcctatgatgcaaaggttgatctttctcatattttgagccaaggaattttggtctgagccttccgatttggatcatggaaggggcttttcctctccttaggaggctcaggttggggtcctcctgcgcatgaattgttttttatttttgtttttcataaaagccgagatgtaaaaggcttaagagttttagtttagggtatggtgttccgtttgagtctagccgggtgtgctgctgctcaaaaagagggaagtaatgtcacgggctttgggccgggagtcctaggcccattagatagagttagggtttgttaggactagattaatgaatcatccatctatataaggaggagatcctatccttagtcaattaggcattaggtcaagatttatcttagtgcccgtcggcctgccttctcagtgcgacggagagcgtcgcgccgttttggttcaggactgttccttgttatttcatctactataatccagtctatccccattcttcccgattcttctccacaaatccttgcgcgcgacacaaacagacagtgatgtcgatgccgagcaactcctggactccaagcctccaactctgtccagtccatacaggtgtatggcagcaaacagcaggtccagcttgaagagatgtggttattctgaattattcttagaaataagataggaatcatttcgctctaaaaaggccaacttgaacttgaagcgtgaacactggaaattgcagaccatgagtacacataacaaaaagtgaatttagctaaaaaagttaatatcacctatttttaggtcattgggcgggctggtggttatagtcaaaaacctggtgtaaatcttttcttctgctggttgttcggatcctaacttcatgttcttttgtggttaagtcaaattggccaatgtactgcttaagctttgcatctggtatggtttgatggcatttgatcgccaaatgcttcatgaattgcacactagaatttgacagaatttatgtatactgccacttttcaaatgcagtttgccatctggacccataaacgcagttgatgtactctgcttgcatatagatgttttaggaaaccaatacaattttggaatatgctaagcaataatcgactgatttgtatagaacatctgagttctgaaagagtaatgtggattagatgataaaagttggcatagtgtggaaccatgataggctgaactaaattattttttctatggaatataaatttttgtcatgccaatggttgtattaaggaaataacaaatgcactacttgtaaagatctttatatatcaaagtgtttgtgtatatagaatttataaagattttggtgggtttttattttcgagtcttttggcaatgggccatgaatttgtatatgacaatatttccaaattttacaagtttatatattatctagtgtatatatgttgtggaaatgtgcactgcacatgcttaggagggcgagcgtattgttgtagaataatgtgcaagcacgacgcctctttgcctcgcactttctggccgagtcaattatcatgcataactggatcgtaccaaaatcgcaacaagttatcgtacatacagcaatttcacgaaaagaatcctaccatgaggtagcagatgacatggtgtgatttatacttatgataatttaagtgatgatttcaaatgggtacatgcaaattttctcattgcaacgcgcgggcatccaactagttttacttaaaattattggcttggatggaacatatataacccgttggctatgtgtttgttaaaattctatacaacccgtttccgcaaattcaacccgttggccatatgtttgtttggatggaatatgtgtttgtttggcttggatggaatggccatgtatttgttaaaattcagatatatttttaatttattttccattggatatctccccttttctgcaaatgtgagcatttcaagagattattaaaactaggcaaattttgctacaggacactgctacttcgtggaattagctccaggacaccgcacgaaatgagttttgggggaagacactcccaaaacatagctatttgccagaggacaccgcacccatttgtttagtgtattcgtgctgactaggcttgagcgggcccacattttgacgggaccggaccaaattaccctgcacatctaaagtctaatttctgtccctcgggctacatcttcaacctccagctctcgtgcccgtacgccacaccaccgcctcccgctctaaattcggccgatcccgttgctcgttcaaacattgattgaggggatttcttccccttatccttctctttctttcccctcaaaaatcggagcaaatcccgttgaatattgcgtggattcgaagcggatttcatctcttatttttctggcactctaaccaatccgtgcaaatcccgctgaatatagcgtgaagcgtgcttctgcttctgctgccgctgctgcttactgccgcgattgccgctgccgctgctgccgctgccgatgctactgctgtgctgcttgctgccgctgctgttgctgccgccgctgccactgctgcttgctgccgctgctgctactgccgatgctactgctgtgctgcttgctgccgctgctgttgctgccgccgctgccgactgctgctgccgctgccgccgctgctactgctgcatgctgccgctgctgcttgctgtcggtgaggggaggggagagggagagggagagggagagggagagaagagagataaggagctgacatgtgggtccgaggatatttttgacatttcggctgcgttcttttcaggatagtcgttctcgttttccgttagcacgcttttcaaactactaaacggtgcatttttctgtaaaaagtttctatacgaaagttacttaaaaaaatcatattagtccatttttttaaaaaagaatagcagatacttaattaatcatatgctaatggatcgctccgttttccgtaatcactgttcctaagaagaaagaacgcagccttcatgtagtttctctctcctcttcaaccggaaattattattttaatgggtgcgttgtccgctggcaaataaccacgtttttgagagtgtttttccctaaaagtgactttgtgcggtgtcctggagttaaaaccacaaagtcacgatgtcctatagcaaaatatgccttaaaactatatacgcagaaatccctgattaaaataaacattattgtcattatatcttttttatgagcatttaatattatttttatcatttgtggttctgataaaataatttcagatgatggtgagccttctatcctaattggcgaaaattttaccatcatacacacatgtcatctcacaatatatcttcattactaaataatgccataacacatgcaacaatatgtatggtttcttctcgatcttaaggtggaacccactaattaagaaaaaaaaaactctattcacctatgatttcaaagatactatatatgttgcaaatgtataaaatacttttgtatttcttatggtataactttaagctcaaggttacccttaaaaatattatcttcatggctactctcccaatgatagaggtaaaacaaatatattactttattccttaagatcattttacatgcaacattgtggatgtggtaagtaataacaaatgattcagaataacacagcggctagcatagtaaataagtaaccttggattttgttccaacttcagccgttcagcttcattgttttgaagaactcctccaatgcctgatttgccgacgagccatgtccaccctcccgtgcagcttccatgatctccttgatcgctctcgcccgctgccgcatctcggccgccttcgctgttggagacatcaccgtctccaccacggcaaccagcgtcgctttgtccacaataatggcactcatgtccatgtccccccgtgccccctccacgcggaggcacaccccccactcctcgtcgagcatcttggcgttgtagtactgatcgccggcgagcggccacccgatgatcggcacgccgtgcgtcatgctctccagcaccgagttccacccgcagtggctcaggaacgctcctgtggagtgatgcgccaggatccccacctgcggcgcccatccatggaggaggaggcctttcttggtcgccgtcaccctctcctcgaatccgtcgggaagccacttcggctggatctcgccgtttatgttgtgcccgtccggcggcttcacggcccagacgaacggccggccggtggcctccagtgcggcggccagctccgccatgtgctctgcttggatggagaactgtgacccgaacgatacgtagagcaccgacgacggagggtgggagtcgagaaaactggtgatggcgccggcggtggcgtccgtctccggcgaggttgttttggtggaggcgcgcacgagtgggccgattggaattaccgggagcctgaaggttcgccggagcatggcgagcccggtgggctcgaactcctccacggtgttgatgagcagcgcgtccgtcttgtaccccagctgtatctgccgcccgaagaacgcctcgacgcggtgcttcacggccgtgggcgggtggagcacgttgctggacacctgcgacctgtggatgaccacgtcggggtactccggtaggaggatccggccggcctcgtcggggcgaatggggaggtggctccagagcgagtgcacgacggcgctgccgaacgcgccgcacgacacgaagaaggcgtgggcgcacccgcggcgccgcgcgacggtcaccgtccacgccaagaacgggtcggagacgacgcagacagcgacgtcgccggcggcggtggcgccggcgacgaagtcgtcgaaggccggctggagcacctccaaggcctcgaggaagtccgggaagcgattgtgggggacgccgtcggaggactcccagcccgccgggaggccatggtcggccggcacgaacggcagctcgtgtaatagaaaggagtcatgtcctgccgacgtggctcgccgcaggctggccacgttgcgtggcgtcgagacgagggtgatggcgacgtctgggagggcgcggtggaggacgccggcgaaggacaagaaggcggcgaggtgcccatggccagggaaggggaacagcacgacgacgttcttgctagttgctgccgtcattactgctactactcactccaacaagtctccatgtgacaacacgtacgtctcagggttgctggtggcagacatcactccgtgtttcttactccctcgtttaaaaaaaaaaaaaaaagcaaatcctagggttgcgtgtccaactttgactgtccgtcttatataaaaattttttataattcgtattttcattactgttagatgataaaacatgattaatattttatgcgtaacttgtctttttaatttttttcataattttttcaaataagacgaacggccaaacattgaacacgaaaattagggtttatctttttttttaggacgaatggagtatatttctattttgttaaataatagcgtcatttctcagcggtagttggcgacttaaatgttactaggcacaggacctaacgcgtgtggttcacccttctgaattatttctgatcgccatcggataattacacactagtacaaggtttgttgggagggtgtttgatttttcaacttaaaaatttgacatctattatcttctattatatcataaataatactaaagttcataaaacttcctacaaatactcataaacaaccatgtggaagtcctacaaatactcctaaaccaccgtgtgtcaccttaacaaatagttagacccaccattttaattaccattagaattgttttttttcacctccctctcctatcacccatcagcccacgtcagggcatccccaccagcccatatgcacgcacgtgcaaacttacgtaaggaaaaactacgcactatttgtgctaaagaaaaacaaaaaaagactatttgtttgaaaaaaataaaaaaagaacatatatgtatgcacgttttcacctacggtaaagaaagcaaccaatcctacacctttattttattttctctagttgttccatgttaaaattttataaagcatatgatgtattttatctataaaaatgtcacatccatatcaactatattttaattaattaaaagaagttgtcacgtgaaactattgtcttaatgattacttcgtttgtgtttcaataaccgggaactaaatgagctccttagccgtcaattaacacactaataaattagagaaaataacagaaattacgaagaaaaaacaaaaaaaacattgatttcaacttaaatatggtagaccaattattttctaccattaatttatcttagcaatataaaaaaaagaaaatacccacctcccaccccttcacgtcatgtatgtatgaatgtgcacgtacgtacttatgtatctctctctctccccccttactttctctcctttattaacaacatcttaactaatataaatattcggatttttcctttagtcaccaattttttcgtccgtgcgtaatttttttcgcccgtacatgcttttttcacggatccgattttgttcggtttttcacttttctctagcgccagcccagtaggccaggccagaagtccaagccacaagcccataaagctacaagtccaggtgcgcccacaagtccaggtgttccacaaacccacaagtccaggtccaagccacaagcccatagagccacaagtccaggtgcacctccacaagtccaggtgttccacaaacccacaagtccaggtccaagccacaagcccatagagccacaagtccaggtgttccacaaacccacaagtccaggtccaagccacaagcccatagagccacaagtccaggtgcaccacaagcccacaagcccaggtgcacccccactcctactccggtttgccccaactgcgaccaggagtcctgctcttgctattccgttttccttttcttctttcttccactatttttagcgctcacccgatcacgattttacagatttctcaggcaagacatacatatagaaataatagaagcacacaaaaaaaatacaaatcacaaggtttttcctctagggtgccaagccacctccaatcaatgtcgattccaggttatcattgtactcaacctgaatgcaattacaatttcattagatttatataactcaaaaaattctactccatgcatgcttgcctacttttttaatgttatcactaagtcataacatgcattggctcataataacttgctgatgcactcactgttcatggtacgttatactgtctttaattatgcatgtgatgtatctaccaaaatagtacattcgctcatgcaaaagcaagccgagtttaaaccaacaaagaaaatatttctttaccaatgtaagaatgcaagatcaatttcatctgagaaggccaaaaaactagacaattaatgcactatggtgatgggaaaaaaaatcaagaaatttgtttgtaacagctctaatttcctaagtcatataaatcatttagataccccatttaaactatctgaatattcagaacatttattttgaaggcagacacaaacgatagtaaaataaggcaaaagagaatgttatctctaaagaggtaccttagaattgtctattctatctatatataaacatctggaggtaaaaatcactaagaaggatggaagaacaacagacctgtatgtgcgacagcaatatttgctcacttcaattcaatagcacacataaaaaaacgcaactcacttagcaaatatgaagccttccctcaggatactgtgtggtataaaattaattagatgaacaggtactatcatcaaaaggaataagttcatattatcactgcatgtaccaataaaagaatcaattcaaaattaaatatgtttttgtaagccgcataacaaaataaaccttatctaaatcatgtttgctctaccttctcagattgcctatcctgattgcagaacttatgattgcattgtgcatgataaaccgatcgaacagtgagcataccagatttagtatgttgccatgctacaacatcctgagttcctcgctaccaggagtaagtgctatttgtatgattcgattagcatcaacggaccaaaaaatgctacagaccagctcttcagccgactgaccaactaaaggattaaacaaatcacttacttttgacaagagagtactttcaggttgtgactagagggaattctcagatgttgtcttaaaaaaaaagaatacctgggcggcagtggctggggttgacggcgaatcaaggatgtccgtcgctggcagatggagcgatggaggtagcgtccacccatcgtcgtcgtcaccgtaggggaggctaccggatccacccctcccgtcgtcgccggcgcgacgggatccgtgcgagaggggaagaggtcgccggatcagcccctcctattgccgccgacggcggatctgcgcgagagaagggtggagagacggtggaatccaggcgccgacggcggatccgcgcgaggggggcggagagacgaagggatccgtgcggactcgagctccaaggggccagcggagcagcagaggggcggcgctgccccaatacgctcatcaccgaactgcagcagtaagggaaagagcctggagcagtggtggatatggccggcgatagagagagacggagaaagacgaggagagagcgagagaaatgatggaagcactccgaccggctacagatatttgctctcggtaatgaactacgagctttcgttttttttaaaaaaaaaaagaaaagaaaactacaacggtcaagttcctagatagtgctaatccacggaattgatttccactaaaaaatgtttagatatacgtacaaacttaaacttcagtatcacagacgagtggtattttcttttattattgatttttatcattgacataaaacacacaggaaacttccactttaatatttgtttgacgtaaaaaaatgtcgattgtaaaaaaataaaaaaaaattcgtgagacacgacatattaagattatgcgcgctatcgatcatccaaatgtcacacggtcgatctccacccgagtccacatatgattttgggaactggatcacacgcaagagcaagtttaatagtatagccaactactaactctaattcatctatagccaatctaatagcttattcatacaatagttacatactacactattaatacctgaatacctgatcctacctgttatactcacactgtttcccgtgctacagctgtctataaatctgtagcccgctgctattctttctctatttaacttcttaaaatatgtttgcaaccgacttatagcctactattgtacatgctctaataacataataattgacagtaagaaagcataattgacagagtaagaaagcacgcatgaccattataaaagtattattttatccgtcctgattattattggtctaaaacttacctatttaatcaaacaaacttccgtcctctttttgcgtgaaagtgatcggaacattcactgtttattcctcccgtggtacaatcattatgttaacgcattacattcttcgaaccatacacgtgtacagtgcaataattattcaaaataaaaatacctctgcgattattatacaagtcacccatgcttatcgccacattggagtgctccaaacaatagttgagttaaactttatccaacataccacgacccggtgcaacgcacggacatattactagtatataaaaaaaatcaataattagataccttgaagatcgtaatttccactaaacttccaacaaacatttataatccattacgtggcaccctataaacactctcgagtcgtcacgtgacaccctataaacagaaaaatttggtcatcgattttcatttaaattagtgagccttttattttagatcattagatctatcttaaaaaaaatatcgctctgtccacacctctgtacggcgttctcacgcatgtacctaacataccctccctccgttcctttcttttcttatttccataataattaaaattatttttttagcctaaaaaatccatagatagacatcaacctactagatgtagcaagctctatctctatcctctatttttagtacgttaaacatcgtacaaatatttctaaataactgcatggccctcttaaattagagaaaataaaacattcgaccatcggtttctatttaaatcgattttatattgttagatctatcttttttaaaaagaaaaatcatccgaacctcactccacgcccctatgtgacgtcttgacaaagaatgatcaaatgtaccaagatcgcaccaacatatgacaaattattttgttaattacagaaaaaaattaaatgtgacaacgttatatctacagtatgtacattgtacattattattgtaaattcaatagaggggaggcaatatagttacacaaacacgcaactttatataaaagtccattaaactttctacaaacacttataatccatcacatggcatcctacatacactcataagccatcatatgatgctataataaattacaaaaatcatgtaaattatgataaagattttcacttaaattgatgatccgttatttgaggctattggatttatatttcatcaaaagagaacaacctgggcttcaaccgttagattagtttgatctaattaaccatagcctcatgcagtcaagcccacgtcacctcccccatgaatgcgatgcacggtggaaaaaaaattctacaacacctctcgcggttgtaggagattgtcatcaccatggcaagtttctctgatgagctacaactttatattgtaaataacacaactcaagtttatgaagatggatctgtccccatttatattgtactgtgctaaattgttcgtcgcttagaacaaagcaacaattgatatatactagagcatactcataaaacatgccacataagcaacaaaagtcatattaagcataccaagaggcaaaggtcaacgataaatcaacgaattcagtaaattcctaccctttaaagtagctgcatgggtttctccacaacctccatgggaatacaaaatcagtaaccttttttacagtaatatgattaaaagtcatatttttcctaataaattattattttaagatagggtctcacatattacaaagaaattctatataagatatgtatatttgatcaattaaaaagagagctagcatgatgtaaaaaaataaatttacgatcaattcaaatttttggagactttttaaataaaaagtaaacaatgaaaattcaattaaaacgaaagagaccttactttaatttaaccttattttgttagaactatttatgaaacaaaataatatacatacccgcgctaatgcgcgggctaccttcctagttttttaaataatgcgaacaagaaaattgaaattgatggaagctcttttcccaaaatttcttatatattggtccattattgtactatcgtcccatgtgggataaaagcaggcttaataatgtagctcgtcacggacggtaaaaataatcacgttagagcaaggtcaatggtatagctagtagtagctagtaatacccattgccatgtcattttgcagttaattgtaaggccagctagcccaatatgctagctatttgctcgctgcaccttattaataaaataattaattttgcatggacattttaacaactacaatcaaaagtgcactcagttgtggtttcatcaatcaataatgaaaaaaaaacttattatcgatttcccgatcatattggtttggaaaaaaaataaatatatacataggtggaccacattgcttaaggcccgccacaggcgaagatcattttcgctggcagcattcatcaaaggagcttctagtgaagagatatttcattggcgtttgccttatgaaatccgctagcggaaatggagtaaagctggtggttggcaaccacgtggaaaatacttcatcttcactagcctttggtctccagctgttagcccctgcgaaaacccattttggtcgtgatgagcacctggcagcaaagtaccctgaattttccctctcaatcacggtaccaacgataatcgataaattaattagctgatctcagaactgagtaactcaatagatatctaccagactgacttaattattgtattccaaaccctagataaatgatacttctaccggtgcttaagcaaacacgatcagaaaggagagaaacttatagaaccgagtagcaccaccaacagaaaacctcccacagcagttgctcttctaccaaccaaaccggtgacaagatctttcaatgaaagaaagatgggcgccatcttttgttcgctcggggagaaaccctcggcgaaaccaaacaaaccaatctaatccctctgctaattaatcgtgatcgaccaattaaaagatacgtaggctttcaggtcaggctctgaggctcgcagacctaccacagatggacaccgacgacgctagctagtccaaattggacccaagactcaggaactatcagaatacatgcataaaaaaaactgactcaacctgaccgctacatgcaagagaaataatataataatccggctgcagtgctaatgaccttggtaattaggctaatcaaacccgcaattgatatctcgggcagacgcgccacaagccaactgcacatgcatgcatgcaccttggtcttcatctgtgcagatgcattacacacacatgcatacactggtggagaaaccctctgtagtcccggttcgtaacccccctttaatcccggtttccaaaccgggagtactaatccgggactaaagatcgctatcattagtcccgggtgaaataaccgggagtaaagatcgatctttagtcccggttggtgttaccaaccgggactaaagatcgagctgaccttttttttttgcatggccctgttgctgcatggtttatatatatatatatataaaccatgcatatatatgtttcaatacatatatatgcatacatatatatatgtatatatatatatattatattatattatattatatgtatatacatgcataatatatatgtatttatacatatatatgttatgcaaatgcatatgtatatagatatatatatgaccaaaatatatttacattatagaaaatgtgtacacatgcatatagaaacatatgtagtcatgtattaattacaatccattatatatcctagctagctacgatttcgacgtagtagtactcgctgctagctcagaagctaaggaccggtgaattgtgtttccgtcgtagtagaattcacccttgggatcaaggatttcttcgttgatgaatcccatgagttgttcttgaaccgccgcgataaattccttgtgtgtggtcaggttatccctcatgcgaataaactatatgaatgtatgaaattgattagtaattaaacaagaaatcgctacgtaatgaaaatttgaatttatttgtacgtacatcgagctctcttgtggtgatgatttggtctgcaaggcagtggcaatactcgcacacgtaatagccgcacaagttagttccctgcttttgctttgcgcactacaaataaatgacaaacaacgagagatctaattaatatacacttgtatgtatttgaatcggagaaatataaatgtagagcatgtgtactcaaaggaaatttgaacttccgcctaagtctttctctccatttgccgcggaccaaatgacggaaccgataccaagccctacatggagtttaaagctatgattcgtagtagcaattaacataacaagattttcttaattaacaaaggaacttatgacggtacctgtctataagttcgaaaaccttgtcaaacgtagactcttttttatccattgagtcatatacgttgacggtgcaggcctccaggtcgaagagtaaaagcacccagtggaatctgcaatgtgcgtgggatgcattacatatgagacacttagcaagttcgtacgggaatgaaatttggtatgtaggaagacagtaaaattaaactaactctgtgttgtatggcaacagtatgaacgtcttgtaatgctgcgccttcaggagatggacgagattgtcctctgtttcttgtggatattggtcgagcattgcgacgtttactttccgagggtcgatgaatccagtatcgaaaaccctccgccgtcgggccctttgaatctccattctacaacgataaaagggagtatattattttctatagtctacttatatacaaggacctaattaattaaaggagacgtatagtaagaaatctaactgaacgatatacttacaaaatccagcaactcataatagagacgtcgagggcgtccagctggtatagttcgtagattcccctgaaattgatccagagaatgtcatctccttgcaagaagttcgtgtccctgatcctcgctccgatcatctctctaccggtggcgctcatctccatgtacagctgatggaacttgtacatttgtgtgggtagggactgcagcagctcaggcttgacaagcggtttaccgagttcgtacatgtatttcacttccgccttttcgattggtgcgactcctagcaattgatccgtagttagaccggtgtcagtaataaattgttctatcgtcatttctttaccggtcaccaatggctcgatctcctggtttggttgctctccaagctgagggactggtttggactttccagaagatgctcctcttgacagatgcagacatacccctaaagaagttcctgacactggggtctataggaatcttcttttctggacttcgaggcttgaattgtctcttgacttctgatgcaacgtaagcgtcaagctcctcttgcgtgcaatcgtaccccgggtccttgttcttggcggcgtcaactttcaccttcttcgttgcccttgtgtgggcaggcagtggagctggggggggccttgactttgaaggtgccggaagaggagcttgcgggggagtaggtgtaggagcacgacgaggagtcggtgcaggatcctgaggaggagtcgatgctggagcctgaggtggagacggtgctggcggagcatgaggaggagacggtgcaggatcctgaggaggagatggcggagccggaggagatggtgcacgagacgccgcttgtcgcccagggaggatgatgtaccacctgcgccatagaataatggcatggcatgtgtctcgtagatgcgtctcaccgtctcctccagggtaatccagctcgaggtcctcgtacgcgccttcgaccaactcaacttcgaccttcgagtatcctgctggaatcggcctgcagtggtaagtacctgaagggtccgttgggatggccatgcccgacgccaccttcatgttgtgagagattatttattagtaatcaacatatataagcagcaactagcggaatggctaaatcttacctttattgataagttcttgaaaggaatatgcagctcacatggtgtccgctgagtgatgtcatcaacgggacaggtcgattcgtcctgtgtttgcatggcgtccatgctctgtgatcctacctgccccgttgaggcgcagctgctacggtttcctgacgggctcaccattgcaggaggaatggtcggctggggatcatgggaccgatgtgtggccatgcgttcatcaaccttccttgccacctcctcttgcatgttgagttcgtagctcgatacccggaactctaggtctgcaatcttcgcctcgatatctctcttgcttctcatccgactcctgtacgtgtggatgtcctccttgaaaccaatcttccaaggaatcacccctttccctcgtgttcatcctggatgctctggagtctgcagggcgagtgtcagctcgtccctatctctgtctggtcggaacgtgccctgagaggaggcttccactgcatctgttagtcgtcgcgcagcctctcgtatctgatcaccgaagaccagtgagccatcagctgggttgagcgttccaccgtgagcatagtaccagaacttcgatcgttccggccaattggctgttgccggttcgatacccctctcaatcaagctagcctccatctgctcccacttcggcatcgcgacgctatagccttctgaccccaagtggtgatggtacttcttcttggcggcattttctttgtttctttccatcatcgcctgcccttgttcacctgtcttatatgcaacgaactcgtcccagtgatcccttagctttgggaatgtgtcgaagttcggtgtctgccccttcagtatatacttctggtacagatctcccttgaagctctgaaactgttctgccattttcttcagagtccaccttttcactttgtcctctgtacccgcaggaagggtgaatgtctcgagcattgtggtccacagcatctctttctccgaatctgggacaaagctctcatgatctccgcgtgcccttgttcttcgccagtacaccgtactgacaggcacgttatcccgcacaacccaactgctgtgacgtacatagttcttggcggcttcggccggggcactaggacgtccatcttcttccacttccgttatgatgtgccgaccctcaagcttcttcgctgcacctcgttgcccgcgtgccctcttccgtccaacggagggttgactaccactagcctcctcctcctggttcccctccacatccctttccacgtgcccctgctggttcccctccgcatccctctccacgttcccttcctcgttcaagtactggtttggatcctcgttcccctcttcttcattccagtactggctgcttccctccgcgattgtatcgtacaatatctgttcctcatcgcggtcagccatctgttgatacaagaaacatctgctaagtcacgagacatttatgttttaacaatctaagtcatgtatgctaagtgtaaatgtcgtacattagaaccctacacaaccttacgtgctaagtctaattacaaatcgtgatataagctaagtctaggtgacgtatattatacaaccctagctagtaaataattatatactaagtctaattacaaataaaataatcttatattaaaactcaaataatattacatgctaagactaaaatagtcatgtatatgctaagtgtttcgtgcgtatatgctaagtctaattaagactacaatagtcaattgctacttgtcgcaccaattccgtagtcaataattacatactaagtctaattacaaataaagtaatcttatattaaaactcaaataatattacatgctaagactaaaatagtcatgtatgctaagtgtttcgtgcgtatatgctaagtctaattaagactacaatagtcaattgctaggagtcgcaccaattccgtagtcaataatgtcatactaagtctaatttgcaataaaataatcttatattaaaactcaaataatattagaacactacacaatcttatatgataagtctaattacaggtctaataatcttaattaattgcattacaaatataacaatcatttatattattacgtcacttgcctgctccaattccttctagggctagctcttccactcaggcttgacggacgactccgacaacacgtcttttctgcaagatacaaaaagatgtattaggataaatgcgaagtaatatatatatatatatatatatatatatatatatatatatatatatatatatatatatatatattgcatttcacgttaacgttcgtcctcgttcgttcgctcgttctcattcacgttcgttcgcttgttctcattcacgttcgttccctcgttctcgcttgtcttcgttcgatcattctcgttctcgctctcgttcgttcgatcgttctcgttctcgttctcgttccgttctcgcggcaacgtacgttgacgtgttcgttctcgctctcgttcgttcgatcgttctcgttctcgttcacgttctcgcggcaacgta

SEQ ID NO: 8286 - DNA, 4919 bp, Oryza sativa
ccaaccgggactaaagtcccacccctatatatatatgtcttcttcctcctccagctgcccgagcaagcttcaaaatttcttcaaaaaagaggggaggtcatgccaaaatttctattgaatttattttggtgattacatacaaatcggaggtgcctaaaaggtttgcaacttcatcctccaatgtttttttttgtcatactacattttcacctatgttttgcacactttttttgtctccaaaatttagttgtaagttgatgagagagaaaatgtgtgtggggaagaaagaatatatagaaatttagttcatttgctaaacaaggttttataaaatagttgagaaggaaaactctagtgaaagttaatcttaaataatagaaaacaaactaaaatgaaaattaaaagaagtaaaacacattaaaattagtttaaaactttacaaatagtttttaagaattatttggtgtaatattttatgatttttgtatgaataaagatatcttataattattgtatgactgtcattattgtaagaataattatttgtgtacggtttttttgactcatgtagatggatcggcaatggatgtacgctgaccggcggtccaaagagtttattgacggcgtgcactattttttgagagtggccgaagctaacaggcaaaggggttttatttattgtccatgcaataagtgtaagaatcagaaggagtattctgcatccaggactattcatttccacttgtttgagtcggggttcatgccaagctataattgttggacatcccacggagagcaaggtgttgaaatggaagaagatgaagtggaagacgacaatattccggactttgctcaatatgttggatttgaaggaaatcaaacgggcgaggaggaaatagctgctgatggtaacgacgttgcggatgatcttggtcagatgttgcaggacgccagggaggactgcgaaagtgaaaaggaggcccataaattggacaagatgttggaggaccacagaacttcgttgtacccaggttgcgagtaggggcacaaaaagttggataccactctggagttgttgcaatggaaggcaaaaaatggggttagtgacaaggcatttggcgatttattgaaactcgtcaagaacattcttccggggggaaacaaattgcccgagacaacgtacgaggctaagaagatagtctgcccgttaggactggaagttcataagattcacgcatgtccgaacgattgtatcctatatcgcggtgaggagtatgagaacctagaagcatgccctgtttgcaaagcactacgatacaagattagacgggacgatccaggagaagttgacgggcagctaacaaagaagagaattcctgctaaggtgatgtggtatttccctataataccacggctaaggcgtttgttcaggaacaaggggaatgctagaatgttgcgatggcacgctgaagagcgtcaacaggacgggatgctgagacaccccgccgatggttcgcagtggcgaaacatcgatagaaaatttaaagaatttggaaaggacgcacgaaacatacggtttggtttgagtacggatggcatgaatccttttggagagatgagcagcggccatagcacttggcccgttacgatgtgtatctacaacctccccccctggctatgcatgaagaggaagtacataatgatgccgattattattcaaggccccaagcaacctggtaacgacatcgacgtgtacctaagaccactggtcgaagatcttaaacagttgtggaagaaggaaggtgtccccgtgtgggacgaggacaaacaggaggagtttaacctacgagcggggatgctctagagtcgaccgataggcatgcaagtagcagtctatccggacagtccaacaagggatacaaggcttgcactcactgtatggatgaaacagaaagtacgtatcttaagcactgtaggaaggttgtatacatgggtcatcgtcgattccttgcagcaaaccacccggtacggaagaaaggcaagcacttcgaacataaggccgaccaccgtacgaagcctaaacatcgcagcgggaaaacagtgtttgctatggttaaagatcttaaagtagtgttcgaaaaggggcctagaagccagcatatagagagcgaagatggtcacgcggcgatgtggaaaaagaactctatattttgggagttaccatattgggaattcttggacgtacgccacgcaatcgacgtgatgcacctcactaagaacctttgcgtaaaccttcttggcttcctaggtgtatacggaaagtcgaaagatacactggaagcacgtaatgatctgaagcatatggaacaacgcggcgaccttcacccggaaccaaaggagaaaggaagccattacttgagtccagccagctacactcttagcaaggcagagaaggaaagtatgtttgaatgcttggagagcataaaggtaccgtctggatactccacgaatatcaagcgaataataagcacgaaggagaagaagttcacaaacctaaagtctcatgactgtcacgtgttgatgacacaactgctaccagttgtaataaggggtatccttccagacaatgtccgggcaacaataacaaagctatgtgcattcatgaacgcaatttcgcagaaggtcatcgatccggatagattagaagcccttcagaatgaagtggtgcaatgtctcgtcagttttaagttgatatttccaccttcatttttcaatataatgacgcatctgctttgtcaccttgtgaaagagatccgtattctcgggcctatgtacctacacaacatgtttcctttcgagaggtacatgggcgttctgaagaagtatgttcgtaaccgtgctcgtctagaggcaagcatcgccaagggttatggaatagaggaggtcatcgaattttgcgtagaatttatcgaagaccttcgcccaatcggggtacctgaatcacgccatgaagggagactacggggaaagggaactctcggaaggaaagcaataacgacggtagacaacaatttattccgtaaagcccatttcactgttctgcaacactcttcattggtagctccttacatcgaggagcacttggctctagttcgcgccaggaacatcggtaagtccgatgcatggattacacggcatcacattgatactttccccgcgtggctacgacaacatctcatgggtaacgagtcgatcaaccaacaacttgccttcctggcgaggggaccgtctgggtcgatcgcgacattccagggatatgagatcaatgggtacacattctacacgagggcccaagacatgaagagcacgaaccaaaacagcgctgttcgtgtcgatgccatgggacacgatggaacaactgccacgtattacggtgccatcgaggacatatgggaacttgactatggtcctctcaaggttcctctgttccggtgccaatgggttaggttgactggtggaggcgtaatgattgatgacagtgggatgacaactgttgaccttaacaaggttggatactcggacgaaccttttgtccttgccaatgatgtaacgcaagtctttttcgtgaaggacatgtctagcaaaggaaagaagggcagagggcctgatgagcctaagcgtcaagtggttctcccaggcaaaagaaaaatcgtcggagttgaggacaagactgacgaggattacgatcagttggatgggcaaccccctttcacggtgacgattgaccctagcatcctcctatcaaatgaagacaccccttactcacgcagcgatcacaaggagggaacaatagtgaggagaaagtacgtgccgtaattattgtgtacacgatgtaaactattttggatgtattgattatccatataaatcaattgatgtatggcatatgttaattacgcacgattattagaggtttcaacaagtttaaatcatgtatatggtagttatatgtgatacttacaatttttaaaagttttaaatcacacaggtggcaatttcatatgtatgttaattagagtttttaacatttaatttactagcattcatatgctaattataattgactagaggatttttaaaagttttaaatcacgcaagtggcaatttcatatgttaattagagtttttaacatttaatttactatcattcatatgctaattataattgactggagaatttttaaaagtattaaatttaatatatttttaaaactatcattcatatattagagtttttcacaatttaatttactatcttttatatgctacttatatatgactattcgaatttttaaaaggtttaaatcatgcatgtggcatttacatatgttaattagagtttttagcatttaatttaatataattcctacgctaagtacatatgatgattacaatttttattaattttaaatcatgcagtatgtacatacatatcttaattagagtttttaccaatataataatatcattcatatatatgctaagtatatatgattattggaatttttattaattatatttgcttattacgatttatccacttaatttattacagacaaaaataatttttcgaagtaattgtcattaatctttgtactttaaataatgttaatgcattaacttctattttataaacacatatgtaagcgaaaatcatatgcagtgctataatctttagtcccggttcttaaccctaaccgggtttaaaaagaattttgaaatagcgggaaaagatatttactcccggttgttgagaacaacctggagtaaagatccgggggtatatatattcccggtgcgccctcgtcttcttcaccaacacttagacattttcggccgatcgatctctctcggcctct

SEQ ID NO: 8287 - DNA, 3225 bp, Oryza sativa
ccactgtaaactgtttttgttttctttggctgaatcaggttctatccggctctacgttgcactttgaaagcagaggaagcatcatgagacttcttccaaaagctcgtaattaaagcatcaataatgctacagctaccaggcatcacaataaagctacagctaccaggcaggagtactacttgccatgtgtctttctgtcagcaatttattctatcgaagggaagaaaatctggtagggcgaaagtccatccggtaggattggagccatggtttcgcttaggccgaggttagttctaaactttttctttaaacttttaactttttcatcacatcaaaacttttctacacacataaacttcgaactttttcgtcacaacgttccaatttcaatcaaattttcaattttggcgtgaactaaacacacccttaataagcgaaacggcatatttacaaacgaaaaataagttataaacaaaatttgtatatacgtgttctttgcaatctaaaagcaaagattgaaaaataaacttcgatgaaaaaaatcttaaaatcagctctaaatttaaaattgaaaattcaaattttagttaataatcataaacataagagatgagtccgtctcagtcataatctcgtgcaggacacgtgcctcagtcataatctcaaaggctcgaagcatcccctcaaaaatcgtattaattactaatgtcattagcaacaaaagtgacttcgacgtggacttgttcttccagcgcatatggactttctcccagcggggcgctagtcgcggcaccagcggcaattacgtgaggacattgttgttcgagtacagcagagtgccggcgataccgtgtgggacggcggtggcggaacattttcgacagcaacaaagcgccgcgcttggctcgtgttcggcgcgggaggtcaccgcccgccatgccgcgcttccctttccaggccgtgtcgccgccacacgccacggcaagcgaaggattctaaatagacatgtatcactatatacgtggcaacgtccttcaataagcaaagagacttcctactaccaaaatttcttcccttgcgaagcgtggctgatacgcgtacgagtctataccatttttcaatggtatagctcttgtgtattaaccttcttgaaaaattagctttttcaatacaaaacccaaatgcgtgtgtactcaagaacacataataggttatttcaggcaccacgtttcaaggttgggcaaattgctacttcctccgtttcacaatgtaagtcattgtagcatttctcacattcataatgatgtaaatgaatctacatatatatatatatatatatatatatatatatatatatatatatatatatatatatatatatatattcattaacattcatatgaatgtggaaaatattagaatgacttacacagtaaaacggaggaaataaaacagaaaattatttctctcggcgtcagcctttcttgagcataatgcgaccatgcagcttcaagaattcctccaatgctgtcttggacgaaccaccgtcctccagagttcgactaatcatcccctgaatctccttcacactctgccgtatcttgtccgcctacgccgtaatccccatcgccatatccacgacctcgaccaccctctcacgctccagcgccggggagtccggccagctcccgcgggacacctccacgcacgcgccccactcctccagcatctgggcgttgaagaactggtccgccgtgagcggccacgcgatgattggcacgccgtgcgccatgctctccagcacagagttccagccgcagtggctcaggaacgccggtggacgcgtgcgcgaggatgctcacctgcggagccaacccgtggatgagaagcccaatgttcttggcatgcatcctctcctcgaacccttccggcaaccactcggcgctgaactggccaccgttggtgggctcgatgtcaaacccgaacggcggacagatagcccaaatgaacggccggccggtgagctccagtgccacggcgaggtcaaccatctggtcaagccttagcgagttataagacccgaatgagatgtacagcactgacctctcttcttgggtatcgagccacctcttgacgtaatcgtcgttatggtcaccggtgtgatcggagtgctccgtccggcgacgcactagagggccgatgggatagaccgggacgcccatcgttctccggagcatgcgcagcccggtcgtctccaactcctccatcatgctgatgagaatcgcgtcggtgtcgtacccggctgatgtctgccggcggtggtgggccgaccaccggtccgtgccgtcggcgtggagtaggtacggcggaagcttcgaccggtggacagtaacctccgggtggtccgggaggcagaacgcatcgtcaccgggcgcacgcaggtgcggcaggtggttccacagcgagtggtacaccacgctgccgaacgcgccgcaggacacgaagatggcgtgcgcgacgccacgccggcgggcgatgtcggtcgtccacgcgaggaaggggtcggcgatgacgcagaccctggcagcgtctgctccggcgtcggcgatcaagtcacggacgaagccgtcgaagctgtcctgtagcgagcgcgactcggtggcctcgaacagcgtgatgaagtggaggggcggcacggcatcggtcgactcggcgtctccgggcaggccgtgctcagcaggcacgaacggcagggcgtggaaccggaggtaccgcgtctgggagctggaccggcggcggaggccttccacgttgcgcggggtggagacgatggagatgtcggccgtgggctgggcgtcgtggaggtgggcagcgagggagaggaaggcggagaagtggccctgcgccgggaacgggaagaggacgatgcggaggttgccatcgctgggcatggtgaacacgttgttctttgacttcgaggttctccactggaaggaaattaattttttgctttgtctgaaaggagaggaagcacgagggcacctgtcggtgtgtgtgtgtggcaatggctctgggtggacaggatgaacgagagggtggggagtagagatggcaatggcccccgttcacgcttccccgcggtgaattcacctattaggtgatggggatggttaatatatattcaccatggagaataaaatggttgtaaacctctcaccatcaggg

SEQ ID NO: 8288 - DNA, 11857 bp, Oryza sativa
ggtgacccgactttactgtgtaggaggactaattttagactttttagttgttttggcccataatattgaagtccatttaacaagcatatataaaatctaaccctaagtcaaccggtcaaacaccaaatcctccacccaaaatcccaaatcctccaaatccgcactgccgcacggcgcgcacgcccgtgccagccaccaccgccatccgcctgtccgccgggagccaggcgcgccgccgtgcactgccagttcgccagccactaggcacgccgccgctcgctgtctttctctcgcgtcgtcgtgctgccgggagcccccatcaactgaagccgccgtcgccgggagcctgcttcgatgcgccgtcggaagacgccatcgccgggagccgccgtcaacgtgccatcgggcgtggtgactgcagccgtcgtcactgggagccgccgggagtcaccgtcgccgcaccgctgggagccgccatcgacgtccgccagcgccctccgacgtcactcgttgtgagaatgattcttcctgtgattttcatctataatttgttgatttgttgagtggagcattttggatatatattgatataatgtgattgtgaatatgttgtttaaccggggacgggctaaccacggggataaattcaccacatggtgatcggggctggagaaattatagccccgtcgtggttgacggggacggggacggtgaaaatttttcaccgcagtgacggggacgcggtggtgattcccgacggtgaattcatcattgccatatctagtggggagtgaggctgggaaggatgcgcttggcagactagctttgggatgaacgacgagctcgaggcgtggggcagttggtaaggcttccgagcagggaagcaagggcgtggacgaaagtcggtaaggcttccggtcctgcgattaatggtgtcgtgggctttgtccatgccgtgaggtgggacggtggggccgttggatttgatggccggggtacgacgcagcgagattccgagcagaaaaagggcccttgccctgtttgcgccacagggctgatgcgaatgcgagtgatgaggtgcgacgtggtgctttgcgtgcggctgcggcgcacggcaggctccggcttggagggcggtcggtggtcaagagcgggaccggaagcgacgtgacgggacggagtcgtttgcccggcgtgctgtggcggcgagtgcgcaggagcggcacactggactagagctggtgcggcgctgcatcatatgctcgcggtcgcgggcgtgcgtcggcgcgagacattggaggcgacttcgctggactagagcaggcacggcttggacgccaaagttgtcgccacggggctcgcgtgacaagcggcgcggctttgctgaacatgtgagcgtacagcgcagcgtgatggctagctgcttcgggcgaccacggtcgacacggcgcacggcactggcgcgacagtcgacacgattgagagcgaggctggttcgtcactcggtgttgccgcggcagctcgtgcggctacgagcagaggcggatggcgaaggcaggcatgggtgcacggcttggctggctggctgcttgccctagccggcctggcttggcactgggctgctagctgtgctgggcttggccagaaggtggcgacctggcctgtttggtggttgccccgactggtttgctttagaaggaataagttcactttaggtctcttcatttgtcaccgagctcgaaattcacccctataccaaaaaaaccagatacaatgtatcctctaacttacaaaaccgagcaaacgagtttgtaaaatctaaatcgagaagcctctcgttttaggtcttgtttctttcagcttgggattattataatctagattattgagtcagattactgtaagctagattgttataatttatagtaaaataagcggttagttgtttctttcctaaattattaaagcctaaattattgggtttgcaagtctaaagagggagtgggtggcatggtgggtaatttttcacccaataatctagaaaaagctcaccaaaatgagcttattagattataataagctgggctccagattataataagctactttaataagttatctgtttctttcagcttactcctaataatctgaattataataatcctaagctgaaaaaaagggcttagtcatatcgcgcgatgcgtctcagagccatccgaccataggcttggcacatgcacgtagccggagccacaatgagcaagaaaagagagtactgctacatatctacacatgcatgtcttgtttattattatgtcataaatgtatttcttccttcttataaaattttctcttaaactagaaagtaagcccgcgtaaatgcacgggcaatttattttttttgtttatagaaagaatactaaaataaaccatatgttaccgtattcattttaagaaccatagattaccttataatctaaaagaagaaatatttattatgcgaaataaattataaagtttgatatactaattgataatatctattatattcaaacaaatttcactttgttatggctatacgtaaagtcgcatatcaccatctttcgtaaacatacaggttaatatgggtttagatttttttcttttactatacatctaagtcacctacgtatattcatgggtaatattcgaaggaataattcatattgtcaaaattatttgtgctaattttgtcaacactatttagatgagaatgacatacttatataaggatataataggtttccatgcgacattttttattgtacgtatgtttttttttgtgaatagtactgcacatattcgtaggatggttgtgcacatatttatatgagtgtctacgatttcgttttagatcattagttaaaaacatattttaaaaaagtttggtgggatggcatgaagagatgccacggtggcatgactttttcgataacatcttaaagagtttcattatatatatatatatatatgcataatttgaggaaaagtttagtgttgcaaagaaagaaacaaaaaacaaccaaactaagcagatcatatatacattctttttttttccgttttgacatctcttgtgtaggtacgtacgtatgtagggagagattagttggtttttagctggaatatatccaatataatggttgaaaataatggatctaccagttgaagtgtaaattgatgaccatatattttcttttttatattttttcttataatttttttctaatttatgagatctattacgtgatatattaagagttcttgtagaagtgtagaaattctattgcctatactgataatatacttgtagtcgattattatttattgtggcttggtggcatgctttactttacctatcatttgttgatagttctccacttagtatagtccgttatatatggtgcttcatgacataagtgctcgttggatggtagctaattattagatgcactatgcatgaatacctcgtaagcaatatgacttgacgattagtggatagaacttatatacttatggatcagtggtggcatatgattgatatattaggatatttttttattcataaagtatattatatactacacattaaacgttttagtaaataagcaataagttctagagtaattatcggattggttgctccttttcccagttatctacccattgatataggaattattacaaaagacatatcttttgataataatatctaaatccatctgaaccattttatgcactataattaaattgacaaccataacctacatcgtatatatttaaaagcaacttgtgtataattaaaatatattttatataaaagtttaaaaattaaataaatatattttggctttattatattcaatatttaattaatcttgcactaatgatacgtgtcgtttcatgtatcctgaataagctcagccatccagctagatcaaatgaagcataagtagaagataaaggagatcagtacggtgtgaaaagaatatatacaatctttgatatttaaatattatacgaatagagaaaacacattcatgataaatttagtgatatcattttgacatatcattatttttataaggagtaggtaacttttgagaattgctagtcacaattagaattgtttttattttaaaatatgcaagtctaatttaactattacataatatatactttaattaatttatgcttctcattggtgtttcgatgacatctgcctacatttttacaacgtaagtagagcatagttaatatgggcagtttggttttttatccgagtgaaaaaaaaaagaaaataaaaagatgtcgttagcccggcctgcttatgtacatatgtacgtacttttttaccttggaatatatgtacgtacctttttttttttgggaatacctactaaacgtccgtacttatgtgcacatatagatcggcaatattgagttttggagataactttaattggtatttttacaatagatctaatggttgaaaataatgggcccaccatatattaaatgaaaatcgatggctaatatttttttagaatttctataatttattagatcgccacatggcggcgtaggagcatttccaggggtcctatgtggcggcttaggagggtttctaggaagtttaatggacttttagtatataatagatagatagatagaagatagatagattacttattcgatctatatttcgattacaccattgtgttcgttgtaattaaatcattataacaatatcttacatgattatattatgataaaaaatatttatactggtaaattacttttattatatatgtaagttacttttatcatatataaaaattacttttagatttgattaagttacttcattcatagtgctctgagtagattacatttattattgtttttagtcaattccacaatttggtgccgattaaatttaattttttgataaactcatgtttttcatccctataacggatttacttctaatgttgtaacaacttacttccatttcgtactaagttattttttttatgatttatgtaaattgctttcagactttattaaacttactttcataaatgtatttacttgaaaatcttctctacactttggttgtgaatttactccacatagtttcttactacaatccagttatagtgtaattacttctaatcttatagtagagaattacttctattgcatatctaagttatttctacaatttaaataaattgcttttaaattgataaaatgtttgaatatattccacatggatctcattttagcacatattttgagtagagtacaatgatgtaaatagatcttaaaaataatatatgatttataagatataaatctttaaagggggatttatatatggaatggagtgatctctggttaggattaacccactaccgtgcactacctagtcacccctcggcggtattctcccgggttttggctaacgtggcaccttcgtggctcctttggctaggtctttatcccaagtggcattgacgtggctcttatgtggcaattcgatccgaaaaaattaataaaccacgtgggactcacatgttagtttcacgcacaaaataataaaaatggtgggggcctatcgatgtttgagatcacgactacggtatttggatggtatggggatcgttggtaccagggtatatgcgagattgaggtaaaagagatggagacggagatttttatacaggttcgggccccttatctgacaggtaatagccctacatcctattggccgaagccggtgtagctctttattcatctggatcacacaaatacaatatttgggataacctatctggtcatcgttgacttggcggcatgaacaccaactcgtagttgacgacgggtagtcttcctcctcgagtatgaactcgtcgagatgagagatgccgctagatccctcttgtcggcccccgtgggcactgatggggtttgccaaggctaatctgatctctaatgttgatatctggtgacgtgtgttggcttgtgtgtatgttgtgttggtcttgtggcttccgtgtatgttggctgtgccccctctcctcctagggggcttgtatttatacccatggataacccattgtccaagtaaaactagggagaccaatatggatacaatctgggtagtctttgtcatttccatatagaactctatttgtccttccttatccggatttccttctatatacgaagtttgattccgtataagacatggtatatggtgggccccgccgagctgaatcgattactattgggtatgtggtatccataaccctgacagggcctatgtggccccacattttatcctcattactcccgtcttgtatctatcttctctatcctcttctctctatcatctatagagtcccactctgaagcggcggcaagcctcaggcggagcggagcaaagggatgaagtggggtgggcggagcggcagggcgagcgaagcacggtagctggatcaggccgatggaatggagcggaccgtcgtcatcaactgctatagcacctgccatagttgccgcgctcgccgacgactgctcgagctcctcctccggccatctccaccgttgttgcccccttcaccgcccgtggcctgccttcgccgctgctccgtccacggtctaccgccgccaccgctccgctggcatgcaccggtcaccgcgttgcacccgtcccactccgctagcatgctccaaccgctgccgctccgtagtgagactctacagaaggatagaaagaagaggagagaggatagagaggagagggggtagtgaggatggcacatagggtcacatgggccctacccttttttatcgttttatgtgtgatacttacatgtgggtcccacgggttttattatttttctagatcgattgccacatatttgtcacgtcaatgccatgcagaacaaagatctaatcacaagagccacgtaggcatcacattagccaaaaccagggacaatattgacaagggacctcgtttacacggttttttaagttggggatgcgttgtagccggttttatcatccagggatgaatttcgaactttgtgacaaattgagggacctaacgtgaacttattccgctttggaactaagggtgttgggccagctgaggttctggcccaaaaggagttagactttttgaaattaggcttttaattagttttattaattgtaagtcctagatttattgcttgttatttactggaaaggtcacatattaatattccccataatatatgtgggttccatctgtagtagttttatagaattaagtgataattgacattcttttttaaaaaaaattacatagtataacgcagacactcacaacgcacgcacactcacccctatgaatgcacgcacacaaaccctacccctatgagcatcttcgaagactgggccgataaatcatccttaaaattgacgaagtcaccataggcgtctcgctgtcgacgagtacgtcgcctaccattgaaagcacagtgtcattaaatcctgaaaaattcgctcccatggggagtcgaacccagaaactaaggtggccctactttagttttatacttcaattaggagaattcggaattgggggttgtacttaattcttattttacttgtataatctttactttagttttatacttcaattaggagaattcggaattgggggttgtacttaattcttattttacttgtataatctttaattcggagaatgtatgattgattcattgtttgtatttataagtatcggaaattaaaaatttcccttttttgtgttgtcttttatttatttgagattatcgaattatcttgtaattcaatttgtgattgtaagttgcttccttacttgggtcgattcaagcaaagcactcaaaaaagcaccatgttttaaaaaagttaacaagtttacacgtttttattaatatacgatttttagggtgttacagtttccctctccgactcggatccgaacttgctggggaggcccaagataaggactacacgccgatccaagaaatttttatggcctcaagagctgaggatgaggaagctcgccgattaagggagcagtgggaacgtgaggacaaacgcctttgcaagggggcagaagatgaagaacggcagggcctgcaatcaggatccgtgcacgagttcatgccgtgttcaccaaaactataatcacaactgtatgcttaattaagtgctatataaaaaataattacgcaagtatgagatgaggtggtgagagcctcagaataaggagtctagattaattaatttatgaattaggtcattggtatgtctagattgataattcagacagagtggtacatcagggttgataatttcagattatccgtgtaaacggtctatcagaaaatccaatagaaatattaaataatccgcatatgccggattttagagataccacatccacatccgaaagcgcaccatactatttggaaacatataccatatcctcgtttcggatggattcggagcgattttatctgatccgttttcaccccttcataaatgtatgattttaaatccatctataatctacgagactatgaaggtgacatcttcagcttatacacttcggttgtttgggcattcagctcagtgagtgacatctccaaatttgtgcacaaatagctatatcacggtagtgggtcttactatgacccttcccctccttcacaatttcgaacaagattctttaacatattatcttctaaatttgagtgactataccatatatatatataggccacacatacattactagaaaaactattttcgcaaacatccgctttattttttaggtggggtcaaaagaagacccatctgtgaaaattaggagagtcccttgtcaaggctcgtaaataaaaatcgattttacacgcacacgcttaaattgctcacctacaaattttttataggcgagcgtcttaagcatgcacctttaaaaatttattttcacgtatggaaacttaagccacttgcaacctcatttccgcaaacgggcggtttgagtgtgcacatgtgaaaatcgattttcgcagacatgcggcttaagccactcacttttgaaaaatcatttttttaagaaaaaacatgtatctacacctaactttttcatacaaagttggatgaagataaagtttatatcaaaattttttatcttgatgatatctacagttttgtagttgacaattttttatttgagattattttagaggctgaaacatttgttacaaaaatctcacatgtatttttacaaaatttaatatctatgcttcgaacgatctctgatgaaaacatgcgctacatcaaagttatagggttgaccagatttacaactttgtaatggaagactttttcatttaagattatttagagtactaaataaacgttttaagtttcactgatgtgaagttcaaaagaatagcatcaactccaaacggtaagaactagatagtgtggtggttaggagggatgcgtgtggactatgacggcctgtttggcgagagaagggaagaggaatgggagtttgaaggagggagttgagggtgggattggtcatgggagttacatttttagtcctcatcgcttgtttggtttcacgttgaattcccttcaagtctcacgaattaacaggcctcccccaggtaagagattggtgggagttggaccccttaattccccatcccgaaccctcttgaattcccaagtcttccaatcaaactatagacttaaactcccaaatatcataaactcccattccctatcactaactccctccaaccaaacatgccgtgaggtcttgagtttgagtcctatatacttgtatttagtaaaagaaaatgatgtgtattgtgattcgggtgtgcaaatgtttatggatggttactaaaattaaaaaaatatttttttattttgttttggtgcctaaaaaaattcaaaaatgtgaaaattcactttcaaaaacaatcctcttatgtcgtccacttgtgaaaatcgtttttctcatacggccgccttaagccacctacttgtgaaaaaacgatttttccactcgactggacatcccacctatgataatctctattttcacaaacacctaggaggaggcggggtcgctcagcctcttgcgaaaaatagattttggctgtctgtagagaccatttctatagtagtgagataaatacttggcccacatgtcagccatccaatcaaaaatacttaggagtatcacactatcaattctgggttggttcgggctgattgctattgtatttgttttatactacctctgttttttaatagatgacgccgttgatttttatcacacgtttgactatttatcttatttaaaaaattacataattataatttatttttttgtgagttgttttatcacacgaggtactttaagcataatttattttttatatattgtgtaaaatttttgaataaaatgaatggtcaaacatgtgttcgataattaacaatgtcatttattaaaaaactgagggaatatatctttcggcttttggagccggccccatcttcccattcgctccacaaggaaaaaaaatgtcttaaatggcattgctgcagtgtagacagttatactatgcgtgacactggctagaatcggagcaattatttccactccatagttgttggaagtatcctagtatatatactcgatttggagaaatctatctatatattcattttgaggtatattcattttgaggcaaatttgggagaattaaggatagtcgggatgacagacagaaatttacatggaaggaatcatccatcgatcagctaacaaactactagtagtaccggagaagtacaaaaaaaaaatgtcagaattcgaggagcgtggtggacatgttgagcagcggcccgagcgcgctgggcgcgaacttgcgggcgaacaggtagcacacggtggtgggcttgccgttgtacgcgcagcgcgtcccgttgttgcggatggcctgcacgaacgccggcgtgacggtggccttgccgaaccgcgcggggtgcggcccgccgcgcgaccagtccacccaggtgactgtgcggttggcgttgcgcgcgccgtggcggaggtgcaggtacgtcgggatgtagtgctcgtccgggtagcacgacggcgtgcagtgcttgcggaagatggcatggtacttccggtcggcgacgatgtcggcggcgaggtctcggctcatctcgaaccactcggaccccttccgccactgctcctccagcacgtcgggcgccatgcgcgggttgtaccgccccgcgcactgcggcacgtcgatgttgtacgactccacgtagctctgcgccgagttcaccaggtactcgtacaccgtcgggaagttgaacaccggcacgcagctctcggaggcgagcacgaaccgctcgttggagaagtccagcagcgcgttcgccagcagccgcttctcggcgtccaccagcgtgatggagccccacgacacgtcgccgctcgggatctgccggccgtggaacggcgacgacgacgacacgttcagcctgtactctggcagggcgtgcacgtacacggagtagagcccctcgtgcccgtggaaaaaccgctcccacagcggcgcgaacggcagcggcccgcgcgtcaggaacaggaacgccaccttgggcacgcgctggtacgggtactcctccacgcgcggcgccatggacgcgcgccagaacagct

SEQ ID NO: 8289 - DNA, 11204 bp, Oryza sativa
ttgcttagccctgcctaattggactgcataaaatataatgaacttagattggaacagtatggtagagatggttgatttccaggtggctagtactgttccaaccgacataaaactgctaagtacatgtgaagaacatacgagtacgaccgcaattcttgtatgggcatagacctagctgattaagttatctagcaaaggtggtacctctgtatagtggttcttcttaagtcctcgcgcaggaggcaaatttatgccgcgaagggcaactgtgatatttaccgaggcgcaggtaaatatatgagatgaattgtgcacaaattgtttgtgaaccctgattgcgatgacatggtgtcataaaatcagttctctctaaagacctcgggaatgccagaactcctctcgctgctgataacgttacgttcagagcgcatggggactagagttcatggaacaggtaccaatgatgttagtaaccgaaaagctttgcgatgacaaggctaatgtgtttggcacgtcatggattgcgagtaaagcgtacatctactgtttcttaaaactattcgaatagccgtgctcgtggttatcgggcaatgggactcacaatggcatcttggttagaaacataattccagattttattaaatactgttgcattataaacattatagactttctacttctacattctcagctttctgcaattaaacctagctctacacatacattaccatttcatgcattcattgttgattaatataatagcttgctgagtacgttgtactcacccttgctttaacccccttctttcagagttaatttggaattcttgccgaagccgggagttcaattatataagttagtcttatataagttagtctcatctcaacctaattcgcaaatatagattagatagatggtttaagtctatagccaaacattagggtcaagtcattctatagcttctgttgtaatagttagccacaaccttgtaaataccctattatatcacataaagaagtctcctttggagccttgatcaaatgtatgcaatgaagatccagattgttgaacctgtatcaatctactgatccagggcttgatacagttaaacatgtcggtttccgaatcattagttctgggacccgacagcgttgatatcagagcatatgttttactagagccttaaacccataggttttctaacccccttcatgagtaactttcccacctatatagaataatttggttaaaaactaaaaatttgcctaataattttgctaaggcctttattagaatgaactccccttcaccgttggttttatttttttgcttttacttatgcatcatatctctctttcaaaagaataactattttaacaataaaagtatattcccctccgaagacccttgtccttgatatttcaagaaagtcagtgggtacaagcctttgattatgccagcatgagctgagtttattgcaatccaagcaactaagaatacaagttctgaggaattatttggtgaagcaaatatgtgtccatattgtcaatataatagaagaatattggaatataagtggatttctttaagggggggggtagttcaatataagaactatcaggattcaaggagccgttatatttgaacatgaacaaagtcttgaagctcatatcgtgaagaagaaagaagggatgcatattacgaaattttggaattttgataaaagaatcctttgagtagtatttatgaaaatattgtctattcaggcagaaatgatcgaagacattctaacagtttacaagacattatatatatatatatatatatatatatatatatatatatatatatatatatatatatattggactagggaaatatgtgcaagatgaaaaggggatgtcatattatatgttttgattttatgcgaagaaaggatagtcttgatccgttgatatctatcaagatctatcattgacatatatacaatcaagaagacatacaatatgaagccaagtgacagttcaagtacttgagaagcatccagatatttccaaacaaataagtgactcagaatgaaggattcccgagattatagaaatctagttgaagaacttccaaatatacaagactcagaataatttgaaagattccaagagcttcaatttcagggagtagaagatcaacagactggtgatgacaataaacatgcaaattaatggacgcggtctgaagaaagttaaccaaccaagaaaacatttgttctgaagactattgatgtaatttagaagggaatcatctcttccatccatatatacaaaaaaacccctatgttatcataaatcataggtagagcgaattatcaaagaatacactaatatgaggttatatgtatataatgagagcggttatacctatagacatcatactattatggagcaatgcatggagtaacaatttcatgaagacaagagctcctattggttaagtggcacaaccaatcaagaagaataaatgaagcttcagaaggaacaaaatattcatggaatatttgttgccgcgctgaatgaagatattttttccaagtatacaagtacttacattaatgaagatagctctttctgccaagctaaaactatgactggataaaaaaaagcaagacctacaaagggagtctgaacagataaatctaagcaacataacgacattgtgtagagaaaatggaataaaggtttatacaagaaaataggatagtaacttatgtgccatagtaattacgacacataagcatgactattcataatttgaagattacatgataaagtggacacaaagaagacctaggacgaccgactatgaaggcctgaataaaagaggtattctattcaagaccctgatctggaaagatggatatgaaccaataattattcaagatggtagtactgaaggaacttattatactcatttatcctaaatatataaatgggtatatcagaccaggagaaaatatctgaagaaatcaaacgatacaaaaatacgggttagagacatataaaattccctcaaggcatgacagataatttcactactcggatacgtatgattggaggaagaaaatttgcaatttcgacaagtaccaagattctgaacaaatattgacaataaatttggattaaaaaaaaggatatgaaccatctacgacaaatttccttatttttagtcatagattgagttataattttctcgactcgagaagaatcagcatagaagaccaagaatcaacaagaggaaaataattagaggacacaaaattattggttgaaaatataccttgaacaagatctctccatggttttcgtgaccatacaaaaacttggagattcatggctagagctagagatttgtactcccgacaagcacaaggattttgaatggatatcggtggtatatttggataaaaagaacataaattgtttatagcaaattttgttacccacatttgaagaatcaagtcaacaattttctggacaccacgaagaccatgaattaaaaagaagaaagtgtctcgacaaacattttcaacccaaagaactatacaccatgccaatcatgttgaaggcaaggttatcaatgtatagcaaaaatagagatggccaataaaagtgcgactgaatggaatggtttactttaggaagcaatgattacttttatgcagtaatcaaacatgtgatataatttcttggagaaagagaagttctggaataaattcactactatttaaactctatggattctgaaatatttcatgatatttcctaagtacgggtagtgaattatgcacccggattgctatgacataccttcttatatgtgacacgcaataaggagctaacacatggatttgtactaaaggaaatggttagatatagttagagaatataacttcaatgctcgacactattcaacaagttgtaatcatagaaatacagcatgtagttaccgcaagaaatgccgcaagggaatgcataagaagaggatcggtgactacgaataattagagaattaagaaacaatacaaaactatgagtcagaaatctaagttagggagttacaaaaggttggaagaaaatattgtctaagaagacattgaagccatgaaacgaagaccattcatcagctctatttcgaggatacgagcggaagtccgaccaccccaatgaggagcagaactagaagatcatagtaaacctcatcgataggtatcatgactgcataggtgcaagaaagattcaaagtatacatccaagaatacaagttatctatcagcagttgaccaatcgggtatccgaaacttttgaaaggaataaggaaagaataaagttcctatacttctacttgtactcttcagaaatctcgaggacgagatttatttaagggggcaggtttgtaacatactgaaaattagctattttctaattatgcatcatgccggttcttatgttcttattaaccttctaaacctaggaaaatataattagagagagacctcctaaaactaacttgcataaaatccctctttgatatttaaaagcttttgtgattttcatttaaaattatcttgggatatttcttgatttggttttaatttaaaaccttctattgacaaaattccttttattcaaatttagtttaaaaaccctttccacttttatgaattatggtccaagaaattctccatcattgtcctagaacctaaaccaagtgattccaattttataggaattaattgtcgatccatcctttgattcgaaacctatccttaactttcttccaaatccaaattccttcctttcgatctagccactaatttaattcatgtggcttgataccctctttggcacaataataatatttttttgaataattgctcttgtgctaagaaggatatatttttattttatttccctcttccaaattaatctccttttagcctcaaataattttctaaatccatgtcaggcagtttgtggctaaaaatcctatttatttcctctctttgttttcttacctcattcccaaaaatattttgaggaattatattaattccctcccatttgagtctttaatatttagaccacattattgcactcaaatatttaggaaatatctcttttgaaagttatctccaaaaatagattcatttcaaaagttagccacctaaattccttccaaatattaatttggattcaaacttccttcctcaaatatcttccaaaattcaaaaataacttctatttgcttttgggccaaaattcccttttcttcttctatcggcccatctccctcttggcccaggacggcccagccaacccttccagctgagccgcccctctcctctctgtgggcgccaatgccaggtgccctgggcgccgttgtcgtgcgccgtgatttgcgccgccgccgacgccgtgccgtaccttcctctgccgccgccaacatccttccgtcgccgttaagaaatcaagtcggcgttgttagattaatgggctaggcccaattaaatcctaataaattccattggcccacattaagtgctatgggtaataataccagctttgaaatctaagtgaagagttctcaacttaaatacggagctagtggaaagtctctgttgaccggttgagatggtgcgcggacaaccaggaggggcgaggcgaggcgaggcgaggcagacaattgctgctgctgcgctctctcattttgtaacggacggtaataaacacggagaattgatttcgtatcaatgaacgcgtcggttacggaattaaacgccgtgaattaatttgattctgttggttacggaattaaatgccgtgaattgatttgattccgttggttacggaattaaacgccgtgaattgtttccgtattaacgagcgcgtcggttacgaaattaaacaccgcggttgatgactccgaacgttactctcgcgctcgcatatatatactccgcagcgaccagaacgacgacgaagttcttcacgactcttgcacttcgagttcctcctcctctgttcctgagctgcaaaatccttccccggttctgttcacctgcactcacaggtgtacaggacgagcaggtgcttctggaactccgtccgcttgagaacttgcacgggtaggcgggcgatcaagtttttaggtagcgcttcaagcgcgactgctcctgttcttcgcgactactactgctacatcgacgcctttgtcaacatgtcgacggagattggagacaaggaggtgaacgacatcaacggaggcaatactgcctcaaaatccagcggtgggacgttcttagggtatagtttcattctcctgattctattagatgtttctatgttgatgttctttgcaatggcagcgttgcgttactctgtaaatgttgatgcttatttcattttaagcatgctcaagttgtatacatctagcactatcgctagatctactcatattgcaaatgtcatgtttattgtcttaatattttggtttaaaatatgccgaattatgaccaaatttccaacaatcccaaaacttgataggtctttttcggtagttggctttgctgcatcactaaaaccacatgctttcgatggttcaaattataaaaaatggaaagcacgtacacttttatggttgacggcgatgcattgtttctttgtctcacggggcaaaccgagtgaaccgcctctctctccagaggaggaggctaagttcgaggcttcggattgcctgttccgtggagtattgatcagtgtactcgttgactatatagtggacgtgtacatgcacatgccttcagggaaggacatgtgggatgctcttgaggccaagttcggggtttccgacgccggcagtgagcggtatgtcatggagcagttctatgactacaacatggtcgatgaccgttctgtagtggaacaggctcatgaaattcagatgctggcaaaggaacttgggaacaacaactgcgagttgccggacaagtttgtggcggatggcattattgcaaaattgccactttcttggtcagactttgctacttctctaaaacacaagaggcaagagttcagtattactgatcttattggctctttgggtgttgaggagaaggcaagggcaaatgacaaccggggcaaaaagatcgagggaggttctagcgccaatttggtgcagaagaagaaccctcacacatcccacaacaacaacaagaaagtcaaacttgacgttaaacccaaggctacaaccaattttaagaagaaaggcaagggaaaggcaaaaggagattgctttgtgtgtggcaagcctgggcattaggccatggattgtcctgagcgcaaggacaagaagtctgcaaacatggttattagtgagggcggaggaacattgtggtatggtaaatttttacctacagttctctctgtctgtcactcacctgattggtgggttgatactggtgctaatattcatgtgtgtgcggatatttccctgttttcttcttatcaagtcgggagaggttcctccttgttgatgggaaacggatcgcttgtggctgttcatggtgttggtacggtcgatctgaagtttacttcgggaaagatcgtgcagctgaagaacgtgcagcatgtcccttcaataaagaagaatctagttagcggctctctactgtgtagagatggttttagacttgtgtttgaatacaataaatgtgtcatatctaaatatggaacgtttattggaaaaggttatgacagcggaggtttgtttcgcttttccttgaatgatatgtgtaataaagttgtgaaccatgtaagcgatgataatgatgagtccaatgtgtggcattcgcgactttgtcatgtgaattttggttgtatgacaggcttagccaacatgagtttaattccaaaattcactttagtcaaaggctctaagtgccatacttgtgttcaattaaaacaacctcgcaaacctcacaaggcatctgaggcgagaaatttagcaccactagaacttgttcattccgatatgtgcgaaatgaacggcgtgttgactaaagggggaaagaaatatttcatgacattgatagatgattgcactagattctgctatgtgtacatattgaaaacaaaggatgaagcattacattactttaagatctataaggctgaggtaaaaaaccaactggaaaggaaaatcaaacggttaaggtctgataggggtggagagtatttttccaatgagtttacttctttctgcgaagagtatggaattattcatgagaggacgtctccctattcaccctagtcaaacagggtagccgaaagaaagaaccgcactctaactgagatggtgaatgccatgttagacactgcagaactttccaaggaatggtggggtgaggcaatattgactgcatgtcatgtcctgaatagaattcctactaagcataaggaagtaacaccattcgaggaatgggaaaggaagaaattaaatctctctcacctacgcacatggggctgtttggccaagataaatgtacctatagccaaaaagcgtaaacttggaccaaagaccgtagattgtgtattctttggttatgctatccacaatgtgggagataggttcttaatagtaaattctggagtacccgacatgcgtgttggtacaattactgagtctagagatgccacattttttgagaatgaatttcctatgaaaaatgcacctagcacttctagtcaagaacctattttatcccctgagcactttgtgccgataaaacacattgatcaaacgcttgaggaaaatcctaaggaggataacattgtagcaactcgaaagagtaagagacaaaggactgcaaagtcttttggagatgactacattgtatatcttgtggatgatacttcaagaaccattgaagaggcatattcatctcctgacgctgactattggaaggaagcgatacgctgtgagatgaactcaattatgtctaatggtacttgggaagtcgtcgagcgtatatatgggtgcaagcttgtaggatgcaaatgggttttcaagaaaaagcttaggcctgatggtacaattgaaaagtacaaggcaatgcttgtggccaagggttatacccaaaaagaaggtgaggattttttcgacacttattcaccggttgctcgcttgaccacgattcgagtactactcgctctggcagcctctcatggtctactcgtccatcaaatggatgttaagacagctttcctcaatggagagttggaggaggagatctatatggatcaatcagatgggtatgtactagaaggtcaggagggaatgatgtgcaagctgttaaagtccttgtatggtctcaaacaagcgcctaagcaatggcatgagaagtttgacaatacacttacatctgctggctttgttgtgaacgaagctgacaaatgtgtgtactatcgctatggtgggggagagggagtaatcttgtgtttatatgtcgatgacatattgatctttgggaccagcctcaatgtgattgaggaggtcaaggactttctatccaaaagctttgaaatgaaggatttgggagtggctgatgttattcttaacattaaactactgagaggagatgagggtgggattacacttgtgtaatctcactatgtggacaaggtcttgagtcgctttggttatagtgactgcaaggcagctcctactccttatgatcctagtgtgctattaaggaaaaaccgaagaatagcaagggatcaattgagatactcccagattattggttcattgatgtacttagctagtgcaacgaggcctgacatctcatttgctgtgagcaagttgagccggtttgtttcaaatccgggagatgatcattggcatgctcttgaaagagtaatgcgctatctaaaagggacaatgagctatggaattaactacgctgggtacccaaaagtactggagggctatagtgattcaaactggatatctgatgctgatgagataaaggccacaggtgggtatgtgttcacacttagagggggtgttgtttcctagaagtcttgcaagcagaccatcttaacgaggtcaacaatggaagcagaactcacagctttagatactgccacagttgaggccgaatggcttcgtgagctcctgatggacttgccggtggttgaaaaaccagtaccagcaatcctgatgagctgtgataatcaaacagtgattattaaagtgaacagtttgaaggacaagatgaagtcatccaggcatgttaaaagaagactgaagtctgtcagaaagcagaaaaactccggagtgatagcattagactatgtccagatggctaaaaatctggcagatcagtttaccaaggggctaccacgtaatgtgatagactgtgcatcaaggaagatgggtttgagacccacttagagttgcacaatggtggaaacctgtccattgtgatcggagatcccgtgaatttggatggcgaaacaaactattgtgtaactgagagaagagaccctaaaatgggcttatcttcatgatgcacttctcttctaatctgtatggtaggatggtatacaccttaatgtgatccgagtggctttccataaagcagagatgttggcctacagaacatcttagaaggaacacacctatatgagtctgattgctagtcacaatctatgagatctgggtgatctctagatactcatgaaaatgccaggagtatgacttatacgctccaaacagagaggatgcaaacggcagcctagtaccagttaacggtttgagtgaaacctgaatcacacaagactgacaattcaaggcatagtccattgtttagttgtgatctggtgtagttcttttcctaggtggaagttcaacttaacagtctccaccgaaacactggtataacaaacaggataagaatcgagagcatttcctgtgagccatgaaatttggtggggattgttagattaatgggctaggcccaattaaatcctaataaattccattggcccacattaagtgtgtcggtgacatggggccgggggtatcgtgactagaggcttgggtagccgcggtcacccacgtggcctgaccccctcgggggggggggggtc

SEQ ID NO: 8290 - DNA, 34572 bp, Oryza sativa
tttagttgaaattggaacgatgagccgaaaaagttatgtgtaggaagtttcgatgtgatgtaaaagttagaagtttgaaaaaaaactttgaatctaaacacggcataactcaacacgtgagcttgttgaacagtattatcaattggaattcggagagttgttgatctctctctctgttcctcgtagctatattcttgctatccacgatggctgattggaattggtttttgatgttaactggacctccgcaaaccctttgtagtactagtttgtaattttctttagtctcaggttgtaaattgggactataaatacatgactgaagatttttatccttagtctcggttaaaatacccagaactaaagatttttttttattttgcttgtgctgcttactacctgattatacgtttaaatatgttatatatatatatatattgaaaatccgctctaaatttaagattgaaaatttaaattttagctgctaaatataagcatgagagaaagatgaggccgtctcggtcgttatctcgtgcaggacacgtgtctcagtcataatctcaatggctctcaaagcatcccctcaaaatcgtattaattagtaatgtcattagcaacaaaagtgactttgacgtggacttgttcttccagcgcatatggactttctcccagcgcggcgctagtcgcggcaccagcagcaattgcgtgaggacattttcgagtacagcagagtgccggcgataccgtgtgggatggcgatggcggaacattttcgacagcagcaaggcgctgcgcttggctcgtgttcggcacgggaggtcaccgcccgccatcccgcgctcccctttccagaccgagtcgccgccacacgccccggcaagcgaaggattctaaacaaagatgtcaacctgtttattgcatgccaactgaataattatgagaaattttcaaaaaaattgacaagatagatcaatatgtaatatataattccacaaacatacaagtttaaattcaacttctacaagttataaaaaaataacaaatttaattgtaaatatgcatatagtaatttaagttttgtttgttatttttattacaactagaaagatagcccgcgtacatgcgcgtgcacctaatttaatatgtgtgaaattttataacgaatgtccatgtatgttggtgatattgtattaaaattttattttactatatctaaattaaaattaaacttatttaatgtgctttgaatgttggttatgattttcttctaattacccatgcagcacataatttctaaactaaaattaatcgaaaccgtatagttttcaatttatgaaataatattatgtcgaaacaatagatgtagttcctatgagaaaagtttgggtattttgaatccccacagggatatatcacccagacatccctaaaaagtcccatttttttttgttatattctattcaaaattttagatattttcattctgtttgtcttgctaaaatatttgaatatttctatttagaatgggtttaaacccaacaatttttttaaaacatttacataatttttgaattcatttcatgtccatttttaaaattttttggagaattccactctatcaagcatctttgaaatgatttcatctctgcaatttgggctaaaaatatatgtgggttgaaccaacaacctcacatggggtaaagtcatatgttctaaattatctctcttcaattgagtaacaaatattaaaatagaggtcatataatacatacacatttctagattattctccgctaaatgttaggaatttactatgtagcgtagcaagttttaccaaaaagaaataaatgaacatggtctttaattcccatatggaattgactcactatattggtaaagccacctcatagttgtttcactgctaagatttcttggtacaactcacctgttcggaatgatcagtacgatgttcaaccgagcacattttaatttttaaaatggcgtctttaaaaaaaataacgctagatggggtacacaatatgatagaaaaattgatatcatttaaatatttttctctaaattattagtgacttcatagatcatatatataattttatctcctaaaaagatcagttattgataaacgcaccaaaatcaatttgtataggtaaatagcccccatatacatgttgagagaaattaattaagttgatagaaagtttataagtgtctaatgggatataagtaatgggtgtaccggcttaagatgagatattttgatttatagtgatgaatttaagttttttttatttagtggaggcctcaacatggatgtgggtctgtgtaacatactgaaaattagctattttctaattatgcatcatgccggttcttatgttcttattaaccttctaaacctaggaaaatataattagagagagacctcctaaaactaacttgcataaaatccctctttgatatttaaaagcttttgtgattttcatttaaaattatcttgggatatttcttgatttggttttaatttaaaaccttatattgacaaaattccttttattcaaatttagtttaaaaaccctttgcacttttatgaattatggtccaagaaattctctactattgtcctagaacctaaaccaagtgattccaattttattggaattaattgtcgatccatcctttgattcgaaacctatccttaactttcttccaaatccaaattctttcctttcgatctggccactaatttagttcatgtggcttgataccctctttggcacaagaataatattttttttgaataattgctcttgtgctaagaaggatatatttttattttatttccctcttccaaattaatctccttttagcctcaaataattttctaaatccatgtcaggcagtttgtggctaaaaatcctatttatttcctttgttttcttacctcattcccaaaaatattttgaggaattatattaattccctcccatttgagtgctttaatatttagaccacattattgcactcaaatatttaggaaatatctcttttgaaagttatctccaaaaatagattcatttcaaaagttagccacctaaattccttccaaatattaatttggattcaaacttccttcttcaaatatcttccaaaattcaaaaataacttctatttgcttttgggccaaaattcccttttcttcttctatcggcccatctccctcttggcccaggacggcccagccaacccttccagctgagccgcccctctcctttctgtgggcaccgatgccaggtgccctaggcgggataagttcactttgggtctctctatttgtcgcccagtccgattttcgtcccttggtcgcaaaaccgggtacaactggtcccccaacttacgaaaccgtttaaataaggtccctcagcggtattgtacctggtttttgctgacgtggcgtcgacgtggcttctttgactaggtcttcgtcatacatggcattaacgtggcgcttacgtggtaatttgatccctgaaaaataattaaaacagtgggacccacatgtcagcttcatatccataatctttccggtcagcgaagaaggacaagcggccgagccggagcggacgacgccgacgaccggagcaagctggcgacaagaaaggcggcgccaagggccgggagccactctcctcctccttgtcggccgcgggcggggagatatcggcggcggcctcgacggggagccgctctcgctaacggtggccgcggaaggggagatgtcggcggcggcctcggcgggcacaccccgctcctctcccgccgcctaccgcccaccgcaccccgctcctctcccgccgaagcccgtcggcgggcgcaccccgctcctctcccgccgcctaccgcccgccgcaccccgctcctctcccgctgtcagccgcccgccgcactccccctcctctcccgccgtcagccacccgccgcaccctgcttctctcccaccggcatcgttgaagcatacagagccacagaggtagatgaggttgaagaagtgggacccgctgacatgtgggtcccttttttattttttttactggcatgtgggtcccacaaattttgtataatttttttattttgaattttgatgtttttattttttttcggatctaattgccacgtaaacgccacttcaatgacatgtgagacaaagacccagtcaaaggagccacgtaggcgtcacttcagcaaaaaccgggcataataccgccgagagacctcacttacatggtttcacaagttgggggacctatcttacccggttttacgaccaagggacgaaaatcggactgggcgacaaatagagggacccagagtgaacttattccccctaggtgccgttgtcgtgcgccgtgatttgagccgccgctgacgccgtgccgtaccttcctctgccgctgccaacgtccttccgtcgccgctaagaaatcaaaaagacgtcagccgcacgtcacttcgctgacatcaaacacgagccgaaccgacatcgatgcccaatcagaggacgagaccgacgccgtcatcctccttctcacgctaccatcgccgtgccttcctcgtcctcctccggtgaaccgacttcccgactcctataaatagccggtgaaaccctctattttccccacatcatccgagctctacgagctctctcttctctctccaccatgaccggccaccactaagtcccggccgatctcctcccctacagctccacttctcgaatccttgcaccactaatctctcttcactccggcgaatccattttgtccatttcccccttctctctccctccaaactaagccaccaccattaccaccttagccggccgaaggtgagctagtgttgccgctgttccggccaacccacccttcctctctcccaaccaccaccctccccgggtgtgcgttgctcgggaacacgttccgccaccgacgtcaccgtcccccatccactggagcaccggcgtccctctctccctctcctctcgtttactcggctgaagaagaagaaggaagatacgggaggaagaagaagagaaagaaaaagaaaagaaaacaaacactgacaggtgggcccctgcacagtaactcttcctattttccctatttaattcaaatccaattctttagaagcccatatctcctaaaccgtagatccaattccaatgaaacctggatctaaattcatctaaattcaaagctatattttgatacctaatttgctattttataattttatttgaatttattcaaatatcatttgaatttatatttgcctttttcaaatactttcttttaccccaaaatacctattagccactaaaatgccgccgattggaactttacgtcttccatggggacgtttgcggtctattggccctgacgtcgaaccgttggttgtaaagcctgacaaaacccaaaccaaaggtcgaagtgctgctcctggcatcttacgcctcgctgcgtacaacggtcggagcttcactattccctcgaccaccatagcacactgcacagttagctttcgggccctgtgtgattctaaccgctctgccgccactcacggttgtcggagtaacacttccacctcgctaaacctgcacaaacctcccatccctctagccgttagattgtctattaataccggctagagaagataccaaacctagtcgtcatgctttagcgacgactagcgaacacccaaaccctagctgatatttatcttagctcgatatcggcttagacaattgaagccagacccccaccagctataatctcaaccatttaccctccaactacccatagcctatacatgaaatacgagccgatatgctatcgtatttcagcatcgactcgagaacaactaaatcctagccattcttctaccaaagccaacctcgatcaatactagccacatatccacttaaccagttagattattcaatatatctcctactctccaagaaaccaaaacccacacatgaaatataagcgacattagttgcttaatcccctctagcctccaaccctttagaacctccacatataatattagctcaataatccctatgtcctataaaagagataggctatatcctaaaaccaagccctctttaccgtttatcgttttctcgttattttatgacttttattgaatttggttcttcgtctttcttagtagagtctattatcttttggatggcaacctgtggtatttcgaggatcggataatcaggttgcttatcttgaatttatttgcgttggagcaaggcaagttattatctctctcctttgagcataattatcctttattctatatctccattatctcatgcattagtcattcatgatttcgaatgcgtaacctgaacatagcaaaccagatatgctagctttgcttagccctgcctaattagactgcataaaatataatgaacttagattggaacaatatggtagaaatggttgatttccaggtggctagtactgttccaaccgacataaaactgccaagtacatgtgaagaacatacgagtacgaccgcaattctcgtatgggcatagacctagctgattaagttatctagcaaaggtggtacctctgtatagtggtttttcttaagtcctcgcgcaggaggcaaatttatgccgtgaagggcaactgtgatatttatcgaggcgcaggtaaatatatgagatgaattgtgcacaaattgtttgtgaaccctgattgcgatgacatggtgtcatacaatcagttctctctaaagacctcgggaacgccagaactcctctcgctgctgataacgttacgttcagagtgcatggggactagagttcatggaacaggtaccactaatgttagtaaccgaaaagctttgccatgacaaggctaatgtgtttggcacgtcatggattgtgggtaaagcgtacatctactgtttcttaaaactattcgaatagccgtgctcgcggttatcgggcattgggactcacaatggcatcttggttagaaacataattctagattttattaaatactgttgcattataaacattatagactttctacttctacattctcaactttctgcaattaaacctagctctacacatatattaccatttcatgcattcattgttgattaatataatagcttgctgagtacgttgtactcacccttgctttaacccccttctttcagagttaatttggaattcttgccgaagccgggagttcaattatataagttagtcttatataagttagtctcttctcaacctaattcgcaaatatagattagatagatggtttaagtctatagccaaacattagggtcaagtcattctatagcttctgttgtaatagttagccacaaccttgtaaataccctattatatcacataaagaaatctcctttggagccttgatcaaatgtatgcgatgaagatccagattgttgaacctatatcaatctactgattcaggacttgatacagttaaacatgtcggtttccgaatcattagttctgggacccgatagtctggaatgtaatttttatgttagcatttaaatatagtcaatatggatattaaagtattgttttcactaaaaaatatagtagttcaaacatatcacaagttgaatatgtgatttaaaaggttataattattttatttatattgttcctataaatgctagtaagaggagaaagagaagaaaaggaaccatggaagagctggctagacctgatatgtggaggtccattaatggttttctccccataaagataatttaaatttcaattatcataaggataaaactaagagaaaaggatgaacgacgcacaccacatggggatagggagggccggatatttttcttaaaaaaataattgatatgatgacctaaaataatgcgttgcatgtttaagtcgaaaccgatagtcaggtgttttgttttttatcataattttgtacgattcttttaacttatgagagacctgtatagtggcttagaaatatttataggatgtttaatgtataagtctttaacattgtttgggtggggagcgtggaaagaaggtttggtattgtcttaaataaaaatctaataacaacctaaatggtacgtccatcggtttaagtcgaaaccaatgattagatgttttgttctgaaatttttaagatttttctctaatttagaagtgtcacatagtgttttagaaacatttataaggatggctaatgggttttaatgctgcataggatcgcggtgggagtttaggatgttttttttttgtaagaaaaagatatatctaataacctaaaataatgtaaacgttactcgaatgttttatttttttagattttctctaatttagtagtcctatatggatgtttaggaatatcccttctttctataaagttaagaccaaagctgcctcttcaattcgccacgtcatcaacattatattagccgttcgatcaatatgtacatcagatatacaccattggatcccttatcctcttgcccagcatgcatggtaatcaccttgctccttcccattcccctcccttaatcacatgcattaatttacagtagaaacagccaaatcaattgagccaggaggtgcgatggttaataagattcatgtgcctcttgcgattctcttccaaaccttttaataagcccctttacaatccccactataaccaagtctcttcccctttgcatgaatcttttcatcgtatgttggattctatttggtaagcctgaatttaacatttattttaaccagattctatttgagtacacattatgatttgaaccaagcatgagcactatgaaagttttgtccattggtttctctgaacttcaagaaagaatccctatcctatgcatttattgttgttttagtttcttaagaaaagattcgtcatacttgcagccaatacttatatgtcctatcactaatttatttgagtagttgggaaggatatagaggattacaatatagctgtcctgacatagcgagaagcagcttaacttgctcggtatgtattttgttttcaggttcaaacaatacaatctaattgtccatactaatatgcatatttacatacgttctcaaatgtgcctgcagcgaagcgcggggtttcatctagtttatatgatgtgtaatgaacttattaggagaggctagaggaagagctaaatagatctagtaggttaatgcttttaaggcctgtaatttttttaattttaattattatggaaataaaaaaggaaaagaaaggaaatggagggatcgtacctacattgctgtgaagatgaataatgcgtacgttgtggaggcgtacggtagggatgaaaaccgatcgaatacggtcggaaactagctctatcatatttgttttcatattttttctcggaatcgaaatcggaatcggaaacccggatacgaaaacggaatcgaatattatcgaatacagatacggagcgaatacgaatcgaaatgaatacggtaacgaataattatcaaaatatcaagacccctcaaaataagcttcttaaaacgaggaagagatgtagccattagttttcaaaaacaaaacaatagtattctcaagctgttgactgagttttcagggtggtagatgtctaagctaatctaatctagcaaggcgatttagccaataccggcataaaccctaaaacgagaagcagccgatagagctaaattgatatgctaagactagattaacagagacatatgataaataggtaggcaaatatatcatccaaaccagagcaatccaagaggtcgaatgtactgatgcagccttgaacaacgccggcatagacgatacaattgcctaggccgacggaatattgaacttaccccttcgccggagatcgaacaccgatgcagccccgcatcaggtgccaagtcccgccggacgataaaataaagtagaaaaggtaaaagggtggcgatgcgccgaattgtattgatcgtcgagatagattacatagaccccgggtgtacatatttatacccatgggttgatacaagtccttgttggacaagaaagaaactttcctaaagataaaaggaaaagataaagtccttataactaaacacactttcctaaagataaaaggaaactaacaaactattcctaattaatagataacttgccatgccgcattctctttgaactcggtctcttctggataagcttcctttagtagatcaatttccttaaccgaatatagcaagaatccgacaactgacgacttgacaactctcatcggctaatctcaggacttcgaagccgatgctgactctaagccgatgactacttcgggctttccaaattccactgttaacagtcatgtatcaggtcatggatgaaaaaacgccgaaggaaatttgggacaagttggcaagcctgtatatgtccaagtcgctgacgagtaagttgtatctcaaacaatagctgtatggtttgcagatgcaagaggagtcagatcttaggaagcacgtggacgtcttcaatcagttggttgtggatctaagtaagttagatgtgaaactggatgatgaagacaaggccataattcttctgtgctcgcttccaccgtcgtatgaacatgtggtgactaccctgatgcacggcaaggatactatcaaaactgaggagataatttcgtcgttgcttgcacgagacttgagaagatcaaagaaaaacgaggcaatggaggcttctcaggctgagagtttgctggtcaaggcaaagcatgatcatgaagcgggggtgttgaagagcaaggagaagggggcacggtgctataagtgtcatgagtttggacatataaggaggaattgtccgttactgaagaagaggaaagatggcattgcaagtttagcagctcgtggtgatgattcagatagcagtagtcatgagattcttacagtgtctaacgagaagtctggagaagcgtggatgttggactcagctagttcctatcacgtgacatcggagcgggagtagttctcttcatacaaatctggtgattttggtgttgtttacttgggcgatgacacgagttatcgtgttgttggaatgggcgatgtcaagttcaagatgtgagacacgtgccgggactaaggaagagtttgatttcgcttgggagcctacatgagataggttggttgtatcaggtggattctgataggaagaccatgaatatcatgaaggacggcaagactgttatgattggtgagaggacaagctcatgtttgtacaagttacaagggagtgctgttgcaggtggagtcatggaagatgggtatgctggtgttgctgtgcacgatcctgaaggcggcgagcctggcgtaggctcgtcgggcggctcggcgtgagctgcggcagaaccaactcaagtcctggtacacgaaggttcgagctagtaacagattcggattggcgtggcatattcgccaaggtggagtttgttagagtttgtgtcgaatatgtgtacgtagtcggttacagtttaggacttggagttgtaataggtattaggactagagtatgagttggactctatcctaggttctctcataaatagaggagcgtgcctgttgtaaccgcatagcgacttagcatagcgagagggagcggctgccggcggcgaccggccgttagtcgttgtaactctgatacgctgtatatgctggatcggggaggagcgcccgtaatcagtaccccggagatgtaggccttggctgaactccgttaccaaatatcgtgtctcggtgtcgtcatcgttttggatctcctatggtgttttcttccgcggtttggtttccggtgtgatttcggggccggttttataacaccacgcatgccacacgctcgcacgcgcacgcacgaggacgaacgacgaacgaatgcacggacgacacctccagcttcccgcctccgtatttccttcgtttctcaactagaaggctcaagactggaggcaaaagaagcgcaatttcaacctatttcacctcctcaaatccgcccctactcccactaactcaatcgtcgtcaccggaggaaaattccccgaaactctaataccggcgccattgattgagctccaaaattcatcgcatacatcgccaatcctctgaaattgaaggtaaaattggattctccatgccgagtactccatttcccctctcattacacatccaatccatcgccggaatgctgccggcgctgcctcccggcgtcgccgctctgttcggccgcagccagccgcatggcgcgccgccgctccagggcgccctagctttggccgtcgccaccctgggactcctctcgcctcactaaacctcaccaggccgcctcccgcaccggagtttgccggagtcgccgccaccatggccgcctccgcctcctattactgcccgccgccgccagcctcgccaccggcgcttctctcgctgccgaccacaaaaacggaatcgcctcgacccctagataacaaaatcggcgcccccttgtccaaaaccggcctcctctgccgccggcaatgtgggattccggccagttcatgtgcagaacgagaagaacaggaaatccaattttcctattgaaaaataaatcagaaaaatcctttttatttttctatcaggttgaccatccgtttgaccttaaaatcgaaatctgagacctattccaaactcctagaattattctgaatccatcagtatcagttttgttgcaatccgagcacccgttgtcgcgaccctaattttagccctagggttcgccattctccgaaattccaaaaatccctaaatttaattatttaaaatcctttccacccattgttgcactttgtgatactattttcttttgtttatctttgtttttctgttatttattgtggtgatgattgttgcgtaaatagaaaacgctgacgttggtccggtagtcgaagcgagtgaaatctccgcaccaggaggagacgatttgtacgactacatcgcgcccgaaggttgcaagacatgcaccctcccttgaacaatttaatcccagcagttagagagttattttggtagcgtacttgtcctttggagtatgatagactgcacgaattattttaaattaagtatattactattattgcattatattttctgttgttgttataaacaccttaatgagccttagagtctaactaacttaggataaaatttgagaaacacttaaacaaactgttaattatttaatatgatattgatttaatatggatattattactgcatatgaaaacatgcttatggaactatttatggctatatgctaagaattgatcacaccacatgtgagcgggtggtacacatgatagagttcatgtgtttggttttatggacctgcttatggtcatgatggatatatggatatatttatggttatttcttatttaaaattgatataataatcaacccccttgtgtcaataagaatgacatagtttcgcccatccacacgatcgatttgtcgaacctggccgtatattgctccaattgattgaacttctgcaggcctttcggtgcactggccattagctttcaagtatgtgaagcaaagtgacatggttcatgtttatatgatttatatatgtgggctcgatgggccccgagagttcagaattaccctatgggtccatgaagttctaggctgcccatcgagtaacgaacaatggtaagtggatgcggaggtaggttggcacacacctcggaccagatcactccgagcaacatcccgagcatcctttaacttataattactaggcagaagggagagatatatggagcaatattacaccttgttacttttcagcccggccagctgtgggtatcgtgtgggtaaagctgggcagacactgcagagtcgttgagtattcgaatacgccatgctcccggttaatggagatgtgtctatgggtgattcctgattatgggcacaagttaaactaaatggctatgaattaatatggttaacttatttattatttaatgttctattcatgttatttataagtaacattcatacttttatgctcgttattattgtttaaattaaatgttcaatagtgttgtttataacaaatgcttattaagataggctctatgaaataactgttaaggttagggtttaaaccttccagctctcaatactgcatgttgtatattgcaattattgtatttattatcataagcatgtcttgctgagtaccatttgtactcataaatgggttcagatcatgaagaggaagatgcatgtggagaacctgttgatctgttagagtgggacaactatggtttctaggtcatcctatgctcagacagttcctgtggtggagtctagcagtttatctgtttgtagaaataaggctttataggccatatatgtaatggtttgtatttatgttgtgttgtgaattaagtgacttaagtattgtatgatggaagtttatgcttttatatcatttcatgcgtaactgaacatcctgggcggttacgtattcgtgggtgcaccatgactttatcgggtgtccccacactcgagcggcgcgccgtgcggcggcggcgtcggcgggcggcgacgggttgtggcgggcgtgctcgcgcggcgggagggctcgagcgacgcgccgcaaggcggcgacggtggcgggtgggagccgtggccggcgacggcgtcggccggcaacgggcggcggcagcgggcagttggcacggccggctagccggctaggatttctggtttttttttttgctgaaaaatatctccggatatccgatgaaaaatgccagatagtttccgaccgttttccaattccgtcggatatcacccttactgtattcgttttcatatctgagaaaaaaaatccgaattcatttctgaatccgagaaattccggatatttccgaccgaatttttccgaatccgaaaattggtccggacggacggaaagcatccgaaccactttcatccctaggcgtacgtggacggagggagattttattttaatggaaagaaaaatctaacattaaaattattgggttcaccaatttaaatgtaaatcgatggtcagattttttatatgatgtgtaatgaacttattaggagaggctagacgaagagctaaatagatctagtaggttaatgcacattttaggcctctattttttttaattttaattatcatggaaataaaaaaggaaaagaaaggaaacggagggatcgtacctacattgctgtgaagatgaatagtgcgtacgttgtggaggcgtatgtggacgaagggagattttattttagtggaaagaaaaatctaacataattattgggtccaccaatttatatgtaaattgatggtcagatttttctattttattaaagtgacatgtggcgactcggggagagagagagagagagagttcaaattaatggatccactagtttgaattatctacacttcaaatctaatgtttaagatagtaggtttctggaaatggaaatggacagtaagttgtttcatttcttttatattttttctacattaaaattagtagctaccttcagaaattattagctatagaatagaataggattatataggaaggagagatgtagtactagaggaggaagcgtacatactacgtgtatgtccgtacgtagttgtagtactgtgggccggtgggagaggggataggagggagttgggttgtgggcttctttttttaaagataatctaataataaaaaataatgggtccacccatctattaaaatgccacgtagcgattgaggagtatttatagaaataacacgtggcagtttaggaaagtttgtaggaagtttaatgtacttttagtatataatagatagataatagataataaacttgtagaagttgaattttaacttgcattttgtggattgatatattacatattgatctatcttattcatatttttttaattttttttataactatttagatgacgcgcaataaacgggtgtatgtccactcaagctgttaaaacagtttccctgtatacgtggcaacgtccttcgataagcagagagactgacttcctaccaaattttcttcccttgcgaagcgtggctgatacgcggacaaggctttaccatttttcaatgctatagctgttgtgtattaaccttcttgcgaaattagcttttccaatacaaaacccaaatgcgtgcgttattcaagaacacataataggttatttcaggcaccacgtttcaaggttgggcaaattgctaaaacagaaaattatttctctcggcgtcagcatttcatgagcataatgtgaccatgcagcttcaagaattcctccaatgctgtcttggacgaaccaccgtcctccagagttcgaccaatcatcccctgaatctgcttcacactctgtcgtatcttgtccgccttcgccgtaatccccatcaccatctccacgacctcgaccaccctctcacgctccagcgccggggagtccggccagttcccgcgggacacctccacgcacgcgccccactcctccagcatctgggcgttgaagaactggtccgccgtgagcggccacgcgatgattggcacgccgtgcgccatgctctccagcacagagttccagccgcagtggctcaggaacgcgccggtggacgcgtgcgcgaggatgctcacctgcggagcccacccgtggatgagaagcccaatgttcttggcacgcatcctctcctcgaacccttccggcaaccactcggcgctgaactcgcggccgttggtggtctcgatgtcaaacccgaacggcggacggatagcccaaatgaacggcctgccggtgagctccagtgccatggcgaggtcaaccatctggtcaggccttagcgagttattagacccgaatgagatgtacagcactgacctctcttctcgggtgtcgagccaccgcttgacgtcatcgtcgttatggtcaccgatgtgatcggagtgctccgtccggcgacgcactagagggccgatgggatagaccgggacgcccatcgttttccggagcatgcgcagcccggtcgtctccaactcctccatcgtgctgatgagaatcgcgtcggtgtcgtacccggccgatgtctgccggcggtggtgggccgaccaccggtccgtgccgtcggcgtggagtaggtaaggcggaagctgcgaccggtggacagtaacctccgggtggtccgggaggcagaacgcgtcgtcaccgggcgcacgcaggtgcggcaagtggttccacagcgagtggaacaccacgctgccgaacgcgccgcaggagacgaagatggcgtgcgcggcgccacgccggcgggcgacgtctgtcgtccacgcgaggaaggggtcggcgatgacgcagaccctggcaccgtccgctccggcgtcggtgatcaagtcacggacgaagctgtcgaagctgtcctgtagcgagcgcgactcggtggcctcgaacagcgtgatgaagtggaggagcggcacggcgtcggtcgactcgatgtctccgggcaggccgtgctcggctggcgcgaacggcagggcgtggaaccggaggtaccgcgtctgggagctcgaccggcggcggaggtcttccacgttgcgcggggtggagacgatggtgatgtcggccgtgggctgggcgtcgtggaggtgggcggcgagggagaggaaggcggagaagtggccctgcgccgggaacgggaagaggacgatgcggaagctgccatcgctgggcatggtgaacacgttgttctttgacttcgaggttctccactggaaggaaattaaatttttgctttgtctgaaaggagaggaagcacgacagcaccggtcggtgtgtgtgtggcaatggctctgggtggacaggatgaacgatagggtggggagcgaggctgggaaggatgcgcttggcagttggcagacaggctttgggatgaacgacgatctcgcggcgtggggcagttggtaaggcttccgacgcgggatggggcagggaagcaatggtgtcgtggacttgtcctttggtttcctgtccgtgagatcgtgacgtgaggtggggccgttggatttgatggtcggggtacgacgcagcgcgattccgggcagaaaaagggcccttgccctgtttgcgccacagggctgatgcgaatgcgagggaggcgtcggcgtcgctcgcggctcgggtgcgacgtggtgctttgcgtgcggcagcggcgcacggcaggctccggcttggagggcgggcggtggtcaagagcgggaccggaggcgacgtgatgggacggagtcgtttgcccggcgtggtgtggcgacgagtgcgcaggagcagcacactggagtatagcaggcgcggcgctgcatcatgctcgcggtcgtgggcgtgcgtcggcgcgagactttggagggcgaccacggtcgacacggctcacggcactggcgctacagtccacacgattgagcgcgagactggttcgtcacggtgtagcggcggcagctcgtgctgctacgagcagcggcgcaaggcaaaggcaggcatggcccgcatgggcgcacggcttggctggcttggctggctgcttgaccagcaggcgtcctagccggcctggcttggctgtgggctgctagctgtgctgggctcggccagaaggtggcgacctggcctttttgtggttgccccgactggtattttaagaataactagcaatagtgccattgcgttgcaacggcaaaaacaccgtttgatagtgttgcaccttgaaaaccttaaatctgtaaaaatcaagtctaatttgatacattaataaataggtagaaccgagtctaatttgatcaattagcataggatttaggatttagttctagatttatttttctagactacttaagagtttatccaacggactttaatttgaaaaatgtgagccacattgtttgatcaattttgctttcggcctaggtcttcccaagccggcctaaacttgagctggcccatcttcagcgagttagagtcaattcgacggcccgcaagctgagcagctgagcgcggccgacgtatgcggggacggtccgatgcacttccgcggtccattgggcgcagcgtaatcaacggcagcaacggcctgacgctgggcgaatctgagtcgtccgatttaatggacggctccaatcgtccccgcaccggatgaagcgccgaccggggagaggggcaaaaccctagctcccaaatccctctctcttgatcacatttcctctccggcgacgagcgagcggaacgacggagcgagcggaggatgtttttttttctttttcatagtacaagttttttttctctttttttgttttttctcacctttatttttctccaccgaggagtcggatttttttagagtcggacattttttttgtcgatggaagttttttttctcttcgttttttgttttttctctctctttttttccaccggaggagttggacttttttttttctgatcttttgcttttatcgctttttttccggtctttttttcacctgtttttttttgcgcttgttttttagaatcggaaagattccctttttatttcttttcgcccttttttttttactgcggaatcggattcatttttcttttctttttttcgcgatttggtttctcttttcttttttttcgcccggttttttcggccgttttgttttggatcggacagattctttttgcccgttttttttttgacagtagagaatagtggtaaaactaaattttaagaagaaatagtggtaaaattaaattttaaaaataaacagtgcctcagcactatacttgatggcgccgagccgaggttgaacatcttagctttcaggtgttatattgaataaaatctggtggcaaggctgtgattataatcgatgtggtgtttgatgaacttgctcgagctaaccgatccttattaggaccaagcgctcagatgaaattcaagaagtgttgtgagtttttctctgtggttttattccagttggtataaaatatactcatacgtcccataatatatatatatatatatatatatatatatatatatatatatatatatatatatatatattgacggagcgttggggctcctcaccgggagaccgcgcgggcccccctttgccggttcggccgagggcgctaggtgaggttttaagccctcgatctgtggaatgtttcgcgagagagcaaatgcgcaagacacgggcgatgtagacaggttcgggccgctgagaagcgtaataccctactcctgtgttctggtggatctatgtacgaaggagttacaaggagctggagatcaaaagagttcaaactctagagaccctctcactctttctctctacgagctctgctctcctctttcttctttttcagctccctccagtctgttagtccgtcagtcccctctcttggtaggcatggtcctccttttatatctcaaggggataccacatataccatttctacctacccttcttttgggtggggacccatcctactttgaccaaaacttggctcgtaccttcgcctgacaccgggataaccctgtccttccttcattaatgggcggagatttgcaatggctgctctccgaatgaccctccgatgggatgggtcataccaacctccactccgccggaagcaggtgcaacgtgggagcacggttgtttgctgatgacgtgaccggcgtcagaccagtcacaaaccggtcattcttgtctaccacgcgtcagtttagcatgccacccgtcagcccttcttcgtaaaatgacttccttgtaatggttgcgatgaagcctggtatgaatctagccgggactgacgtgctaactccaggagttcccacgccggctctggctagggacgagtgtctaggggctctcatcattccgacgggacggggcgaggcgtgcgaaaggccgcctgttgccacctaacccgcgatctgaccggtctgtaaccggtcacacactgtgacctgtcacggaccgaacgagtgtgctgcgctgcattaaatgcggtgtgggacgctcgtccaacccgcgataaacgcggttaggtgagcgccgctgtgctcacctaacccacacacgtggcgccaaacccacagggggtcggggcgccccagccctcggggtcgaaacgggagcggcccgacccctcggggagacagagggaggggcggccacatcaccctcgggcccgacccccccgagggggtcaggccacgtgggtgaccgcggctgccccaaacctctagtcaagataaccccggtcccatgtcaccgacagtagcccccggcgttatgccagggcgatcgccctccacgaggaaaacgctcgggcgtgacgccactccttaggcccggtgacaggtggggccggtctctacaggcgagcaggaatccagtggtcgcaaatcgcgcgcatcggcaagggaaaaccgaccgacaataatgagcggctttcttcaagaccgctacattacttgagtagcacgcaaatcgggacgagccggttcgtttcgcctagagatgtgatgatggtgcatcggttggcgagcgtagttaacgcgcgcacgatatgtcccatctcgactgtcacggccgcacatccgcctcgtgcgccgcaaacgggcgaacgggattagtggagtagtgggcgcgagaaacgagggggcgagatagtgggcgcgggaagcgaggagccgggcatagcgttggcaagggtataaagacgccaaggaagagattcgtttccttcctcttcgccattattccccttgccttcgccgcttgcgctctaacttctcgtttcctgtgccctaccctcgccgcactcactcgctctcaatcccctcctctgccggcgtcatggcacggggctccgcaccgctcgacggtagcgtgctgccgccttctcgcatcgtgagcgagaggcaggccgggctgccgcgccgattcatgccggaatctgccaccggccgggaggtggttgcgctgggtgagggacgcccggcgccacactacccggggcggtccgtattcttcctttccttcgcaatggcagggctggtcccgccattctcttctttcttcatggatgttctggagctttatgatctccagatggcgcacctcacccccaacgcggtaatgacgttggccatcttcgcgcacctgtgcgagatgttcatcggggtgcacccatctctccggctattccggtggttcttcaccgtacagccggtgtcgccaccgtcggtagtcggtggctgctacttcccgccgcgggggccggtgctgaaccgctacattccctgcgtccttcgcaagaagtgggacgactggaagagcgactagttctacacccctctcgccgacgaagcgcgcctccgacttctgagccagcccccggcgcaggcctccagctggcgggcgccggtagatctgggagacggctacgacgccgttcttgaccgcctggctagtctgcgatcccaggggctcacgagggccatggtgtacggcgattaccttcgtcgccggatcgcgccgctccagcggcgcgcccggggcgcctgggagtacaccgggtccgaggactacatgaggacccaccagggggtcaaatgggactgggtccctgaagacttcaaggtggtgatccaacgggtgctgaatctcagctccgtggaggcatccttcatcccccaaggtgtcctccccctctgcagcgatccagagcgcgccaacatcctgaccatcatgcaggcggtcggggcgtcaggggagcgggctcctcgaggccacgatggcgcgggcgggagccgaaggggggagcaatctaccccgggagggggtcgtgcttctgggccccgtgacgggggcccggggggcagccgccctgccgacgcccgggggaagaggaaacaggaggataccccctccccatctcctccccgagggggcggggcggtgcgtgccagcagcaggcgcccggagggtgctgtgccgacgtcgcagcccgagggggagcgaaaaaagaagcggctccgcaagataggggggaccgaaccatgccggggaaacctcatctcccccccaaggtggtcgtttagccgacctcctcgcaggttcgtccccgcgccaactgcggctgtattcattctcccatctcccaaggcaagtttttactcacccgtttttcatcttctggtttttcttctgcctcagcgagatcccgtcgcgcccttcccgccattccaagtccggccggtctgaggccgaggagacggcgaccgcggaggcccggaggcgggaagctgaccggcgagaagccgcagaccgcctccgggaagccgaggaagctgcccaggaggccgtccgggctcgccaggctgaggaagccgttcgggaggaggctagactccgccgggccgaggagtccgtccgggagacggaggcggcgcgcgcacgccaggcggcctgccaagcccccgacccgactccgcccgaggcgacgacgacttccgagtcctcccacgacgaggccgcgggcgcaccgctcgggcccgacccctcgggcgacgctcaggatgagccaacttcgggggacgtccccgagtccggcacgtcgatcggcaggccgagccgtgcggcatccttaccgaggcgactctcccccatgccttccgctgccccactgagcgcggagccccttctgcaggccttggccgccacgaacaccacggtgttggacgggttaagtgcccagatggaggtcctgcaggcagagcgggcggagctcgacgcggcgtgggcgcgtgtcgaagaggggcgacgctcggtggaggccatggtggagacgggccgcaaggcacaccgccggcacacctcagagctcgaggcccatcggagggagctggcggagatcgccagggaggtggaggaggagcgggagactgccctcatcgccaccgccgtgttcaacgcggcgcgagacgacttctacctccaatacgggagccgggcggcggagctagagaagaagctcgacgcgtcccggcagcgcgaagaggcccttgaggctcgcgccacggtgctggaggacgcgcccgcgccctgaacagaaggagagggaactggcgggtcgcgaggccgccgtcgccatccaggaggcaacgctggcggcgcacgaggccgcctgcgccgaagaggagtccgcactccgcctccgcgaggacgagctcactgagcggaagcgagctctcgaggaggccgaggccgcgacgcatcggcgggaggagcaggcgcgcctgaatctggaaggcgcccgcgccgagagggccgcactggaccagcgggccgctgaattcgaggcgcgggcgaaggagctggacgcgagagcgcgcagcggcggggcggccgcgggcgacggcgacctagccgcccgcctcgcagccgccgaacacaccatcgccgagctgcagggtgcactggactcgtccgccggggaggtcgaagccctccgcttggcaggcgaggtagggcccggcatgcttcgggacgccgtctcccgtctagaccgtgccagccggcaggcgggcctctggggcgggcggaccgcgaaatacgctgccaaccaggggggcctcgcccagcgcctctcagagatggccgggaccctccagcggctccccgaggagctcgaggagacgatcaagtcatcctcgagggacctcgcccggggggcgatggagctcgtactggcaagctaccaggccagggaccctgacttctccccatgggcagcgctggacgagttccctcctggaaccgaggatggcgcgcgcgcgcaggtccgggacgccgccgaccacatcgtccacagcttcgagggtacggcccctcggctcgcgttcgccctcgactctgacgaggagggcggtgacggtggtgcggacgacagcgacgacgaggccggcgacccgggcgcgtcggcgtgagcccccaggcccccgccaatcttaaatagctttttctttcttcttctgaggccttcgggcccccttcttgtataaactaattcaatctgcaatcaaataaagaggaaatttttgtgtcaactctgtttgttgtgtgtatgagacgagggtggtctgtgccgcggtccttctgtgtcttggcttgaacgagggctcgtgcccaggtcccaacctcaaatggcgcgggtcggggctagtgcctggggagatccacgtgtcgagactggccaggccgggaacatggtgaccgagggttatggatgacccgattgtgggcctttgccgattcccccccggagttcaccacgccccagggcacggctcggttctgggccccgtttggcgattttagccggcccgggccaccgagggtagggtcgagcacgagcgtgctaattcaagccaagattcttcaaaaggaaacgatggcacagacacagtcctcaggaaatcgaaaatgcttttattgaaatacggaagagaaaaaagataaggatatgcatgtggtagcccccggccaaccctgcacgccttgggggggcgcggggttggcccgagcccgagacctgacacccgacccccactaggggtagaagcgacgaaggtgttcgatgttccacgggttaggcagctctgtgccgtcgcccgtggccagccgaacggagcctggccgggggacgccgatcactcgatacggaccctcccacattggtgagagcttgctcagtccagcacgcgtttggacgcggcgtaggacgaggtcgtcgacgcagagtgatcgggcccggacgtggcgctgatggtagcgccgcaggctctgctggaagcgcgcggctcggagggccgcgcgccgccttcgctcttccaagtagtcgaggtcatctctgcgacggcctgaggggacctcagggtgagctcggatgggagaaccgcctccgtgccgtagacgaggaagaaaggcgtttccccggttgctcggcttggcgtggttcggttcgcccagagcaccgctggcaactcctcgatccacgagtcgccgtgcttcttgaggatgttgaaggttttggttttgaggccctagaggatttctgcgttggcgcgctccacttggccattgcttctggggtgggcgggagaggcgaagcagagcttgatgcccatatcttcgcagtagtcgccgaagagctcactagtgaactgggtgccgttatccgtaatgatacggttaggcaccccaaaccgagcagtgatgcccttgatgaatttaagcgtggagtgcttatcgatcttgatgaccgggtaagcctcgggccacttagtgaacttgtcgacagcgacatacagatactcgaaaccgcccggggcccacctaaacggacccaggatatcgagcccccaaacagcaaacggccatgaaagaggtatggtctgcatggcctgggccggctgatgggtttgcttggcgtggaactggcacgccctgcaccgccggaccaggtcaaccgcatcgttgagagccgttggccaatagaaaccctggcgaaaggccttgccaaccaaggtgcgtgaggcggagtgggctccgcactcgccttcatggatatcggcaagaagctcgacgccttgttcccgaggaatgcacttcaggaggactccgttagccgcgcgccgatagagggtctcttccatcagcacgtagcgcttggagatgcgctggacgcgttcactcccttcgcggtcctcgggtagagtcttatctacgaggtatgcctggatctcagcgatccaagcaatcaatctaggagagccgggaacgctcccctcgggtcccgaggcctggactccgacgggcctcgggggccgttcaggcgcgtccgtctcccctagggggtcgggtcgcgccgacggctgagcaagcctttcttcaaaggcgcccggtggggtctgggctcgcgaggaagcgagccttgagagttcgtcggcgaccgcgttatcccgtctgggcacgtgccgaagctctatcccgtcgaaatggcgctccatacgccgcacctggcgcacataagcatccatctgcgggtcagagcactggtactccttggagacctggttgacgaccaactgggagtcgcctaacaccaggaggtggcggatccccagtccagctgccactctgagtcccgcaaggagtccctcgtactctgccatattgttggttgcccgaaaatcgaggcggaccaggtatctgaggacgtcacagctcgacgaggtcaacgtgacccccgcaccggcgccttgaagagacaaggagccgtcgaactgcatcacccagtaggcggtgtgaggcagctgcgaggggcccgagctggcctcgggggcggagacgggctcgggagctggggtccacttcgccacaaagtcggcgagggcctagctcttgatcgcgtggcgtggttcaaattgcaaatcgaactcagagagttcgatttcccatttcaccacccgtccagtaccctctcggttatgcaagatttggccgagggggtaagacgtaaccaccgtgacccgatgcgcctgaaaataatggcgcaatttcctcgaagccatcagaatagcgtaaagcatcttctgggcctgagggtatcgggtcttagcgtcccggagggcctcgctaacgaagtagacgggccgctgcacctttcggcggggccgatcctcttcgctaggggccgcatctccagggcgctcttcgtccgagaggccgcacggggcgcactcggcttctgtgccgacgacctcggggtcggagggcgactggcgcggccttcccgcagtggccccggggccatcctgggggtcgggggcacttggcaccgttggacaagcaggcggagggccagctccggccgtcgggggcctcgggccgccgttcggctcgggggcctctcctccctgctctctcccgggtcgagtcgacacagggtggggatgcgcgaggtgagggttgtcctcatcgcgctccacaaccaacgccgcgctgaccacctgcggggttgccgccaggtaaagtagcagcggctcatctggctccggggcgaccaggactgggggagaactgaggtacgccttcaaatgagtgaaggcccgctcagcctcctccgtccagataaacggcccggagcgtttgaggagcttaaataggggtagcgccttctctcccaacctcgatatgaaccgacttagggcagccatgcagccggtgacgcattgcacatccctaagcttgctgggggggcgcatccgctctatagctcgtatcttctcggggttggcctcgatgcctcgggcagagaccaagaacccgagaagcttgcccgcaggcacaccgaacacgcacttgtcagggttcagttttatgcgggcggagtggagactttcgaaagtttccgctagatccgagagtaaggtctcttggttgcgcgtcttcacaaccaagtcatcaacataggcctcaacattacgtcctatttgactacccaaagaaattcgagtagtacgctgaaaagtaggacctgcattctttaacccgaaaggcgttgtcgtataacaataagttcctatgggggtaatgaatgcagttttttcctcatcctccctagccatgcgaatctgatgataaccagagtatgcatctagaaaacacaaaaggtcgcaccccgcggtggagtcgacaatctgatctatgcgtggcagggggtaagggtccttaggacatgccttgttaaggtcggtgtagtcgatgcacatccgaagcttaccgttcgccttgggaacgacgaccgggttcgccagccactccggatggataacctctcggatgaatccggcctccagaagtcgcgccacctcctcgcggatgaaggcttgacgttccggggcctgccgccgcactttctgccggaccggccttgcgcccggccgcacggtgagatggtgctcaatcacctctctggggaccccgggcatgtccgccggtctccaggcgaagacgtcggcgtttgcccgcaggaaggagacgagcgcgtcttcctatttgccgtccagaagaccactgattcgtgtggtcttcgacgggccgtcgcccaaggcaacctccttgaccgggacctcgtcgcacgtgatcatccgctgcctcggggcggctggaacggaggtgctgagcctctcgttgccaccctcgggcttggacgcggcggcgaggtggtccgcgcgctgctccatacaagcaagcgcgactttgaggtcgccatggacagagatggggccaccggggcccggcatcttcatctggaggtaggcgtagtggaccgccgccatgaacttcaccaacgcgggcctccccaggaccgcgttgtagggcagactgaggtccgccacatcaaagttcacccgctccgtgcggaagttggcggatccaccgaaggtgaccgggaggtcgatatgacctagcggccaagtgtaccccggcgtcacaccgataatcggttgggacggccgaagcaccatccccggggccttgatggcgtcaaaggctgcgggggaaaggatgttgagggctgcacccccgtctatgaggacacgccccaacttcacgttgcaaacggtgggggaaaccaccattgtgatctgtcctccccgggcaacgcacggcgggtggtcggtctggtcgaaggtgagggcaacctccgaccaccgcgcccgccgagtcgcctcatgggtaggggccgcggccagaagctctcgcttcatggccttgaggctccgacgagaagcgtgagcgcacgctcccccatcgacggtggcgatggtggccccaggctcctggaaccctaggtcatcgtcgccatcgtcgatgtcctcggcgggggccttctgcttggcctcatttcgccggttgccaaagggagccgccggggccttgccctcacggcgctcctgcctcctctcctcctcccacctcctcgtccgctcagtcaaacttttgaccacgcggcagtccgcgaggtcatggagggaggtgttgtgcacggtgcaccacttgctggtcgggcgctccctgctgggagcaccggcctccttctttttgtcgctcgcaggcctcccctttcgggtggcccgcgaagcgccctcgacggcgaggacgtgtccctcgtcgtcggaatgggccgacctcttcttcctcctcctgtcccgccgccctgaccgagcggtggatccgggggcggccgaagctgccacaccggaaccggtggagttccaggtccaggcctcctccttacgagccacacggtccgcgagctgaaaaagctccgcggtggtctggggctccttggaggcgatcttttcaagcatgcggttgtgccgcacgccccccctgaacgcgtagattaccgcgtgtgcggggatgcatggtatggtgttgcggacttgacagaaccgctgaatgtacgagcgaagagactcatcgtcccttcactgtaccgcatgcaagtccgcttcttcacctgggcgcggatatgtgccttggaagttcatggtgaactgctggcacaaatcctcccaagagtggaccgacgcgggcggcaagttcattagccaaccccgcgcctgtcccttcagggccatggggaagaagttcgccatgaccctgtcgtcacccccggcggcctcgatcccggtcgtgtagacctggagaaactcggcggggttgacgcttccgtcatatttttcggtgatggtgggccggaaccttgagggccaacggacgttccgaaggctcgccacaaaggctcgacagtcgacaccaccaaccgggggcacgtggggctggcccccgcgcccgaaccgaagtggcgctccggacgaggaagcgccttccgttgcgtgggcagcacgacgaccattgcgccggcgctcgatactgaggcgggcatccggccccctacgcacatcttcttgggtcggaggcgttgacgagggaatggctgacgaacggcgggtaacggccgccgctcgccgcgccctccgcctcgacgacacggagccggcggtagcagcgccggaggccttggtggcggaggaccgcccaccggcgcctaggcgctgctgcgccgtcatgaccaagtcggccacgtcatccagccaacgtcgggctggagtctctggatcggggacgacgggcgggtgacgcaagagcgcgcccgcagcttggagcgcgccctggggcgtgctaccatcgccgtagacgaggaggcgatgctccccgtctcgccgtccttctccatcgctcgtgggcggcgaagtcgcggatctttcaaccccctcgagcgcctcctcccgcctaagacttcggcgagaggggggcggtggagtacgagctcgacggcgcgggttctgctccccgtcgtcaccgctagcgctcggagagaggttgtgcgccactgcccgttcggccattgggctgaacgggagaagcttggcgcacacgaaagaggacgagagcttagaaaaacacacgcgccccctacctggcgcgccagatgacggaccgttggggctcctcaccgggagaccgcgcgggcccccctttgccggttcggccgggggcgctaggtgaggttctaagccctcgatctgtggaatgtttcgcgagagagcaaatgcgcaagacacgggcgatgtagacaggttcgggccgctgagaagcgtaataccctactcctgtgttctggtggatctgtgcgtgaaggaatacagagagccggagagcgagcgagagttcagggtctagaacccattcgctagagtcccaacccctcttcccttttttctccctccccctctcctctcctagcgagcgagagttcagggtctagaacccattcgctagagtcccaacccctcttcccttttttctccctccccctctcctctcctaggcctgggcctcctttttatctggtcaggggtcaccacaagggcctccagctgcctaagaaaggaaacatgctttttacaatgagggctagtctacagccggaagtgacctctgacaagcagagcacacgcctcctgcccccctcgccagctttcccggtggacgcccatttcaaccttcattcaatggccagcgacttccttgccatgcttgcgctgaagcctggaatggatctgaccgggactgacataccaactccaagagttagcacgccggctccggctagggacgagagccaggaagctctcatcattccgacgggacggggcgaggcgtgtgacaggccgcctgttgccacctaacccgcgatctgaccggtctgtgaccggtcacacaccgtgaccggtcacggaccggataagcgtgcgccgcgccgcattaaatgcggtgtggcgcgctcgtccaacccgcaataaacgcggttaggtgagcgccgctgtgctcacctaacccacacacgtggcgccaaacccacagggggtcgggacgccccagccctcggggtcgaaacgggagcggcccgacacctcggggagacagagggaggggcggccacatcaccctcgggcccgacccccccgagggggtcaggccacgtgggtgaccgcggctgccccaaacctctagtcaagatacccccggaccctcaattttctgttttatttcctccgttttactgtgtaagtcattctaatattttccacattcatatgaatgttaatgaatatatatatatatatatatgtatatatatatatatatatgtatatatatatatatatgtatatatatatatatatatatgtatatatatatatatatatataaaatatatagtaacactactacaaaagtaatttttttgtacgaggacccttatttttgcaaacggaccataactagtggcgtctgcaaaaattgagggtcatttttgcatgcggcccccttaagtgggccgtatggaaaaatcgattttcccatacggacctcttaagacagccgcatgcaaaaatgagctcatttttgcttgcggctcaattaagcgcccgtatgccacttaaggaggcgtatgtaaaaataaaatttgaaaaatttgaaactagtgtatctcactcatataaattctaaattaaatgattcttttttctaaatgtttctaaaatcatgctctatcatgttattgtgttcttactgctattattttggcctttttttcttgtgactttattttatcaattaaaattttgaatttcaaaatttcaaataatattttgaagcggtaattgatttcagctgaaaaagtcatcaacaacaaagttgtataactcatcaagatatataaattctattttggtcatttattcatccgacaaaaatatttgtaagattgtttacaaaatgtacatgtctcttatagttttataaacaatataagagatatgtacattttatgaataatcttataaatcactttgtcggatgaaaaaatgatcaaaataaaagttatagatcttgatgatttatacaactttgttattgatgactttttcagttgaaatcaattagtatttgaaaatgctatttgaagttgttataatttgaaattcaaattcaaactattcaaacaaagtcatatagaaaaatgaccaaaacaaaaattatagatcttgataagttatacaactttgttattcacaacttttccatttgaaatcatttattgcttcaaaatattatttgaatttcttatattttaaaattcaaattttatatatctcaatcaaacttggatggagaaatgaccaaaagaaaattggtagatctcaatgatctctacaactttgtttttgacaactttttcacatgagttcatttaataccacaaaattagatttaatgttcatttttatctagaagtctaatttgtctcctctccctctccaccgcttcagaattccagcaaccttatctccaaccttatcttctctccaccattatttctcctcaactccctctatctctctctccccctcacacacagcaaggtcgcggcgggcgtcggcgacaccgaggaggtacgcaggggcggcggccgagggcggcacgcactggcacacggcggcagcggccgagggcggcacgcggcggcagggggcgggagcggccgcctgcgtggatctgccgactctacctccctccgtcgtcgccggcgactcccccgccctcc

SEQ ID NO: 8291 - DNA, 16039 bp, Oryza sativa
tgacggagcgttggggctcctcaccgggagaccgcgcgggcccccctttgccggttcggccgagggcgctaggtgaggttttaagccctcgatctgtggaatgtttcgcgagagagcaaatgcgcaagacacgggcgatgtagacaggttcgggccgctgagaagcgtaataccctactcctgtgttctggtggatctatgtacgaaggagttacaaggagctggagatcaaaagagttcaaactctagagaccctctcactctttctctctacgagctctgctctcctctttcttctttttcagctccctccagtccgttagtccgtcagtcccctctcttggtaggcatggtccttcttttatatctcaaggggataccacatataccatttctacctacccttcttttgggtggggactcatcctactttaaccaaaacttggctcgtaccttcgcctgacaccgggataaccctgtccttccttcattaatgggcggagatttgcaatggctgctctccgaatgaccctccgatgggatgggtcataccaacctccactccgccggaagcaggtgcaacgtgggagcacggttgtttgctaatgacgtgaccggcgtcagaccagtcacaaaccggtcattcttgtctaccacgcgtcagtttagcatgccacccgtcagcccttcttcgtaaaatgacttccttgtaatggttgcgatgaagcctggtatgaatctagccgggactgacgtgctaactccaggagttcccacgccggctctggctagggacgagtgtctaggggctctcatcattccgacgggacggggcgaggcgtgcgaaaggccgcctgttgccacctaacccgcgatctgaccggtctgtgaccggtcacacactgtgacctgtcacggaccgaacgagtgtgctgcgctgcattaaatgcggtgtgggacgctcgtccaacccgcaataaacgcggttaggtgagcgccgctgtgctcacctaacccacacacgtggcgccaaacccacagggggtcgggacgccccagccctcggggtcgaaacgggagcggcccgacacctcggggagacagagggaggggcggccacatcaccctcgggcccgacccccccgagggggtcaggccacgtgggtgaccgcggctgccccaaacctctagtcaagatacccccggaccctcaattttctgttttatttcctccgttttactgtgtaagtcattctaatattttccacattcatatgaatgttaatgaatatatatatatatatatatgtatatatatatatatatatatatatatatacatatatatatatatatatatatatatatgtatatatatatatatatatataaaatatatagtaacactactacaaaagtaatttttttgtacgaggacccttatttttgcaaacggaccataactagtggcgtctgcaaaaattgagggtcatttttgcatgcggcccccttaagtgggccgtatggaaaaatcgattttcccatacggacctcttaagacagccgcatgcaaaaatgagctcatttttgcttgcggctcaattaagcgcccgtatgccacttaaggaggcgtatgtaaaaataaaatttgaaaaatttgaaactagtgtatctcactcatataaattctaaattaaatgattcttttttctaaatgtttctaaaatcatgctctatcatgttattgtgttcttactgctattattttggcctttttttcttgtgactttattttatcaattaaaattttgaatttcaaaatttcaaataatattttgaagcggtaattgatttcagctgaaaaagtcatcaacaacaaagttgtataactcatcaagatatataaattctattttggtcatttattcatccgacaaaaatatttgtaagattgtttacaaaatgtacatgtctcttatagttttataaacaatataagagatatgtacattttatgaataatcttataaatcactttgtcggatgaaaaaatgatcaaaataaaagttatagatcttgatgatttatacaactttgttattgatgactttttcagttgaaatcaattagtatttgaaaatgctatttgaagttgttataatttgaaattcaaattcaaactattcaaacaaagtcatatagaaaaatgaccaaaacaaaaattatagatcttgataagttatacaactttgttattcacaacttttccatttgaaatcatttattgcttcaaaatattatttgaatttcttatattttaaaattcaaattttatatatctcaatcaaacttggatggagaaatgaccaaaagaaaattggtagatctcaatgatctctacaactttgtttttgacaactttttcacatgagttcatttaataccacaaaattagatttaatgttcatttttatctagaagtctaatttgtctcctctccctctccaccgcttcagaattccagcaaccttatctccaaccttatcttctctccaccattatttctcctcaactccctctatctctctctccccctcacacacagcaaggtcgcggcgggcgtcggcgacaccgaggaggtacgcaggggcggcggccgagggcggcacgcactggcacacggcggcagcggccgagggcggcacgcggcggcagggggcgggagcggccgcctgcgtggatctgccgactctacctccctccgtcgtcgccggcgactcccccgccctccaacggcggcgcccacccccgcggcgacgacgacctcgggcagcgacgccaccgccatcccctcctcactgccgcggcgacgacgacctcgagtggcgccgccctgcgcggatccggcgccaagggcggcggtggcggccgatccggtgccgatgacgacggcgagcggcgggggcgacggatccggagccggtgatgacggcgggcggcgggggagacggatccggtgccggcgacgacggcgggcggcgtgagcgatggatccggtgccggcaacgacagcgggcggcgtgggcgacggatctggtgccggcgacgccggcgagcggcggtggcgacgaatctggcaccgtgcggcggcatgctagggtttgggatttttggattttattttttttgtttgctgaatttattttcgcatgtggctggtataagcaaccgcatgcaaaaataggattttcgcatgcggttgggccggccgcatgagaaaagggtgatttttgcagaccttctctcccatgaggttgcctcaaccgcatgatgccttttgcccgtatgcaaaaagcctttctgtactagtgtaacatctaagtatttaaaatttatcataaatataataccacctacattattttctcaaccgagatcacaactctctcctatttaatttttctacctacgtcttcttgttaaccaatcataatccaccactattcgatttcacatactttttatagttctcatgttcaaacctagaacttcttatatttggaatgaaggtagtaaatgcctatttacttacagataatcttagatgcaatcatttgtataattgtatgtcatctggtgtataattacatttaggatctatttggcagggctccaactcataaaattaactttatgaattgggtctaaaatatagttgtggagcagccaaaaactaggtctatttttctagtttattttgtgagagcaatgtagccaatttcactcccattttgaatggagttgaaactgtttggttgggctttagcttcaagagctctaccaaacagacccttaattcttgttccaatattaaagacatgtcagttgtaatagattaggcctaattagggatggactaggagcgtaattgaggaatattggatccggtggttacacaaatggagcaaacatgctgtgtgtggtgggcaaaagtggaaggaggacgatccaccagcgtatctaggatttacggtatgggtggtccgactaaaaaaaatagataaacaccgtaaatataataatgctaatatatacgaagtagactacaagtacaccatgatatattaataagacatcttaaaaacattttaaaattaacagttaagtaaaattttgagttagagaagcttatatacctagagaagtttgaaggagattgctatacaacaaacgaggacgaaggcaactcagaagcattcttctttcatgaatgtttccgaaaaaaagatacaatattttcaacaatagtataatttaacatcaaaactcagaagggttaaaactaaaaattaagagtaagtgtagaggccttaaatacctttgcatcgaccgtccatccatatacaaccataaaatagacactgtagtccaaagttggacaaaatgctaaaaatagtaaattattcctcttggtttcataatttcatgggcatagtacgatcccgcagcgtcagcaaggcgaagaattccttcaatgtgttcatggacgaaccaccgtcctccagtgctggagcaatcatttcctgaatcttcttcacgcactgtcgtgtcttggccgccatctccatgctccctatcaccatctccacgacctcggccaccctttcacgctccagcgccggtgagtccggcgcgttcccgcggcacagctcgacacacgagccccactcctccagcacttgggcgttgagtggccacgcgacgacgggcacgccgtgtgccgtgctctccagcaccgagttccagccgtagtggctcaggaacgtgccgatggacgcgtgcgcgagaatggccacctgcgggagccaacccgtgaatgaggagccccgtgttcttggctcgcatcctttcctcgaacccttccgggaaccactcgtctgtggccccgctgatatcgtcaccattagtggatgaggagccccgctgcttctgtaaattcatagtcccattcccagcaaccccatttctagcatcaattcacatattccatcacagccaattcatatagacccattcccagcatcatatcagccaattcacattcatattctatcacagcacagccaattcacaaaatcaaacacatatacattcacatccacaacccattcacatatatgtcattcacatccatttttctctccaaaccgccgacatgcatcaaaacctgcaaaaataagttataaattggaacaattttatatgtaactagaaatgcaagtatatacagagacgagctacctaggactttactctgaagaatataattgtattacaaagaatatttacaaaaatcaaatgtttgtctcatatgcattgcaaatgttctgccattccgagacgagctacctaggacttcactctaaacatccctttcgatgacaagatatcatctagtatgaattgtgctatctcctctctaatgatttcgaagttgatttccggaatccttgaaataaattcctgcatgttcggcgccaagttagtctacatacttgtaaatttgtcgtcctatgtgtgtataaacaattgaattacacacctcagggtcgagcaatgtcaccttgtctgcgaagctcctcatgttatggcagacatggaacccacactggtcgctaacttgttgacgtattgggaagtctttcttgtgaccgagtttgggatgcccatccttatgcctcccgcctcttgccacgtattggtcccatgcctcgttcaaggcagattcgatggccgaccaatcgtatatttctggcttgatattggagttaaggtagtgtaccaaactccacttcggcgttattaccagaagaatccaatgtcgcctgcgaaattattaaattgccagttacatactacagttgtacgcgttgagtatttgagtataagtacggtacacgcttactattgattgtaggcgcacataatgaagtccttgtcttgacgggcaaataagcagtccttgatataggccaccatgtttgctcgatcgtttttcagcattgtctcgttgacgacagctggatcgagtaaggcaacatggggtgctttacgatggacatgcttccaggttaacctacgagcaagacaagagtcagggtaagtgtaatttatggacagtcactaccatatcgcgtaccaagaaatacttacaaggagtagcacttaaggaggttggtgtcgatcgctcgcaccctgtagaggtcccatagatctttgaagtctacggcgatgaaggcagtaggcccgaggaacggctgaccatcgtgctggcccaacatggaggtctctctattcttcctccttgcgttggacttctccatgtagtacccgtgcaacaccttgcatgcagggcccatcttgaataaggcatcgtctccgaccaatggcatgcccaatgtgaattcggctggaagctttggaggagctactggcgccttgccaagatcaagcttctttggggcaaatggcacctttatttttcctctccccgttccagcagcttttctgcgtgtgtcaagcttgggtggagaagatttcgccctcttgctccttttggcaggaggggggaggtgcggcctgctgtcaacctccataccgtcgtccccaaaatcagtatcatactgtaattggagatcttcatctctttgttcaacggcaggagggagagatacaacagtttgatggggacgcgtcggcggcggacgagaacttggcgctggccttggagttatattgatctcaatgctgtgcttgggccattgaataaaggtcccacgtgcagccccaagggtcagaatctcgtcattaggtgtgtcggtgacatggggccgggggtatcttgactagaggcttgggtagccgcgatcactcacgtggcccgaccccctcgggggggtcgggcccgacggtgacgtggccacctctccctctgtctctccgaggggtcgggccgctcccgtttcggccccgagggctggggcaccccgaccccctgtggtgattggcgccacgtgtgtgggttaggtgagtacagcggcgctcacctaaccgcatttatagcgggttagacgagcgcgtcacgccgcattcaatgcggcgcagcgcatgcttatccggtctgtgaccagtcgcggtatgtgaccggtcacagaccggtcagatcgcgggttaggtggcaacaggcggcctgtcgcacgcctcgccccgtcccgtcggaatgatgagagcttcctggttctcgtctctagccggagctggcgtgctgactcctggagttggtatgtcagtcccggtcagatccattccaggcttcagtgcaagcatggcaagacagtcgctggctattgaatgaaggttgaaacgggcgtccaccgggagagctgacgagcggagcaggaggcgtgcgtactgcttgtcagaggtcatttccggctgtagattagccctcattgtaaaaagcatgttcttttctgaggcagagagaggcccatgtggtgacccctaaccagataaaaaaaggaggcccaggcctaagaagagaggagggaaggaaggggaggtcggacgctggcgacttgatcggagagcctgaactctctctcgctctcgagctctctggctctggagctctctgtttaccttcacacacagatccaccagaacacaggagtagggtattacgcttctcagcggcccgaacctgtctacgtcgcccgtgtcttgtgcgtttcttctcgctgacattcctcagatcgagggcgaagaacctcacttagcgcccccggccgaaccggcaaaggggggcctgcgcggtctcccggtgaggagcccccacgcaccgtcaaggtaggtgtgggatagtgtagccaacccaatcgggcttcagtaagtccacttgaactttggcattgccggcttgcagctgcgccccgtgcactcgggtctccggggtaggcttgaatgcttgaccctctgcggcaggaattgcaaatcctggtgtcaccctaacaactagggtacacgatgtgggttcctgcaatagattcattagtgtccttagtatatgttgcaatgtattgtggtgctaatataatatatgcgttattaagttgtttttaccgttatgtggtccaccgtggcggggccttcaggctgttctgccggagcctcaattgatgcgcagctgctacgcctctgcgtggggctcacttgtactatgggaccaggagtggcatcggtcgacctatccctgatgcgtgcctccatccgagcctccatacctaacagctcggcagtgagctcttctctaagctcttctttaagctcctcccgaagttgggccttaatgcgtgcagctttctgcgccttggaaagcttgtgcttcttgtactgccacacgtattggggaaacccaaacttccatggaacattggagccaatgccccttgttcgtccacggtgttcttcgtttcccaacgctttcgtgaggatgtcatcctcgcgtttttgtgagcatacctcttaggaggcctgtctctcagcattcagttcgacctggggtacacttaggacactttagacgaagaacaagatacaacataatgaaacttattctatgtgttcaacttacgattttctggtacaccacttgatcttcgggatttgggaacgaaagagttccgtcactattcttcttcacccttgcccttgcccagttccttgcccgctggaccgggatattagcaagcacttgcggggtgttagattccgctgcagcttcatcctccttgtcccattctgcctgtttccccgcgtagccaccggtgccaagccagtgcgggtgaaggttccttgcctgcagatcacggtaggtctggctttttttccgagactctttccatgatttggcggcatggaactcatcccacacgggttgggtgatgaatggatatttcccaaatggttctggctgggcagggttgaggacgtactccgtgaccagcgttgtcttgaaatttttccaacaattccccatcttgcggatagcctgccgcttcagtcctaccgcggcctctgtaggatatcggaagctttccttgaactacctctaggcctcttctttttcttcttgagggaccaaatcgatgtggtccttcagaatagtgaagttccgcctccctaggactccgcatatcgtagggaactttttgacagctttcgtcggagccgtcggatatccaacatcgtccacctctgttatggtgtagacttctttaggaatcttattctgggtcctaggattccggcacgatgtagtcccagaagtggtcgttgacatcggttcgccttgctgcgacatgtcctatgtcactgttgtacggggagaaagtactttttaaacacaaaattgcatccacacacattctcttatggtttgatatacctctatatcctacctacattcgcctcgtcgacgaaaccatagcatccatgctcaatagggctggagcagccgggaactcgacctcgacatcagtataccactcgaacttgctatcaatgtcactgacataagatagtggcaacggtagcaagttctagtgggatatggatgtcgaggtcgagatcccgtctgctccggctctaaggagtatggatgctacatatctgttgacgaggcggatgcagatagaacacacaggcaatcaaaacccttcctatccaagatccctaacgttatcatcagcaaactcctagattgcatccaagatcatttcgttatggaacccttattcccatagatacagcaaccatctttggatactgaatttatgggaatggggttccataaagaaatgacgttgaaaacaatctaggatgttggtaacgataaaagatttctagaaatgatgtatttgaatgaaatgttctgtttaccaatttgtcttggtcggtaccgtgcaggcagtaacccgaccaaaccagatttggcaaccaggacacttcgtattctcctaaatgccataatttcagtaacttcatttaataacatatttctatgcatatccatcccatttccctcaaaatgacccaaaacagcccatactacacaagtcacatatatattatttttgtacctaaaaaaacacaagtcatgacatataataagtttggcctcaattttgctcagaaattatgcttcaattatcatcatttgcaactgcccccacccccaaaagaaattaagaacaagtgtagagggtctatccttatgcaaaaaagaaacagccatataaaaacagccataataattcaaccatcacaacccacatcaattcatccatcccattggaccaaaaatatcccaaaaattttgcaaagaaccatataagaacaagtctagagggtctgtccttatgaaaaaaaacagccatataaaatgatcccatattgccactccccccaaataaaatgaacaagtgtagatggtctgttcttatttaaaaaacccaaaaatcacaagtgtatatggtctgttcttatgcattaaaaacccacatttgaacctaaacaagaacaagagtgaggctggcccaaaaatgcatccattttgtaaaacatcccatactgccactccccccgaaataaaatgaacaagtgtagatggtctgttcttattgaaaaaacccaaaaatcacaagtgtatatggtctgttcttatgcattaaaaacccacatttaaacctaaacaagaacaagagtgaggccggcccaaaaatgcatccattttggaaaacatcccatactgccactcccccccaaataaaatgaacaagtgtagatggtctattcttattgaaaaaaccccaaaaatcacaagtttatagggtctgttcttgagcaatcatcaatggccattcatcataaatacatccatcacatcccacaacatcccaagatggcatttcccccaaaaatcacaaattaattccatcacagcccactgcatcccaacatggcatttcccccaaaaatcacaaattaattccatcacagcccactgcatcccaacatggcatttcccccaaaaatcaagcaaaattcatccactgcatagcaatatctaattcatccaactatacaatgcaaaaaacatccactgcatccactgcatccatacatctaattcatccatacactgcatccacaatgcataaaaaaaacgagggagaggaagcgtacctaggaggagaagaagcggcggagaggaggccagtgacggcggcggacttggcgtcgggcttgacgtcggtcttggcggcgggcttgacgtcgatcgctgaagcggccgtggcgtcggtcttgacgacttggcggagaggaagccggcggcggcgaacttggagaggaggctggcggcggcggtcttgggcgtggaggaggcgctggcggtcggggagggcggatcttgaacctggaggcggcggcggcggtcagtaaggccggatccacgactatggaggaggcagcgatggatattgaaccgggaggcggtggcggcgtcgaggaggaggcggcggcggtcgggaggcgacggcttggaggaggaggaggcggcgtcagcggtggcggaggaggaggaggcgacgacggcggtggatctgagagagtgagagtgtgagagagtgagaggcggcgtcggcggtggataaggacccgtggatgaggattgactaagtaaaccctagtcaatcctcatctctatcgggcagactattatacccgatgcagatgacactcatccgtgacgggcgttagtactctgcccgatacggatgatacctatccgtgacgggcattagaactaagcccgatagagatggaataatctctatcgggcatagtactaaagcccgtcacagatgacttattaaaatattttgaagttataaaaatcatttataattatcttctacccgatttaaaattgctattacatttgatctatcacatataattaacaaatgtcttatttacatagtttaaaattcctattaattttttaaattcatataattgacaattgcctttctcacatatagtttaaaattcctattaatttttttttaaaatcatctaattgacaaatgcctttttcacatatagtttaaaattcatattactttttttaaattcatataattaacaattggctatctcacatatagtttaaaataacaagtataattttttaaaaccacataattaacaaatccatttcttcaaagagttttaactcgaatggcatgaaacatatgcaattcattcattaaggctccaatacaaattaaatacatcattcacagtgatatgccttccgaatggtctgaacgaacgtaagccacttcgtcttcgggatcatcgtcaaggtcaatctgaggtctgacatgaagattcttgttgtattcttcttcatcggcaacattgtccacccccacaattcttcgcttgccatccctaacaacgtacatcttcttgtttacagggtcttttatgtagaaaatctgttcgacctgcttcgctagtacgaatggttcatctgcgtatccaaccttggccaggtccactaatgtgaagccttccttgtcaaccttgacacctgtgcagatattcacccaactgcaacgaaacaaagggactatgaagttcagatagtttagctcccatagctgttctatgcggccgtagtatgtgctcgatccaacctgatcctgatatgcatctatacggattccactgttttgcactgtgcttttctcatcttgtgtgacggtgtaaaatgtgtattcattgatatcgtacccttgccatgtgtcaacatcccaagatggaccccttgccaacctttgtaatatctcacttgggccatcggtcgaccgtgctacacgatccttgaaccattcgttgaagcgagcaccatgttctctgttgatccaaatatctgatcgaccaatattgtcctgtcggaccttcgctaaatgctcctcaaagtatggggttacttcagccatatgttgcagcactgcgaaatgagcttgcgcgtaggaagcttgatcgggaacaattctttttctgccagttgtgctgacacctgccaaccttccttcatggcgagacgtaggaactccgataggatcagtctcggccacgtaatcgatacaaaactcaatggcttcctcggtcgtgtcaccttcaatgatgctcccctctggttttgctctgttccgaacgtaggacttcagaattcccatgtacctctcgaatggccacatttctctcataaaagctggcccacatatttttgtttgcttcactaggtgaacagtgagatgaaccatgatatcgaagaaagctagtggaaaatacatctccaagtgacacagggtactgacaatatcggtctgcaacccatctaggtcttctggatctataatcttctgaccgattgcattgaagaaggcacaaagccgttggatcgtgtgacggacttgtggtagtagaatgcctcttatagcaactggcaagatctgtgtgattagcacgtggcaatcgtgagacttcattccaaccagcttaagatcctccaatttaacgtacttacttattctcgagcaatagcccgaaggaactttaatatctgccagacatgatagcattgcgatcttctcatccttcgacaatgtgtggcaagctggtgggaggtacactcttcccatcttctcatctgtaacaggctgaagttcactgcgaatgttcatctcctgtagatcgagacgcgcattcaacccgtcctttgtcttgccaggcatattcaacaatagccccagcaagctatcgcacacattcttctctacgtgcatcagatcaatgcaatgacggacctcaagatcttcccaataaggtagccgccaaaatatggattttttttcttccacatcctcttcttgtcctccttgctacgttttcttttcttcccaaactcattattaatgtccttcaccatgttgtgtacttgatctccggacaaatccgcaggggcagacccaagttctttcttaccattgaaaattttcttctttcttctaaaggcgtgccgtagggggagccatctcctatgacccatgtaaatcatctttcttgatttcttcagccacctactgcatgtaggttccatacagtcaaagcatgccttctttcctttcacggtttgtccagaaagataacccagcgcgggataatcattaatggtgcagaacaatagaactcgtagtgtgaagttctcctgaccatatgcatcccaagtttccacaccctctttccacagaatctcaaggtcatcgataacaggctccaagaacacatcgatgtcattgccgggttctctcggaccttggattaacaagcacaatataatatatttccttttgaagcacaaccatggcgggaggttaaagtttgcaatgagaactggccaagtgctgtgagaactgctcatgtctccgaaaggattcatgccatccgtacacaaatatatcctcatgtttttggggtcgacagcaaagtctttgtgctttcgatcgatattcctccattgaatcgaatccgcagggtgtcttagcaaaccgtcattccttctctctgtggcatgccaacgtactaactttgcttcattggggttggcaaatattctcttgaaacgatcaatgattggtagataccacacaaccttcgccggaccaccccgctttgacttctttccctcgcccgcgctcttctttcgcttgtatcgagaagccttgcagacaggacaagcatctaagtccgcgtattgcttgtggtacaatatgcaatcgtttggacacgcgtgaattctccggacctctaaccctaggggacacagaacctattttgcttcatatgtcgtctcgggcaatgtgttctcctgaggaagcatgtccttcagtattcccaaaagttttgtaaaactcttgtctgaccatccactactagccttcaacttcattaggtctaatgttgctgataatttggtgtgctttggcttgcatcctgcgtatagaggagtctccgagtcactgactaacctgctaaacttcatgaaatctctctcgttcatagctgggtcatcaatgtcacgtaacatgtcttgcagcatatcaaggtccacatcaaccatttcatcgcccaatggagatgggacaaacatgtcatgctcttcttcatctccttcttcatgattgtctgcaccacttccgtctgcagctgcaccatcagtacccagatcttgctctccatgcatcacccaacatgtgtatctctccatgaatccccagcgtatcaagtgagcgtgtacttccttttcatcttcccacaaaatctcattcctgcaatcgctagatggacaacacatgtacttgtcgtttcttcttatcctatcctcctctgcggctttcataaaacttaatacgccatctccatactccttgtactgatgcctcaagccaatcgtgtacatccaactccgatccatcgctgaacaatgaacaaaatattagttaacatctcataacataagtactactaaattaataggaaatgtttagtacccttttacttacttttatgattttcctgtttttgtttgcaaaaaaattacaaaaactcgcccccttcaacctcccaccaaaatagtgaacagtgggataaactacagacaacggattgctggagtatatatagtgtgcaaagtatatctcaatcgggccaaaaaaaatgtcatctctaacgggcgcacactagtctctaacgggcacaaatagaaacccgacacctataaaagtcatcggtaacgggcattaaggccatctcaatcgggccttctttggagcccgtcaccgat

SEQ ID NO: 8292 - DNA, 13450 bp, Oryza sativa
ctgccggccgtggaacggcgacgacgacgacacgttcagcctgtactctggcagggcgtgcacgtacacggagtagagcccctcgtgcccgtggaaaaaccgctcccacagcggcgcgaacggcagcggcccgcgcgtcaggaacaggaacgccaccttgggcacgcgctggtacgggtactcctccacgcgcggcgccatggacgcgcgccagaacagctcctcgtccttcatcgagtgcccccatggcgggtgcggttgcacgaaccgctggaagctcagcgccgcgccacacccgtcgtcgcgacaccgtgaccccccttccccgccgcctccatctccgcgccgcgcctccgcctgcttgccgctgccctcgacgtagtagcaggacaggctcgcgctggtggccaggccgatcagcacgccggccatcaggatcagcagcgccgccacggccttgaggagaatccccaacgaccagcaccactccttccgtgtcgccgtggggaggccgccgctgccgccagatccctcctcctcgtccccggcgctgctccgccgagacttcagcaatcccggcttcatggcggaccacgaaccgcggcggccggcgacacccgcgtggagtaggggcgattcgatcggatggacgacgatgactgctcaccgtaggcgatggccagatgatagctggcgatgtctgcccgtgcccggccggccggagatggtgcccggtcgtcgttgctccgtccggtggtggcaatgcaacgacatgcacgcgcggacgaacactctgggcgggcagctgctagcgattgcgaatgcgaatgcgatgggagggaacggccctgcgtgcgtgcatgtgtctgcgcgcgttcctcggctcattggccctctctctgccttgccttcccttccctctaatttaatttgcacctctatttatttttatcttgggaaaggccatttaatttacctctatgtcatctcttacatactagcatccaaatggtcataacaaagttataagatacaccatttatgaataagtgacaaatcgtctttttcaaataatttcaaaacatttcagaaacgttaaaatattaaattgtattttcaaaatatttataatttcttaaaaaagtatggcggcactaatacgcgcgcaatgctcgaaacagtagttcgagcgccgcacaacgttccctccatccggtttttttcgttttttaccagcccacttttcctccgtacaccatctttccctgtctgtttttttcaattttcaccaccttaccttgtgtattttttttcttctttccatctcatccgtgcttcatcaaagggtccgataaaatattaaccatccagatttttatattttctcgttccatctcttcagatttttgtgttttctcgtaaaatatttaccatctagtttttcttttcgagttttctatttttctactgtctccccacatttcaaaagtaaaaaaaaaaatactatacggagttttccatttgctcccaacctcctagctctgcaccttcaaaagtaacaatttactcctatgaatgcatcatttaaaagtaacaaatttacttgcatgaatgcccccacatcgtttggcactgttcctagatcgctataaaaaaatattaccagtgttataaatattgtttaggcgtcgtagtctacaagtaaaacaattactaccttcctctctatatagcccatgttggcaaggagttaactctgttccttctccactaactctgaaccctataaatcaaagccaattctagccaatgttggttatcactgctcgggctagcaccccccttgaataatcaccaacattcacacgaagcctagaacagatggggagcatttaggatttggactagagggaataaagtgggcgtaatggggaatgagagcgagaagaagaacctggagtgcgccgtgggaagatgaccatcgccgtcgatgccggcgcagcgctggatatgccagttccttcccccacgccagtcttgagttttgtttgaaccaaaaagaaaaatcccgacaacttgtcccagcgtaaatgagatagacgcgagtgattgcgcaactagaaccataaaaatagctagtcccgtctggacgggacaccggtaatagcatttccgtaaaaaatacatatgatgtattttaaaacggatgattgattacttcattattagtctcccgcaacaaacttcatgtttgtttgtgatatgtctaaggagcctgatgctctagctaatgcatcagccgttgttgaacagtctggctcaaataatgatgcgaaatttgttgcttttaatttgggtgcaaaacacggggaaatgataaggccaaatcaaattatttaggtgggctcattatgtgtggagattgttccatgccaagagtttggccatgcttaataacttaattaagcatctaccattagtaacttagccgctacgtgatatgtttatgttaaaattttgtacttgagaggtgttctggttgtttctttctttcattttttttttttgctatatgcattttatgcaaaggccagggtacacagtgattcaatttgattgcatcatctttatgtaattaactgagtctaaataaagtttctattatctaaaaaggtaacttagctgcaattttttaatatttctgcatatagcttatatagatgagtttagtcagagttctcgttgtgtacgttagacgcatatacatgggctggcctacgtgccacatacatatatattggccttttcttttgtatcaggttagttttttttttttgggcggtgtttaccgtcgaaagaggtatctaccgaggtccatggcggcgaccccgtcgttgctttcttgaagttgtgcctccacattggtttggtgtggagaataactttgtaaaagtcatattttaaagctgaaaaggctattatattttttaaatatatatttttgatataagttcttatactttattcttatggcaacgcgtggggttgtcgactattactataactaggacgaaagcccacacacatgcatggacatattactaaatgctatataacagtagttactctaaagatgtgaatatttatttatttatttattgacaaaaaccgcaggagagactatgcacatgttgagcaaattcctccttaaaatgaaacttccaagaaatgaaagttggattaacttttctaaaactagtaatatgcccgtgctaaacgctacggtgcaattcaaattgtctttaataatttttaatatttcatgttagcaaaacaaatatttttatgatcatattacgtggacagaataaatctttacaataattagttatatataataatttcagtatacaatatacttcagtatacaatatacgagggcaatatacgcttaaaaaatatgttaaaaaagtatagagttgttccattatttgttgcggacacaaaatagagcatttaatacatatatataatatactaccctgtaggtaaataaccatcctagtgtttagcacttgtgacacacttcagaaatttttcttccccgtactacaaattgttaagagatcgtgcaaatttagttaacaaaagtcacccgtttctgtctccataacctgcaataaaagaaaccatgattgtaaaaaatgacacagcaattttcaattcattcatttcttccaaggttcatatctttagtctatttcccatgaaaatcaggaaccacatgaacaaactatttaattatatcattggttgtaaaaaggtcagattcgacatatggaaagcaagaagagcttaaatgtaatatggcgtgctaacactacatacaccacaatttagtaaagcattaagtttttctaatttgatagcatctgacgatgtcacaatcagagcaaaattgacacaactgaacgtctggtatagatccaagctgaaacatcactcatgtcaatggagaatatgtatggatctaaattctgccaatttatgaagggttctacaaccatgcaatatttggataccaaacctaatatcaaatttactggacacagtattatctgatcatgaaagactgaagatatggaaagtagttagagctgactaattaaactaatcatggacatgattttacggattaacagtctgaaactactctaacaaccaaaccatgatgaattatgaactgtgatatcttaacagataaacatatgtgatgaacgagagcaattgtttttattctaaattccagcacatgcaaaaaaaaggaaaaataatatcttctaatatcaatcaatcaaggaaaataggaaaaaaaagagagaagaaactgcttttaccttcaattgaggcatgaaccaaggatgtcgactggaaacaacaggatatgggcacaggagagctctgattggcagggttacgcatggcaatctgctaaacttgttcaaattagcgaaatttctgagaattgaaaagaagctaagacatctattttcagttatttacttgagggtagagaagagcaatgcaaatagaaaactatatgagcctaaaacatttcatcccaaaatacaccactgaatcttgtctagtaatttgttttctcatccttctccaattcatggcattactaaatgaagtttatcttccaaaaaaaaaatactccctccatactcgtaaaggaagtcgtttaggacagcgacacggtcaccaaaacacaactttgacttcttaaatctataaaaatatttattgaaaagtgatatatgtatacttttatgaaagtatttttcaagacaaatctatacatataatttttacattttcaaactcaacaacttgagagttattcatgatttatattcccaaggtttgacttaaacattgtcctaaatgacttcctttatgagtatggagggagtattgatcagtggttaattgggttagcttgttaacatgaaatcaacaataaaatgatatgattgggccagccttactattgaaaccaagaataaaatgatatgatgggtgaaatggtctatttcctatgacatttctcaataatactaatctacaatttggctgtcattctatgaaagattggaagtgagaaagcacctggaaagagaaaaaccaaatcatgcgaactcttagttccaaaaatgcatggttgtaccttcctgatagtgtttttattttctggcagggctcttaataggatttgaacaattgaaaatggccatgcgtgtgcaacaggaaatgtaaattcagtatgaaccccacaatagatacaaaggaagaatctgtatagcaacacttctgaacatttttgaagatacaaacgaaaatataaattcagtatgaacccagtaatagatcataggttagctcttgcaaagtacaagtacaaagaaaatcagaggaacaaagatccctcttggaattcagaagatctactccaatattcagaatgaccaataataattcaaacagtagatctcagaatcaactttttgtacaatacataatatcattaggtttcaataataaattatgagaataacattttttttcaaactaaacagtagaccaccatatttttatcctaactgaacagtagaccacaatatttccatttcatctttccccgggacagcatatgctttctctgatacggcatgaaaagaagaggactaatggttgaaaaatctaaaatttgcactggaaaatagaagtgaatttgacaattggcatcacacggaaacactttattcaatcatccagatccatttcaccccaaatccaatcattttacttttctatcaaccaacaaaacggtcacagtgcacggcttcatatggcacaactacattatctagaaacgtcataactcaaggaaacatctatcaccttgagaagaggttgacggtgctgcataaatgaaaatatacatgtcacatttcagttaaaaaaaagtgttctttcagtccaagttgcataaacacaaagtcaggaattgtaggattttgtaggtacagtttaatgtttcttaaagatgaactgacattcatttactcaaatcgtaggtaaaatctgaccccgacgcaagcacaattcacatgctatcttgcgtgcaaaatggaaaccttgacatggtagtgctcacatgctgttgacatcaataggaggaatagagagcaggagatagagtaggcagtgttttacctgtttagtaaatagtcttagggaggtgagtgcgccatggacgaggttgccggtggtgtagtctgtgccacgtgaaggattatcccgtgccagggcaaggcacagagtatcttggcaacagatgcagtttcagagtcttgacggcaaatgcagttacagatcgcggatcaacagatgcagtttatatagtcaccttgatatgccttaggagatctttcttcaaagcctaaatcccagtgacgctgacctatttttaacatttacctcatgaggaaaacaggaatccacaaagcaatgcatacataaagcaaaagtcaagaccaaggacaacactttaggttttacatcaacttataactcacaaataactacaaaaggtgcatgcatgcatgtagattttactctaatctagacaccaaagtgttgcatctgcattttctgtcttaaaatgctttctttttcgctgaatagtagccactgatgcaatacaaggatcataatggctccgtggttctcacttcctagtggggccctgcatttcaacaacgtcatgtcctaactcctgatcttaacaattgtctaaaccatcttaccttgactgctgggatctcacattgtgacacaaaagagagagatcattatattttctttaaatagcaaatatgggataaataaatgaataaagttcagaagtgacactgccatggcacaacccacagcagacggtcgcccgctcgagggccgcctcgcactccatgacaaggaaccactactacggaaatcagtataggcgccggttaggaaccggctatagatgacggtttccccgccggcaccaattggtgggcacctatgctggttttagaatcggcagctacagagattatagatgccggttattacccccaaccggcatctatgggttagggatttttttttaaaaaaaaaaacgtcttcaaggaatataggaactgaagcatcccggtgatctcaccacaatcagaagcaaaaacttactccaaggaagcagaaacttgtaccatctcacaacaatctcgaacccaccatacatacgaagtagaaacttaccactaatcatcaatctgatgagctgctgctcctcatgaacatcccgcgcttacgagacgaagccctcctcgcctaccagggaaccccacctccagatcgatcggcagggcgtccagacgtctgtcgctagcggcacgcaccctgaatgaacagaaaccaaatcagagaaaaatgaatccgcacctccgccgctagcggcacaaaccatgaacaaacaaaaaccaaattagaaaaaaaaagaagaaatcccttgatcataagggcgcacgcaccttcgtccctggaagcacacctccaccgatccgcctcgcccatgcatcaatcgatcagcctcgccctgagcgaatctcacgagtcaagagatgcggcagaggagggattgctacgagggaaataggagtaccttcgattcgactcgaactgagacggagggcagaggcgggaggggcggaggccgggcaccgcgtcgcgccctccaagcctgctcgtcgctggccgtgcgtgggcgcgcgtgacgcgaggaggccgcgcagaagggaggaggaggaggagtccgtcgaacacctcgcccgcgaagggagaagggatttgggccgcctcgccggcgacgagcgcgaggggaggaggccggaaggggaggggagccggagggggaggaggaggggagggcggtgacggaggaggcgagggggagggagccggagaggaggggagggtgcggcggaggagacgaggggcgaagcgaggaagagtggaggtgcggcctggcggtgatctgacgacgggaggagcgagaatgggcggcgcggcttcggcggcggtggcgacctggcgacgggaggagcgagaatggcgagttttttttttccgggataatcgcgagatttggggcgaccgtgggggacgggagttgcggggagaggaggcgcgggtgggtgcgggagggaggagagggatctggttcattggatttgagagggtgattttggaccattggatatgtgattcgacgaatgatgaatgattaaaagaatttgttgaagtatatgggtagaattaaatgattcctcctacaccataaactctataattgagctattgccattaaattattacaataaaaaataattcgtagcaatatattgtaatgttacaatgataatttttctgtggcaaataattatattttattgcaacgatctacgatcgttgttttatttagtacttttgttgcaatagaaaatgagatatcgccacaaaaaatcttattgctaaaaaaaacatgttctatcgccacaattttaattttttggtaatttacatagtacatggtacttttcactatttttcattgccacgatcagcaaattcattgcaataaaaaaattgtcgtctcataatttaacttaaatttttcatatggacacggattgagacaaattttatatggaaattatagctctcgacgagatctataattttataggtgataacattttcatttgaaatcttttagatattcaaaactatgattcaaatctcagttaggcacgctcaaatggaacgatatgtatttttccaatagaattgatgtgtaggtgagttggtaaatgagagtatgtgtgaagaataggtcttgggctcgaatccttgccaagacacaatatcaaaaaaaaaatagataggatgatagactaatatttgaacttttaatttggtatatagaactaatgccacattatagagtggtggcaatcatttttattacaacgatgtgaagtgttgcaatatgatttttttgccacatccattccgtgacaacatcgaaatttattaccactaaataaaaatcgttgcaataacctattactacgctatttattaccacggttagcaacgattttaaaattatgacaacatgtatctattgtcacaattttagtattgatgccacgatttttttcgtggtaatgatttttctagtacagcaaactatggcgacaaattccacgattgctgaatatttgattttggataattttaacataaaatattctttaagtttattttatacttataattctaagtagataatgcgtaccaaggatccactaataatgcaagtctaaaaatcatagcctgattttctctgatttaagatggtgcgctgtggcgtaacatgtcataatttatttagtattgaaacaaaacaaacattattttgacttaattaaaatgctacaacatttaaaccgcttgtaaagccaatgtaacatacactatgatcaactaaagttcgcttatttataaaaataccaaaaccaatggaccctacatgtacgcatggtgcatgtggcattgggccattgaagttatagatggccatcataagacctgcccggcacggcctggcccaggcacgggcgaggcacggcccaaggcgatctggccggcacgacacggtcggcacttcgggccatgccgtgccggcccacgggctgcaccttaggcccagacacatcccaccagtagtcgggtcgtgccgtgccggcccgaaggcataggcagcccatcgtgacttttttaaaataagtctattttccttccatcctctttgggatgtgacatatatatagctaaataagtctattttacgtcccgactctttgggccgtgccatataatatatctattttgcctccctattctttgttatgtgccttacatatggttgagaataagtatgtttcgtatccctaaacttcgggccgggacgtgccggcccagcgtgccgaggtagcagcccaggcacggcacggctattgggccccggccgacacgggcatgaccgaagtcgggctgtgctgggccaaaattaccgggtttgggtgggccatcgggcctcgacccatatgaccatctataattgaagtccatagtcggtgtatttctaaaccatctacaataatgaatctactaatttaagtgaaaaccaataaccagatattttaattcttttcaaaatttataggattttataatttattagaataatcaagagaagagaagtcatagaggactttaaagaatgttttttattgaaattactattgggcctcgtccaatatataaaggtaaattttgctatagtacactttggtttcgtggttttggccgtaggacaccgcccaaacatacttttgggggaaaacactccgtaaacgtggtaatttgtcaatggacaccgtatcgattagaataataattttcggtcgaaggggggagagaaatcgcgtgaaatgtcaaaaatgtccttggacccacatgtcagttatatctcttctctcacaatcctctccttccagcgccgcaacgcatgccaccgtgttggagccccacgtcggagctcgccgtggcctcggaactcctccttctcctccacgccccaatccccaggcaacgcggacgacgacgacagggaacggcggtggcagcaccgatccaaatctaatcggcacagcttcggcaatgccgcccttgtcgttctcttcccacgcccgaccttctcagacctgctccgccgtgggcgacgtgcgcccttccttactctgcttccccgcgttgcggcgcatgccaacctcactgtctcgctcatcgtggcggaggagatggcgaggatagcgggagcgactgcggcggcactcgcggtgggagcggcggaggacggcgaggacgtggcgaagtggcacggggcgacgtcggtcaccggggctcgagcttgtcgcggcagaggagatggcgaggatggcgggagcggcagaggaggcgaggaggagagtcgcgtcgtcgtcgccaactgcggccactcccgcggcggaatgtatccatggtgctcgtcgccggcttcacctccgccttcatccgcgacgtcgacttgtaccgcgctgagccctgggacctcctgctgccgtcgctgccgccgcgttagtccattatcttgcatgctctggcctgagatcgattgcgacgacattgcttgcgtgcgtgcgttggctttgatcgatgtgccgtcgttgttgatgtgtgcaggtgtggcggcggacggagctgaggagtaggaggaggagcggtgcggttacttcttctgcacgaggagcttcaggtggccatcgggaacgaggacgaacagggccacggcggcatgaacaggggcaccctctccttcatctcccaaggcgtgacatgtgagagaggagagatagcagtgctgtcatgtgggcccaaggatatttttgacatttcccgcgatttctctctcttcttcaaccgaaaattattattttaatcggtgtggtgtctattagcaaattaccacgtttatggagcgttttcctctaaaagtgagttccgacaggcgaagtgtcctgtagcaaaatttgtcatatataaaatactataggatgtttgatggacttttaatgtgtttcctctaatttcttgggaggcggcatgcctctcaagatagatcagataatatcattttgaggcttcactatttaaaagcattgggagtaaatgttgtaaataatagatgagtatccagccgcgttgatgcgggaaatcaagttacataatatgtataaataagatgtaatataattattaaaactaaaacaaattgatacttatgaattttgagcctaaaaataattgaaattgcatggtgttatgagagaataaagaagagacaatttaaactatagatctatcgtataaaggctagaaataattagggtgacgtggcttaatgagaaaagagaaatagcgttaacttagtggggatgaactatataagtatataggattactcacaatcagatttagcccctagcaacgtatgtccaaaagttatatctacatatatttacatacttcccctattccaaagtataagtatttctagctatgaatctggacagactattttctagtttcatagctaaaaattgttatattttgggacggaggtaataataaatattgtaaatgttattatttctttcaagaaattttatattttatttagctacaaatatataaaatgataatataatctatatggtcaaatgacttttttccttacctacttgaaggtatatgtgcacaccagatctcaaatatagttgagttgatgtacaaacacctcattacactactaaaaaataattttctcaggcgagctgatgtgaccaaggcacctatctcttttgccggtgattctttgcaaatttgtgtcaaccaaattgaagagagaaaatcaattaaccctgctactggtttgatgcagaaaaaaactaaaggagtacatatatgttgggttaatacgtgtggtggtttgatttgggattcctaacccgcgcgtacgctgtccagtcactaaccatgtgattagcactaatgataacgtgattagtgattagtgctaatcataattaagtacctacaataactttttttttctaataaattgaaaactttcaagttagatttaaaaactttcaacttatgatttaaactttgaagtcaaattttgaaatctttcaactcaataattttaaaaatttttaactcgaaatttaaatttgcaagataaaatttgaaaactttcaatttcaactcggatttgaaaactttcaactcgagtttttaaatttgaattataaaaaatatttttttattaaaaatatcttataataaaaaaattgataactttcactgcatcctaaattaatcaagataaaaacataaaaaaagaaagatcgtatagatacatgcatgcatgtgtgggaccaaggtgcgcactggtggagaaaccatctttcgccggtcggccgatttccacaatagtcccggatgcaataaaaaccggggctaaagatgatctttagtcccggttcaaaagggtaacgggcatatttgatctttagtcccggtttgtgttaccaaccgggatctttagtcccggttcgaatgctgtcagggcctgtcaggcccccccgggatctttaatcccggttgg

SEQ ID NO: 8293 - DNA, 8106 bp, Oryza sativa
ttgccaatttgggctttgggcttgcataaacagacgttttcccaatttgggcctaatcaggcttatcggaattctgaaggaagtacatgtgctggatctgcagggtttgctcctcttcagaagctgatcgacaaagtaatttgtgctttgttcatcacgtagaacacccaactattcagggaaccaaaaactaataatttgcatgaaaatataattccatctacaggtggccggctttggcaacatgcactgctaggtagtcatttgtttccacataatcaagtgttggctcttttgacagaacttacaaagtaaacgatgctagctaaaccagtatacaaagttaagttatcaaattcctgcattttctgtgtgtcacacattagaaatactgaccctccctttctttccaacaaaaattcttgtcatgctgattgatacacgaacgatagtattgtttcatatatatatagctcattaagttggaaacacgaatttaactacggttacactgattaagaacatgtttctttacaggtgaaatatatgataaaacaaagtccaattcccaattgtgaaactagactacccagtaatgggcaaaatccacatccctctttctgaatttggagcttcgatgagatcatactcgtcagtttctccatcctctaccttggatacctcaaaatatttatcacgcgcaaaaatagcatatacacaatccttctctagcccacactcatcagccgaacgtgaagcaccaaaataacaaggagctatcaagaacgtacggccaccaatgtcctcggctatgcaccattgatgcttggagaaatccatcttataaacagtgacgtcgtagacagtcttgaagtcgtactcaagcagctgacataccatgtaaagttcgctctccgactccaccaagaatatgcatgctgcgcccacaaaatccatggggtcggtgattgcgatggagctgaacgtcggctctggggtgaactccagcacactgatgttgtggaatctggcgttgaagtagaacttgccttggcaagctgcgatcgagcatatcagtactttctcatagtccttgccattcatgggtggatccaagtgctgcgtgccaatatcgtactcgtgcctaacccactcctcatcttctccgacgtgacagtaccagatgatggtgtcttcgggctcgacgaggagcacgatgcagccggggatcgtcggcttgtcggagagcgagcacgcaagcacatctgctgtgcaggacttccggtaggtgcggcagatgaatcttttcgtcaggatcctgtgggttctgcagaaacatggtggcgtcgtcgcggatcaggatccatccctgctgcgtcggccaggcgttgctgttcgtcatcccgggtatgtaggcatcgatggcctttttctccgagatgctgaatagcgccggcttgtctgaatcggcgccgtgcttcagggcgttgcaaggcacagggacatgtctcgtcttgtccatcatggtgatcgatgtgagtatgcggcgttggatctctgcaggtagcaacgcttttggctctcttacatacatactctaggcgaagactccgattcagtgccgtgttgcagacgacgagacgagtcggcttcagagtcggttcacaactcacaactagtcacaagaagatcgatcgccttcctatagcagcggtcatgtggttcagtttttggtaacaaggaaacggatttgatgtcttctgttccttttctgattttgattgtgatcgcaagagaggaaagtctctaaaagtatggttaatatagttttacagataatcacagtaatagcgacgggtgtgagtttctcctaaatctccaatccctccaaagaactgccccttttcagaggttttttttttttgactgataactttacagagtttcagtatttaaaatatttggtgcattagacatctttgagacaaataagtaatttatgttttgtgataagtaatttataaaccattaaaattcagataactggtgttcactcttcagaagttctggttgcaatgcgctgctactatcaggttcttgcgttctcttcttttccaagtccaattctgaattctgaattctgaagcgacttgttctgatgtcctcacctctcggtgctgatcatcaacaagtaggttgcagctctcccatcaagtaggacagctaatgctctaatctttcggcttcagggtggaaacaagaacaaattaacatacataactgtttacctgtaatttcacagcctatccctcttctacaagttcaaatatatttaccaagtgtgttactttcatttggaactagggagagaatttcatcctcacatgtaactgggcacatgcagtgtgacattatccaagaaaagtgttttaatcccttaatgggacatcaacttatttcttgcatgtgcactaaaatattaaaaaccaattaacaagatagtttaatataagatattttacagcacaaatatacaagttaaagtaacaaatatgactgaatgtatatatttaatttgttatttttatcacaacctgtaaatgtcgaatttgaccttatatgcttgtggacaatgtgcctcatattaatctattttgttaatttttttaaaaaaaattatggttatttgggtgacataaaaaaacgagtattcagctacgtgcagtattttctttcccctgaatccactacttggatgttttcgatagacatgcatcttaggaatatgaactaaataatgctaagtcattactacaattgagatgagtggcgccaaggttcactactcagtttttaataaaccaaaataaaggtcatcaattttccgtgtgttctctctgtacatagtcccctcttttaacgaaatatcttctcatgctttcaatagatagtacgatggaaaaaaatataaaaatgttaatttcatgagatttgttacggtccagcagatggtacatcaggtaccaaatgaaatccaaccgttcaattaccgtgggcatgattggaaacattgtcaggtcgacttaacattcaggccgccgtcgccctcgacgccggccccgccggccgccgcgcaccacagaggccggcggccagatccctgccagcccgtcgacgccagctaggttcccccatccgccatcgacgccggcctcgcgcacaccctcgaacggatcctgcagcccgctgccgcttcgcatcctgcagcccatcgccgccgccgtcggcttcgtgcactccgttgacccggatcccgcagcctaccaccgacccaaatcctgtagctcgtcgtcggcccaaatcctgtgggctgacgccgttgatgccgctgcaaaaaagctcagaacctgggatggagaacgggcaggcggctggctgagccgatctgatctgaactgaggctacgcgaaattacgaaaatgcccttcaggcggtggtactgcatggaatcgatcggtggtactgcccggtactgaatctgtctcagccatccgatcaagttaaatgaatggtgtagatttggtacctacccaggctgttggaccgtaaaaatactctaatttcatagataatgcactcatcaagcagaaacaaataataaactaaagttgcattaggagaaaaaaatcctttacattctttcaactaggcttgaaaatgatgacagaaactttggaccaaccaaataaattttctagaagtgacagccatttccaattctagtcttatataattttttctgctttctgtgtcaacccgtttccacagagatgatatcatttcaggcagtttccgaatattttcatttctacttattttcaacaggcaaaatccacatccctcttcttgagtctggagcatcgatgagctcatgcacctcagttgcatcatcctccaccttggatacctcaaaacatttatctagtgcatacgagacatacacagaatctttctcaagcccatactcatcagccgagcatgaagcgccgaagtataacggagctagaaaaaacgcacggcctcataggctctgcgccattgcaagctcaagaaatccatcctatgaacggtcatatcgtatatggcgaagtcgtggtcaagccgcagacagatcatgtacaattcgtcctcggattctaccaagaacacgaccgccgcgcctatcacccctaatcctccggggataggatcgacgatctcaatggtgctgaacaccggcgtgggggtaaactccagtactccgatgctctcgaagaagcagttgaagtagaacttgccccggcaagcggcgatctcgcatatcggcaccttctcgtggtccttgccatccatgggtggatccaatggctgggttccaatgtcgtcgtcgtgtctcgtccactcttcatcgtcgccgatgcgacagtaccatatgttggtggcgacgggctcaacgaggaggacgatgcagccagggagagatggcttgccggagagctggcaggagcatctggttgacagaccttctgggagatggatcttgtcttggggatcctgagggttctgcaggaaggtggcggtgctctggcgtagtaggatccacccctgcggggtgaaccaggcgttggtgttggtcagcccagggatgtcaccgtcgatggccttcttgtctgagatgctgaacagcgccggcttatctgcagcagactcgtcgtgttgctccatggagaggcaaggcacggagacgcggccgctcggcttgtccatggccggcgtggtgttgtcaaccttgtattcctctcttcttagttggatctgcaaatcgtgctctgtgctcctcttatatgggcgaagctgctacctaagcagggttgattccgactcagagtcagtcacggccggcgatccctcatcagagatcagacatctgaagtaatcggaattggaggcaaaaggccaattttcgtggtgaggtaaaagagacaagaaacagggatgctgttgttgttcgtcagggcatcgatgtcgcaggcgatgtcctgtccctcgaagatgttgaacagtgtcgtctttactgattccaggccgtgctgctgctgctgctgcaaggcgagacagggcacagggagaggatccatcccaaatatcgtgttcttatacttcatctgggcagggaacttgcagccgaatcggaatcaagcagccgtccggagtataaccggattccgaacggctcctggacaggagtaaaacgtgctcatgctagatttcgctcatcaggtaggaacatctaaaatgctccaagcctccaactattcatgggggaaatgggaaccaacaactaacaatttgaatgaaaatttccagcctgcacatgtagttgcagctttctcatcatgtacgcacaatgctctaatctttcggtttcaggttgaaaacaggaacaaaaaacacatgactgttaacctggaattttacagctacactgaaaaaaaaattcagctaggtacagtattttgtttccagtgaatccactacttggttgttttcgacagacaacttacgaatatgagctaaataatgctaataaaccattaaaaccgagatgagtggtgccaaggtggttatcaatttaataatcgaaaaataaaggtcatcattttcttgtgtgttctctctgtacataaccctttctttccaacggaatatttatgctctcagtagaaagtaccccaaaaagaaaagaaatattattttcatatatagtgcaggcatcaagcactgcaaaaacaaataataaatcagttacattcggaaaatgattcttctttacaacctttcaactagggttcaaaacggtggcggaaatttccaaccaagtatgttttgtacaagtgatgccgcttccaattctagccatatataaattttgaatttttcaatttctatcaacatcgatttcatagagattatatagttttccgactgtatccaaacattaacatctctatttttttttcaacgggcaaaatccacatccctcttctcgagtctggagcatcgatgagatcatgcacctcggtttcatcatcttccaccttggatacctcaaaacatttatccactgcatacgaggcatacacagaatccttctcaagcccgtactcatcagccgaacatgaagcgccaaaatagaacggagctagaaagaatgcgcgacccccaatctcatcggctctgcgccattgacggctcaagaaatccatcttgtggactgtcatatcgtagatggtaaactcatagtcaatccgcaagcacaccatgtatagttcgtcctcggactctacaagatagacgtgcgccgcgcccgtcacccctaatcctcccggggtcgggtcgacgatctcaatcgagctgaacaccggtgttggggtgaactccagcactccgatggtgtcgaagaaaccgttgaagtagaacttgccatggcaagcggcaatctggcatatcgccacatcatcgtggtcctttccatcgatgggtggatcgaagggcaacgttccaatgtcgtactcgtgtctcgtccactcgtcatcgccgatgcgacagtaccatatgacggtggcgatgggctcgacgacgaggacgatgcagccggggagagaaggcttgccggaaagctggcacgagcatctggtagacaagccttctggtagatgagggagatggatcttgtcttgggaatcctgagggttctgcaggaacgtggcggtgctcaggcggagtaggatccatccctgcggcgtgaaccaggcgttggcgttggtcagccccgggatgtcgccgtcgatgatggccttcttgtcggagatgctgaacagcacgggcttatctgcagactcgtcgcgttgctccatggagaggcaaggcacagggacactgacgactgggcttgcgttctccatagtcagcgtggtgttgtcaacctctattcctctcttcttttaatgttttatctgcaaaaccggtgcttatataggcgaaaactgctgccagaggaatgttgattccgacacgaacattatcagacatcagaagtaatcggaatcggaggcaaaagatcaattcttcttcgttcgaaaaaaaaaagatcatacaacgcgttgcggcccacttgacccagttagcccacgtgcacgcatattggagcctgtatgcacatgtgtagcctatttaggaaaaagtccaatcaactcccttaatatacacgtttaacttcatcggttatgcttcatccaaagagctaagataaaattaggttacaggacctccggcattgcacatgcttgtgtaagtgctattgaacgataacaaatcatctgcatgaataatgctcagatcatgaatatagaaaatcctaattacccaaattttaatgtaattttaatttttcccgttgcaacacacgggtatttttttctagtgaatgaaaaagttggtagcagaaattcaatttttagatgggtaatagaaacttttgtatttcttagcatgtactcaaacagtcctatcaccaccaacgggtggctttgttctgttcatgtcaaactgttgttcacaaaagcatcattagagctcttcggcttcaattgagcagttgcccaaagtttaatatggtgtacttgtccatgttatgaaattgacgatggatttagccatcgtatcactaaagattggacccggaagagtggaatacaattcctcaaaattttgctggtgaatggcaatatgaaattggtcagctgagtgcagtatttttttttaaaaaaaatatatcattatgttcagaaacaatatctaatctaaagttgcaaacttgctgtactaatcaaattgtgacaagtgatgccatggttcagtccaattcatgaagttcctggttcagaacaatctctgaactaaaattatcagtgtgaaaatctgtctcagggattcctgaaacactgaacatttcctttccaacaaaatttgtctcagggattcctgaaacactgaacattttccttt

SEQ ID NO: 8294 - DNA, 8787 bp, Oryza sativa
cttaatcagtgtaaccgtagttaaattcgtgtttccaacttaatgagctatatatatatgaaacaatactatcgttcgtgtatcaatcagcatgacaagaatttttgttggaaagaaagggagggtcagtatttctaatgtgtgacacacagaaaatgcaggaatttgataacttaactttgtatactggtttagctagcatcgtttactttgtaagttctgtcaaaagagccaacacttgattatgtggaaacaaatgactacctagcagtgcatgttgccaaagccggccacctgtagatggaattatattttcatgcaaattattagtttttggttccctgaatagttgggtgttcctacgtgatgaacaaagcacaaattactttgtcgatcagcttctgaagaggagcaaaccctgcagatccagcacatgtacttccttcagaattcagataggcctgattaggcccaaattgggaaaacgtctgtttatgcaagcccaaagcccaaattggcaaaacgtaagcatctggtctctgatttttcatgtcgtgtcaggctgcaattcgtggagcttcaggcagggattgctgtgaccgactcgtaatccaccgtttgtactccgcaacatctgaccttgtgactcgtctgcaaccagctagcaatcccctacataagagaggcttcggttcggttgcagatccaacgaagaggataggagatagatcagccttgatcaccatggacaagacgagccgtgtccccgtgccttgcctcgccctgtacctaaagcatggcgccgacacagacaagccggcgctgttcagcatctcggagaagaaggccatcaatggcggcgacatccccgggctgaccaacaccaactcctgggtgacgtcgcaggggtggatcctagtccgcgacaccgcctccgcaaccacatttttgcagaatcctcgcgatttcgacgataagattcagctaccccatctaccccaggacgtgcacatcagttccacatgtctgctctcctgcaagcccacgatgcctggctgcgtcgttctcctcgttgagccagtcggcactatcatctggtactgtcacattggagacgacgagaagtgggtggaacatgactacgacattggcacgcaggtcttggaccctcccttggatggcaaggaccacgagaaggtgccgatatgctggatcgccgcttgccagggcaagttctacttcaatggcggcttcgaaagcatcggcgtgctggagttctccccctcgccaacattcagctccatcgcaatcatcgaccccatcattggaggattaggggtgatgggcatggcaagcctgtacatggtcgagtccttggatgaactatacatggtttgccaaatgtatgactctgaaatggagaccatctacgatgtcactgtttataggatggatttctcgaagcagcaatggtgcgtagccgaggacattggtggccgtgcgttcttgacagcttcatgctattttggtgcttcacggtcggctgatgagtatgggttggagaaggattgtgtctacgctatttttgcgcgtgataagtattacgaggtatccaaggtggaagatggagaaaccgaggagcacgagctcatcgaagctccagattcgaaaggagggacgtggattttgcccgttgaataaagtagagatgaaaattgtccaaatcagtaagaaatgacgtcgtctctatggaaacagagctgatagatattagaatgtaagtcaaaatttatatacggctagaataaaaaacttggtaagttgggaatttgtgccaccgtttcaactttcaaccccgttgaaagattgtaaatgtttttcttttcagtatagctattgtttattactccctctattctaaaatataaggtacaatcacccttaattcaaagaccaagaaacaattattaccacctctttatttgaatcgatccatacatgcacccaatagaattaaacatcttgtgagtgtatgatttaaaaaataataatttaggagagaagatatgctaattaattgtcatgcatgcatgcacgccttatattatgaaacacctttaaaaagtcgttgtgacttatattttggaatggagggagtacatgtttttgcaacgcttgatgagagcactatctatgaaatttacatttcgttttttttttgcgtactgtctactgcaagcataacaagatatttcgttgtaaagaaaaggttatgcacacacgaaattaatgattctggtgtattaaaaaaattgagtagtgaaccttgccatcactcatctcagttttattggtttagcattagtcagttcattttcacaagttgtctgtcgaccagaaccaagtagtggatttattggggaaactctaataatcccttaacgcgatatccccttatttttcgcgtcgcttaaaaatcatgaaaaaaattaaaaaaaagttagagcaacatgtgatatatcacttcacaagcatgcatgttcaaattaaacttatataattaaaataaaaacaacaaatttgacaatgaatagaatgcgcaattcactattaaatttgttatttttgtttcgaattgtataagtcgaattttaattgtgaaaagatatatcatatattgatctatcttaacagttttttataatttttttgatgactttcaaatatcatgcacaaaatgaggggatgtcccctcgagtgataaaaaaatccatctcgatttattgaaaacaaaatactgtacctagccgaataatgtcgcactgcatttgcccagttgcctctgaggatgaaattctttcactagttccaaatgaaagtgacacacttggtaaatctatttgaacttgtaaaagcagaggataggccgtaaaattccaggtaaacagtcatgtgtttttttatttcctgtttccaacctgaaaccgaaagattagagcattgttcctacctgatgaacaaagctggtatgcctgcttttactgaagtcctcgtctcggcgcgttccatggccgcctcctcctttctccgcagctaagctcaatccttctccgctgcgctcgtgctcacgggcgatcgcctccatggccgccaccgctagccgttgccccctctatgtcaccgctccggttcgcggcgtgggggtggaggagaatgccgccgcctgcaaggaatgggatgtggggaatacgatcaactcgtgcgtcgcgtcggcgtgggggggacgagatggacgcgatctcacctttttttctcgccggggaaggaggggagcgcggcgtcgactcgccttgtgcggggaagaagacaagaggggtggggtttgccaggttaaatgcctctgatcggtggcaatgaaaaaaataataaaaaaaaagtcgatcgtattttacattacactatttaccatccatatctttagataagatataggtccctatgtgtatatgacatggcaaaagttaaacatcatgataaatagttaagttaaatatctagggtgcgtgaggtttgacattggagagaggcttaggcggaggttaaggccctatttgagagagcttgtcacagctgcagctttttgctagaagctgccccaaacagtccacaacttctgagaatctgtagttacatattatgaaaaatgaactaagaagccagaagttggagaagctgagtttcagagtttttccagattctcagaagctgactaccaaacagctgtttttcagaatctaaagctcccccaaataggccctaagtttatgaacatttgtgaaataacggggtggcatgtgagaatttggttttttttttgacttctactttactttttagttgtataattacatattatcataatatatggatgaacaatgtggattgtttggggaggttgagattctcccaatctagatttttttttatttctagtctatcttttgattttatggttacatattttcagaatatgggcaagaaacttggaccgttggtgaacctagagattctagcagaagctctctcaaacatggccatagattgggagattgtgttcctgtgtgttcctgtgttggaggtggtgggttgagaatgcagtggcggtatggagatggcgttagagggaggaggtggattgagaatacggtggcggtatcagtttgtcactagaggatcggaagaaggattatgcttttcttacttgttggttccctatagcaatgtacttcctccgtttcacaatgtaagactttatagtattgcccatattcatatatatgctaatgaatctaattagcatctatattaatatggacaatgctagaaagtcttacattgtaaaacggaggaagtactaaccaagagcaagaacaatatagtgtatgatatcggcgttttggagagaatgtcacattatgagcgaggatatatttatataccattcaataaaatatttaatacactatttataccatttcgtacaatacatctgttctaaaatatagcaacttttggctatacatagagatatactcttgtttaaattaaatgtactgtggaagttgtaatattaaaagaccctcattgttatttaacaaaatagaatacaaagaaaacaaaattttggttttattaagggtagcgcagtaatcgtacaaaatacaaggacttgtgtgcaaaatatccttctctccggctctcccacaccaaatcctctcaccccccacctgcgccccgcgcctctcgccgccgccgccgccggcgacgacgaatttcttccacccgcatccccctcctcctagcaagctagccgacggcaacgcctcccggttccccctatgaactgacgtcgagacctcatcccggccgccaccagcgccaacgccgctcctcctcctccacgagccggtgcctggatatttctggatctgaggccggcccgtggctgcaggactgcgtgcaccattcttccgacccgacgttctgccgccgcgcgcctccatgccctccggatcaagctccccctgtattagggtggggttttttgcctgggttggcgagcgaggcaagatgctgtggtgggacacgctgctctgctctgctctggcgtacggcgtacctatacgagagaaccaagtgccgcctccgtcagccgtgaggtgctcatggagggcaagcccatccccaccgagctccgcaacaaagacctccaggaccaggaaagagcaggttagtgagctcctgtttctcaacgtttccgctccatctccatcgctgctgccttttctgcttcttctttttcatctatatggctgggtgtgtggtgaattttgcttcagccccaagtatccgcgtagacaatgagtattgacggtggcacgctccacgtgccaagattctcctggccatgtcttgcaatccgagcacggcttgcaatccaagcgtgcccctgatttagtttgtcgaggtgcggcggcctttgaccaggcaacaaattgttcttcacaagttgaattggacacatttggttgacaatgataatcagtaattactgtccattcgctaggaagtcaaacccataattcctgtctcgcaaagactaaactatggtagtcatatttagtatagttcaaaggcaaccttcacaattgaatctattctaaaaaagttcgaagcagtcactaatgaaaatcttgaactactttaattctaacatagttccagaaaagattggtgaagtatactttgaactattctagaaaaagtaatgctgaaggctgttgatgtgcttgctagcagtgagtgtgtcaatggtaccatctttttttttccctaagagggggatgataattcacaaacaaactgtgaattttggattctattcttctgtcttatttgggcataatttatcggttctcatatttaggtttgatcactgtaaaggaaaatgtctctggactcaagccagtgctccatggctttcatgtgcatgcacttggtggcaccactaatggttgcatgtcaatgctacattcatttctttcccccttttctttgtcaggagaaatggattgtggtgcgcgagttggggaaattgttctaaaagtgtaggaataatatactccaatccaactaggaaggaacatggggggcacaagaaggttagaaacgtcatgctggtggcgttggaaatataatgatttgaattggagcggatgcttttttttacagctcttttattgcttacattccaaaaatattttagtacacactgtctgcattggatgaaaatttgatagcttaactacaacgctgtgctatcttaacatttattaggtgttttactcaggtaggttctacagagacctagaaatctgagggacattagtgtgtctaagttatcttgaaatgtttcacgaaaatttttagtgttcaccccaagacatcattagtgtatgcctatgcttaatgaatgtcgttatccgcttgaatgaccaatgtttcttatgtttccttgtaaatcaaatgttatatcattgtctcttgtcatttcatgcagattttcacaccacttagcccaaccctgtttcatgtaatggcttcttgcttaataggccttccaagtaaagatggcataggctgagttgcaggatggaaatttatcaggagtcagctccactttcagtgaatccatccttctcctggaggaagagaagatacatgatgcagtgtatgttctttttattcgtgttctgacattgcatgaagtaacgcttcttatattttatttggaaattggaacgatctctatttttttccttctctcagtgagttcagttttctgaagaaaaaatgtgttttagtttaaacacaaccatttgtttagtagttaatccattacacgtttctgtgaaattttgatcattcgtaacactgttaaattttactttgtgatttgtaataatttcttctgcttctttttctgcagtggacaagttggtgaaaaaaaaggaattgaacttttgcaagatatactgaaataaagtcagtggttaagtctgataaattatctgctgcattgaagtcccctcatgcgtttctgcgcaaggtatgtagttgcatcgtttcctctttacacgcactgaaaaaagacatgttggaaagcctacaaccatagaagtttacattgtccatttttggattatatgttaattgccggaactgatagtcttcagatataatgcataagaatttatattcttgctagggagaaaaaaactcttcatggttttacgaatttcatcacttgcaaaatggagcagcaagttagccactatgggcacattcagttttaaattaggattctgatctgaggatttaggcttgcagggtacagaaatcagaattttcccatttgctctgcttctactggaaacataaaattttaaatgcttgtcctagaaccatgttatttcatatttaagcactatgctttatggtattccacatttaaactttttatttagggattggaggatattgagggggattaattccacaccttaatagatgtggaattaatccccttcgaaatcccccttgattcccttgtaggagggattaactgaacaatgccttagtggtacactatcatccattgaaggaataacttttggaaacaagtggccgtgaacttacataataatgcttggctttgttgccagatgatggagagtacaatggatgactggtcaatcagaaagggtcttcaacaaagtggaggtgtggttaaattatatgtacattcaaactaatatttatcagatggctttggatgggatttcatggacaatgtttatatacattgtcactatttaggttagagaatacagaacaatacacactgtgtcatatttgggtacagggaccgctcatattctgggatgcattcttcagcttttgttaactgtgatgatgtagccttgagctgcagtcaacaacggttcctttcgattctgtcatgccaatttccccatccctgcactgtctttcacaattaagtcatccctatttttgtacaatgcaatgaacagctgcaagcatagttgcaagagtgatattttggttattcactaatatggtcatattatggtttgaagtttggtcaatttaattaaagagcacctatgttaacaaagcttccaattgtttttatattgttatgatcatgacattaacctgtgtggttgtacttttaattaatatgcacggggagtatttgcacgagcaaatttttacatgaagtttgttcatttgacatttggcgtcactgaatacaaatttctgactatgtatgtactatgttttaagattaccttttttaggttaattgaaatgaaggggaaacattcaatcaataataactaattggcatttcatgagacttttgcttgcgcagctgtgtgcggtagtagcaccgcgcttttcccttctaatactatccgcacactctatttcttttgaatgaaaaagacaggtggggttagaggctacacatgtcaaccactttttttttaccaactctctattttttttaattaaagtgattatatagggctaaagggtccacatgccagtaatagaaatacatacaataattaaaagatgatatacataggaaatgatgataatgcagattaatgatatttttgaaatcccattgcaatg

SEQ ID NO: 8295 - DNA, 11549 bp, Oryza sativa
catcaccagcttgctcatctaggcgccgtggaactccttgccgccgctcgtcttcgcgaagactccggcctccccgtccttcttgacgacgccgacgacctccgcgccgccgctgctgctgccctgcctcgcgatcgcctcgccgtcgcactcgccgccgccgccgcccctccgctctgcctcgccgccgctgcccctccgccctgctcaccgtgcgcgtgagagaagagagagagaggaagagtagtgagagagagaagagagagaggggaagagtgggaggagtatgacaggttggtcccacatttttttaataaatagaatgctgactgaactgccacgtgtgcgccacgtagaccaaaaccaccgcggattggatcgaggggggtaattcgtccggtttgtaaagttgggggtgaagaatgtccggttttatggttcagggggtaattcagacgaccgcgatagtttggggggtaatttgtactttttccttatttgagggcacaaattaaatgaacaaattgaatatcaggaagttgaaaattttgttttaaaactaacgttttatatgaaatgccaatgaagaaagttctcgaataaaccataccatttagctttttaattaggaagtattcccgcgataataatccataatccacctacagttccaaacgggattagtgagtacgatcacaaaatgtacgatgatttgaacaataatacctatggagaactgactgaactgtgatgatacataattatgcttgcattactgctaccaatcagtactatatcgataatagtggcagccctataaaaaaagctacttccctaatcataaatagttgacgtttcgaataagttttggtcaaatttcaaccatcattaacacctcaaattcttgttttttttaaaaaagactacatgtgtagatttattttcaaaagcactatcataatattttaaaccaattagattttataaaccatttctcaaataaaactgattgttatttgatttgaaaagcactaccataatatcataagcttattaaattttataaaccatttcttatataaaattgattgttatagttttaagggtttgaccaaatctcttattctaaaaatcaaatacttataatcaggaggatacaaatttcttgagataacgtcgatcaagagggagaaaggagttatatatgaagtataattctataattctataagtttcaaaaaaaaatctataattctatatttccagtgatcgatgtatcttaacctttttctgtatactcgtgtgtttcaaagacgtgcattgatttcaggaagcgtttctgtgtttagtttgacagcgcaaacaaaatcatccatcctacaaatctgaacattaagaagcattagaaagtacgtgaacatacatgagtaccgaaagttgtgtgatgagagcatttgatgtcaacgtatttttaccgggccagcccaaggagaccgaccaatttcattaagctacaaatacatcgataataagatgtcgaaaaacagggtcccaaaagtaccaacagcacctcccgcaagtaaggccctatttaggttctaaacaaaaaaaattttcatcatgtcacatcaaatgtttagacacatgtacggagtataaaatatagataaaaaactaattaaacatattgcatgtaaattacgagacaaatcttttaaggctaattgagccataatttaacaatgtggtactacagtaaacatttgctaatgacggattaattaggtttaataatttcgtctcgcagttttcagatggaatctgtaatttgttttattattagtctacgtttaatacttcaaatgtgtgtccgtatatctgatgtgacacgccgaaaattttcatccgcgaattaaacaggtcctgagaactaacaggaactgctccaagtcgatatcattcttaaggactcacattcttaaacattctaactttttttttctaaatggtaagtaactactgaataccaacaatgcgttatattttagggtagtgatagtagaaataaagtatcactcttcctgttttatattataagcagctttgatttttaaagttaaacttatatgattttgatcaaatttatagagaaaatatagcaactctcttataatacgaagttagtttcattaaacctaatattgaatatatttttacatcgtgtttgttttttgaaaatgttggtatgtttttatataaatttagtcaaacttaaaaaatcaacttaagaaaagttaaaacgatttactccctccgtcccaaaatataagcatttatagcatacaagtcaaacatttttaactttgaccattaatagcaaacaaatgaaaaaatcaataatgcaaaattaatgttgctatatttatcattaaacaaactatcataatatgcaactctttttttatttaaaacatcttactttagtaggtattattggtcaaaataacatatcggagacagtgtcagggtctaaaaatatctttattttaggacggagggagtagtttattactcctacctatatctctcaggctgtgatccaaacttcagtccttttacatcacatcaaactgtcatacatacacaacttttcagtcacatcatctctaattttaactaaaatctaaactttacgctgaactaaacacagcctcaatgtgtaatgtttagttaatttgaactaaccaatgttaaataaaaaaacagagaaagtactaaactaacatagatgtcaacgtcgaggccgacgtggtcgtggatacccgagctatagctcccaatctcccatgcaccacccggcccacgggccaatccaaaatttccaccacgccgcgttggtgcacaacgcggtagccggtagggggcgctgcttccgccccggttgagcgccaccgagagagagccaggcacacgaaagtttcgtctccaacacgacaacccccacatttttcctcttccctccacttcgcccaatcccctcataaaagcgtgtgcagtccatcccactcagaatccatcgcccaccccgccattcgctgctgctgctgctgctgctaccaactactaccaccacaccacctccgcttcgcttcttccccaccctcccaaaacctccccaaaatccgcgcgcgatgtcacggaagcgcgagcgcccgctcgaggtcgtcgcgccgccggcgaccccgctctccccgagcaagcggctgcggcgggcggggctcgtcgttatgtggctgtgagttcccgctctcgtccctccccccgcttctggttccttccccctcccccttggaatagcgactcaccagtgccggttgcgtttggttcgcgtgggatctgtgctcttgcaggcgcaggaagccgaagccggtcggcgtggagcagatggcggcgcgcctgattcggcaggtgggttgtggtctctgcatttgggatcgtctcccaattagttttctgggtgatggttcatgttagttgattcagtttttttttctttggggggtgaagttggttttgatttaattaatttctactacttcattcgtgcaatagatgcaagtgcagatggtcaaattgtttatgcttctcatgtttctcgtcgcgcgccttggcaacgtggagaggctgcttctcgagcaaccgtatctgatccgaaggttgcttgaggagcactttggtatttttcagaggtttgcttctgtttactcgagtggaacacatacattttttttacaagcatgaaattcgagattcattgtcgggtttagatgttaccagtgaacgctgccagctcgttgtcgacaatgcatcggtaatcattatgggggcgtgacttgggggaagtggaggaggttggattgggggtatagtatagggtctcaacacgctcacaatttcttctatttatttgagaaccaagttcctccttggttgccatcattttattggatgtgtgttgggggtagtagagagaatttaggggtttttatttttgaatgatccaaaaagtgcgtgacacttttttttttggaaaaaagctatatgcttgaatctgatagcgggatggtctgtttaaatttggttggtttacctgcaaatcctagaaaagtactggaataagtggaattcctcctctgtagaaaccaactggagaaacttgcttattaattgcataattgcagtaataactgtcagaaatgaaaggcaaaacattacaaagctccactaactacttcccgagaattatctgaaacagttcttgaccatttttttcttggcacttatgattttgaacatcatagtcctgttttaatttcagattaccaggttacctacataccatctagcaaataaaccaggatagaacttctgtttttccccaagtaacagaaacaccaccaaaatatggataaagcgttgttctcttgaaattctttctttgtatctgatctcaaactttgaatgttacggatgtgatagataaatgctaccatcattaatttggtctcttattgtttcttatccaaaagatctttgatggaatccatacaagatacggttcgcaaggctgtccactcagaggccagtattttggaccttattcacgtaaaatgtgtgatctatctatacatatgctttgtcttaactccttttgatatgtcatacaacagatgaaggaaagacagacaacattactttctggaggtgcttatcagcatccaaggtatctgccatttttgtatcttctcctaaaatgttgaaaactagatgggcatttaaattcctctattaaggcactttaaaagtttcttgatccatgtcatgatcctaaaaaccaagaaaatgaagtcgtgttatgcattctaacatttctttggtgcacaaatgaacctgagtgcactgcaagttctacctatgaactgcaaacatgtccaaaaggaacataataaccaaaaggaacataggaaccaaaaccgtgcgaggagccctaccaaactggccctaaagatacataggaagaatgcttaagaatgtgctctgttgttgcgatggagtgaaagtgtactatgatatgtattccatgtacatgtattaatctctcattgtatctcaaattgtagaccaaatatatcagaaggttttccacaaactggagggagcactagaatggttaagttattttttgttgatgttgagagaccagaagacccacttttcacaggttctccagtacaatggcaaaatggagccaacgctaaagttgcaatatttgaaaatgggagtcaaatcacacagggtggtctttctaaactacaaatcgagattttaccagtccatgatgatttcttcactgagcgaggaccagcaaatttcaccaaagaggaattcaacaagcagatatacatgtgcaaagggaaagagtcagtattgaaaactgtcaatttaacaaatggtgaggccaatcttggttccttcttctttacagagagttcccatgggaaaaggttaagattggcagcaagagtaaaatatcaggatcttgcagtcagggttcaggaagcaaccagctattcttttgttgtcaaagaccgtcgtagtaaatgtgagtatccacctgttcattttaacatcagaacccttttgaccatacatgattggaaactccaatacacgatgtatgtttctcacaaaatgcagcattttctatgcctaatcatctgaagaacatgatactcgcacaagtggctaccaagataatatagacaaaatatttataatgaacatattatatatatttcattagctattctggtctcgtacatgcaatggcacttttctagtgaaacgaagtttgccacttgtcttgcacttttagaagggaacacctccaggtctgagttctgaaataaacagtatgcaatcctagtcctttgacgtctgttatacttttgttgatcattggggattttcttatgacttacaatgtcttgcgcaatggaaaaaggttcagatcgctgtaattttgtacaatagacggtaaattaacagtacgcacagcaagttgtttcactttgccaggtacacatgtggtaaatacccctagaactaattgcaaagatggacaaactgaaccaattgcatactagcaaccagcaataattgtgtacatacatcttgtcttgacacagccaaccttattgcctactttcagtaaataaaaagagcaattctccatctaaggaagaagggattcattgtttgaagaaaatttccctaaaaggaaaacgttgcaatgaccttgcgggcaaatatattactaaggtgaagcatttgatgcgctgttaccacagagatccagctggtctccaaaaggtaattatgcaattgctatgatgtttctacagttaccgtttcttcaaattacctgcaaaaagtatatactatcagtttgtcagggaacagtatattgttcatattccaactaaaaaaatgccacagaagtgaactgcgagatgctacttatcaatttttgggaaatggctgtagcttgcaaaaagatacctccgcctcctagccttcagtagaaaagtcccaagatattttataacttaaatttcataaatatgaatgttagtgctataaacaatcggcctgtacttgctattcgatatagctcctatgaaccatactctacggaagtttctgtaattaccttttctcttttcttcttctgttccttgtgcaatatttgttattagtattaggtatgctgcatgtagtttaaacaagatttaaaacacaaatcatgtgtggaacacaactacttacctttcacatgctgaagggttaaaacgtggcggtacttgccgcttgcactaacgttaacccagacattcttgtaggtgcagtacacatcagaattattataataatccaatttattaaagattaaaccaagttgatctattttacatttcatcattcaggtatactaattggaataaaatgttcagtgaacatcagttttgtttatttaccaagttaattgcttactttaccttgtaataccatgtttgctcctgaaaggaaaattgctagtaatgctatatatattcacgtgctaagaaactcacatcttcttgcaaccagcttactggcatgaagaatgaagattggaataccatgattagtcatgcaaccacgtctgatcctggggatgagatccattcttacagagttgagaaaaatactataatcttcttcaatgatttctttgctctagtcggtatgtcggttgatggctcctatgctccttaccacgccaacaatcttaatcagctacagcaggtatttattgaacaccattccgatgcaattaaaatattgacatctgtttatattcacaaaaatagtactccctccttcccaaattgatcatcatataacgtaatccaaaatatctcaaattgatcatcatataaccgcatggacacaaatttcatcggaatacaattaatgcagcatgagagaatgtgtgcatgctagggtgtaattggcatggtgttttaatcgatgcatgcattatgggagaatgtgtgcatgatgtcttgattgatgcgatttaaattatctttgatcttggtgcataaatatatatgatgatcattttgggatggagggagtactagtatgctgggcctactaacaattgcaaatattatcaacttgtacatcaagatgtaatgttggaacacatgactaacctatatgtggcattgctgaacataaacatgggagagtcatatagtcaatttgaagaccaatgcataaaacaatttgggaacattatttatgttaaatcagatatttatttgtgctatggagtatatcgttggccataagttgataaacccactcaatgatgattaaaatgtgttgttgtctgtgagtacttttgtagtgttccaccctacctatataaacgtaattccaactttgaatcctagccatttataatataatgtgatggaatgacataatggagtattttgttacagcgtaaaatgaacaagtggaaggagtctgcgtatcagaaatttgaggaactggagaagttggggtgtcttattcctgatcatgtcatgatcaatggccaacctgttcccgtgtctccaaaaaatgatgccagtcattccatacaagccaacccaacatgctttaatcaccagattgcacttgaaggtcttttatatattcattatgatccatacaaaatcctagtcatttcattttactcaagattcaagtcgttgcgtaattaggtcagggacatcgatttcaacagcagaatggattttcagcagtacacgtatttactccatacaatgttgctggaacttccacacaactaaaagagccgttgcaacagtatccttatgaacaaagtatgcatgaaggtcaatactactccctccgtttcatattgtaagactttctagcattgcccacgttcatatagatgttaatggatctagagatatatatgtgtctagattcattaagatctatatgaatgtggacaatgctagaaagtcttacattgtgaaacggatgaagtatatacctgcttaattttcactgaacaccctccaagttactataactgttcatagtttcaacttgcttcagaatctggtcgggagggtccttctatgcagcataatggaacttcttactctctgactgaggaaaacatcttgaacggtctaggctctggcttagtacaatcaactatcctatctcaaaatactgcagtagtaagtaaaaacgaaattgaaatattaggacatgatattttgtcgtgtccatctctttctaaatgaagattgaaattctttagttggtaatttctcgtttatgacttgaaatgtttctgtatataggtcccaggtgcagatccacggcacagtggatatgccagcacctctacagctgacgctgctggtacttcttgtcctgtaacaggtgtgcagctacactgaaactcttatagttcaacagtacatttgcagtgaactcgatcaactcaaaccacttttctacattatgtatttgctgggtgatgaaatgttgatgttggaatttcctcagatggagttggtccatgggactatccgattttcagtgatctgtatccaaatgtagtaagtactttgcgctgaataagttgaacatgctatgggatttacttcaaagcaatgtgctcaatctgaagcaatgttgtcagtggcttgtttggtgttttttcctttgtttgtcatgacatttgtagatgttccaggaaccgtcaggactaatctatgggcatgtggtggaggcagaccaggcctttctcccagatagccacggtatgtgtacccacggagaacatggcagtagagtatgaatactttcgtaacagaagttttggtgctgttgagtttctatttgtatgcttcttttaaactgctttgacatgttattttcaactaaatatagttccaatttcctaaagtgtgcaaaataatgtcttatattcataataaattgggtgaactcaatatgttattaacaataacagaattgcttcgcccccttttgataccagcaacctgaaacagtatattattcgttacgagaaactgctagaacaggttatacatctagatctaggactgggagggaactattactccagttcatggcactctgaatttgacacgctcttttcagcaatactacgagcatctgctttagctttcctcaaaatgaatagaagttgaattgtgcgattaccaaattgctgatgtacttactggctacttaagaattttttgacacaatactagccacttaagattaggattgaatttaatatcaacctttcgtttcgtgccatgacagtgtgtttctcatttcagaactggcaaatgccgacaaccaatttactggaggtaatgatgatagtgctccatttgactgaaatcaccgcaacaagttattgtctactctcaaccatactaaagtgttcagtacttccagtgtgattataagtgtgtagtagttcgtaaatatagtagggacatattatgtcagctattctttaatttgttccgctcacgttaaatttgctgcctgcacatttggcatagtttgtttgtactactgaatactgagatcaaatattgatattgatgcactacgcctaattcaattcaattaatctagtttgtcccggtcagatgagtttctatctactttatgctggagtacatacgattgaaaatctctctgcagctgcagcgacaacagcacgagaattgcacgaaggaattgttctcaagaatcttaagatggtaaatacacacaagagagaggtacggtatacaagacttagtttttcttaagtacaacagatcttccattcctccatgatcctatcagcttctacacccaaaccacacaaatcaccatgcacgagccctcttcctccactgccaaatcaactgcaaaacaaacaagaacacatgccacattactcttccattttcatgagacaaacaaggtcacaagcacatcatccaccatgtgatggtgcatggccatatctcacctcacctggggcttgagtagccaagcatccatgtggtgatcagtagccgatgtcagcgtcgtcgacgacgaggttgccggtgatgagctcacggtaggcggcgacgggccagatgaaccccctcgggaggagcttgacggcgagctcgacgtcgatgatgatctccctcatggccggcttcttctcgccgctgatggcgatgaggtagctcctgccgacccagccgatccagccggcgatgtagaggaagagcaagcccggggtgatgaactcgccccagtgccgctggtcgccgctgacgatgaggtgcgggaggccgtcggcgccgcagagcaggccgaacttgccgtagttctcgaagcggcgcttcgtcttctcgatggtggcgttgatggcgagcgccggcgcggagtccggcgcgtacttcttgagcgacgactggagcttcttgatggactgcttctcccgcttcgcgaacgccttggactccttgcacggcgtcagcccggcgatgtcggcggcggcggggggcggcgacgtcgccgccgaggagagcagcaccgaggacagcgccagcgccgcggagaacgtcttggccgacgccgccagcgactgcgccatctcgccggcgccgccgttgttgcccgacgcggagcacgacacggagaaccgcgcggccggggacgacggcgcgcgcgccaggcgcggcttggcggcgaaggcggtggatgcggcggcgagggcggccattgctgctgctgctgctatcggcgagagagagtatttgcgatcggagtgggtttgcgggtttgtatcgtgtgggggggggggggggggg

SEQ ID NO: 8296 - DNA, 23583 bp, Oryza sativa
  unsure (1)..(23583): unsure at all n locations
tgaaacaggtgtagtatgcatatagccagcagttcatcacagacacaagtacacaagtaacaatcaggtatcttgtatgacagttcacatcccatctggagtgtatatattagatcagaaaacaaaagtacaagactaatagtgatagcagcctctgcagcatgggccctacatgtcagcctctcacacaaagggggcactgttcttgtcggcgaattctgcatatctagcatctattctgaaaccctgttcctactgatcaatatctacagtcatagaatcctgttggacttggatcagccacctccatcatcctcgcaatctcttccaagtacccatccttgtagaaatccgcggcggcggcggggaagccatggtcgttttgatggaaggcgatcgtcatcgccggcgagctcagaggcttctgctccggctccggcttcggctccggcggcgccatttgtagggagccccattgactatgaagcttgtggtggctgtggctgtgatggatgccgtcgttgaagaagtagccgccgttgcagctcatcgtgctcatcatctgatgacggccgccgtgctgctgctgctgggagatggccggagtcaggccgcagttcatgaactcgtcgccgccgccgtccgactcgaagctgccggtgttggagctcgagtcccccggcggtggggccttgacggtcaccgtcgccggcggcctccaggcctgctgctgctgctgcttcctgtaggtgatgcttctcttgaagattctgcagatggtccagacctcctgcatttttttcagtcagaagtgcacaagttagaggtcaatgctattaggaggctgtactcttatcggttagaaatggcaatcggtagaatactagaaacacgtcagaacgtgagaggatgtccagtactcctttaaaacgtgggaatttcagtaggactttcacatggattagttcaatttttgtagaattttcgcaaaatttcttcgttcaaaaggaggcctgtaatctcgaaagaactgctgaacttagcttgaaaaaaaatattaagacgatttggtgatgtaaagtattgcagatgatattgtactccacactatcaaattgtacgtagttgtgatctgtcacagatgaggagaaccggatatggatatggtgtgtttggttgctcgtatccctctagtctgacccatctctctcgtccaggttgagtctgggtaattctccatctctctccaggctgagtttgggtaattctcccattacgaatgcacttcttacgtacatgggatcgagtacacgaggccttgacgacgatggagaaggagaacgaacgagcatgagagcatgggagtgcgtgcttacagcttcttgcatgcacggggaggcgtcggcggcggcgatcgccggcgggaggcggaactcgtgcatcatccagtcggtcttggtgcccttgccggcgctgccgcggtagtagacgagcgacttcttcagcccgatcgactcgccggagttgctgttgacggcggcggagtagatcggccggtcgatccccgtcgccttccagaacccggatcccgtcaccctgttgggcctgatgctgttcctgtacttcctccctctcaggcagaagaagtaccactccttctctccacctaccgtgctcgcatctgcacaaaatcattccattcattcaaacacaaacacagaatttagctcaattattttgaaaatgatttgtgtttgaggttatttgtcaaattaattggggatgcacttactggggagatcccatggatcgtgcttgtagatgtccatctccttgatgatctctatactgagagacttcctcgccaccttccgccggaggtagaacgtgacgagctcctcgtcggtcgggtggaacctgaaccccgggagcaccacgtccccgtcttcttcctcgtctccggcgagcaccacctcgccgacgtcgctcttgatcttctgatccatggccgcctgatcccttgcaaactccttgctggtcaccatctccacgatcgattataattgaacctacgtgttttcttgtgttcttgctccaacaattatctatgaagatatcttctctgatgcaatcttgtaatggttgtaaatggagctctagctagctctcttgagatattggcctttctttgcaaggagcaaagctagctatatatatatgagtgtgaaggagtccatggagcaattaaaagggtattcttctatggctttataaatgcatgagagcttggtccaagtcatgcactgatcgatcgatggggtttgaatcctcttgctgtcttgacgaatcttcagagcaacatcatgccttttaatttgtacaaagctaagctatagtttgttactatacgctatccttttatgccttttaatttgtctgcgagaaaaagcagctcaaagttgtacttgcatctagctaattaagctacatgtcacctcaacagtggccatccgctggtgcctgactacctggtgatcatgccacgtccatgtcgttgggtgtaagggtgccaagaaatcaaagagccgatcgatgatatctcttcttttgactgagatactgttcaggggaaaggagttttttccccctaaaaagacaagggatttgctagttttcaggcggctaaaaaattataattttagtcgtattttaaccgcaattttgttgttggttttattttaattttacataatttgaattttttgcatgtaactttgtacacttttatgggttaatgtttttcatgtagttttgtaaatttttgtatgttagaacggtttattgttcaatcattgagagtgataagtaataagtagttggtgagtaatgataaccattggattttcatcatccaagtggtagaaaaagtgatggaaatttttgaaaaattcagtcgcctgaagtgtatagacactcctaaaaacaaattattgtggaattcgatgtgtttttggtctgaattttttggttaagataccttttgttattttgagatgtagtttaaggcactttcagatatattaaataaggctgaatttttttcattcaattttgtcctttgagttaggggagggaattcgtatgtaatggacgactaacgacttctttttttgtaatgacagaagcgattattaatttacaaggttaaggacagtcagtactgtaattgacttatttgttttaatctgcaaaacatcgagttagtaattaagaaccagaaaagtgtgtaaccggagaaaaaaagaaacctcttaagtgacgacattgtaattaatattgcacactaatgtggtgagtcgctattgttgccagataaaaaaacattatggagtatagcaggcagctgcattgtcatcgttgacagtagagcaagcgaccaataatcagaaagcacgcataattcttcgagaagcccttgattattagcagatgaatatgaaacggggcatcatgaaccatatgttctaattgtctatagtgtactgtggatgttcttgcactacggcccttgaaaagacaggaccaatatgtagttttttcatgtgtttgttccatctgcactgtactcatcggagcctatacagaccgtaggactgtaatatactcctgcataacccatttgattattttcacaatacatatatatagctctatttatgagcatcagaatttatacttggtgagttaagtcatgtgccaatcaaagactctaccatcacacgaatggtactttcctgaatgtggttatgttatatcgttttcaagggagcaatcggctcactaaataatttggccattcaaaactaaaatatttttaaaggtattttagttgaatttaggttttgatcagatataaatgtgccaataaaagattcaactcttgtatatctaaaggtttggcgtcagcttgaaaatgatcagcaccatagccgcagctagagcacaaattttagttaataccgctagtataaaaaattcaattgcaataatgagtaaaaataagttcaatgttttatagcattttcttcagcagcaactattttgacactctctatggcatttgatcttccatatagcaactattttgacactctctatggcggcggggaaggaggagtccaggtgcggacgcgccgtcgacggtgggaacaattatgggcggtggccttggccgaatcgctgaagggacaatgttgttgaccgacgacgatccttcttgtgcggattggtggtgtgggtttggacagggaatcgcgggcgaaagccttgccgagccatttggccggctgacaacggcgacgccgtttggcgtcgttcccctccttggaggcgttgttttagcatacccctttcctttccctaccatattctccgggtgaaaaccttgcttcggttccgaacgagcggtggcggcgatccacgtcgcatcctccttgggggcaccgctttggagaaacctcttcgtgcaaggatattgtcattggtttatgcattggcttcgaactttagtcataggcctggacgaggccttctagctccacattttgttttgcatttttcaatttgggtcctctcttctcttgtttggtgtgttcaacttgtcttgaactacactctcttctggagtggatctttgtaataataggctgtagttctttttaagcaaaggccggaatattatattccattatctaaaaaaaaatatagcactaggcttatgggtggtgatactcacatatcagtgatcacattcctttaacttcacgccaaaggatctcaatcctacgatcagaactttgataatcttatgttgacaagtggagacacaatttactaaaaggcactccctccgtttcaggttataagacgttttgactttggtcaaaatcaaactactctaagtttgactaactctatagaaaaaatagtacacaaccccagcatagtttcattaaatctataattgagtaaattttcataatatactagtcttgggttaaaaatattactacttttttctacaaaattagtcaatcttaaagtaatttgactttggccaaactcaaagcgtcttataacctgaaacggagagagtattaaagaatgtggcatttgttgaagacacagtaaaaaaccgtggtactgttacacaactctttaaatttgtttttactctactatatattatattggtttctattaaagtaatatatttggtttttaggagagacaaaactaaaaaagaaatggcctctacaccactcttatgtagtcttcccctattttaaatagaaaattggtcactacttagacaatcagagacataactcatgtaattttttttttctggttgcattgcatagagtcattcaaataataacaattaataacatgaattcaccttctttaatttctaaatcagtttaaaatcacctataagtataaccagtagctagcaaaatctggctttgtctacaggagagaaaacagacaagaagggaccaaaacaccaaccataggctgtaggctgtgttgaagaatgttcagtgtttttgaaagggactccttttcaagcctttgaaagggactaccattatgaatttcaaaaaaaaaaaagtatgaacctcatatttttctatggcccatcgggccaggtcaaccgccgcactgtccgcctcctcattgtggtgggccccactgccacgtatgcacagttcttcctagtttcaaccttcaatgcacgtgcggaagactctgggtgttgtagccactgaatcacatccttgcaaatccctagctagccttccttcctggaagctagtgttgggctcatagttatttcaagtttttttttaacaagttcaaagtgactttattgttggaaaatttgatgacataactagccgaggtgatatcaatagtacttctattattattattattattattattattattattattattattattattattattattattattattattattattattattattattattattattattattattattattattattattattattattattattattattattattattattattattattattattattattattattattattattattattattattattattattattattattattattattattattattatcttcttgataagtgtggagattatggataccccatatctacatgacggttgtaatttagtcggatatacagtaccaaatatagatggaatatctctatgaagactcgggttaggttctaaacttgtatgtcaaggaaatacccgggatcttagtcggttacgattgtattttatctataattccatattccgttaggatatggactgtattttgtaaagcggactccttcccctatataaggagggtccgtgtgcctcttggggggcgattcttttttccagtttatacaatcaataacatactcggcggaatcatccccggacaggagtagtgtattacttcttgaacgagaaggcctgaacctgtataaaattccttgtctccaaacccatccactttcctagcttgatagccacccccttttattattgccgaaatcttgtttcgacagttggcgcgccaggtaggggtagcgtcaagtttttgccgactaagtgcgatgggttctgtttctggcatcgacgacttcgccttccctcccgggcaggcgttccggttcggcagcctcaacttcatcaccaacgacttcggcaagatctctctccatgactcggactcaaaccagtcggggagaaaccaggtccccgtgccattcggtattctgaactcggccgaggcctactctaagatcatctctcccgagtcggctccaaaccactcggacgagatccaatctactcttccgcggccggatcaagacgacgggtcctatccctcaatcctgatgaaacttcctgatgatttggccgctgtcttcatcgccaagacatctcccacttgaagatctaggcgagctccggcttcggccccaatccaatctagatccagagaggttggcgttatactccaacctcttgggacagtctcgacggaagatttggatggctacctcagctcccccggcgtcagttctcgaccaaccgagatcctcgactacgacgatttaggctaccactacaaccacggcgacctcgacaacttcgacgacagctatgaggataactacacacccctcttctttggcgtattcatggctgacaacgaaacggaggaacagcgtcaagcccgagaagcggaccaagatcgcgcacggcaagaagctgaacgtcgccgactggaggaagagcgacagtgacaggagcgagaacgactacagcgtgaacaacaagaccgcgaacggattgcaaaggaggctgaagatcgacgggaacgcgccttggaatctgggcgccgagcgagagagctcattgggcaacaagacgtcgatggaacagcggtctttcgcaccccccagcagaacgcggttgcagcaatcactctcctcgataccctcctcaaggaagacgcactcaaccaagccgatcatgttgtcaacatcttgaaccagatgaagaccatgatcgctgcctcggttccagccaactccgcaagcacccgcaccccgactggtagccgagtccctcacttccgatctcatgattatcatcagccaagcctcagcatcatcggcacaggatctagtcgcaggagcaggggtcacgacgaacgatctgttcactcgcctctcgaacgtcacagggagcgccgagtcgaacggcctcgctctccacctcaccagcgtcccgtcgaccttcgcgacacgatcaactagcgccgtgcagcacgaggtcaccgccattcaccaaatctctacgacgacgacgtggatggagtagctgccttcactaatgacctgcgtcgagtagattggccagccggctttaagtcgactggaatcgagaagtatgacagcaccactaatccggagtcttggctcaccgtctacggactcgcaatccgcgcagcaggaggagacagcaaagccatggcaaactatctacctgtggccctagcggactccgcccgatcctggctccacggactacctcgtggcacgatcggatcatgggcggaacttcgtgatcacttcatcgccaacttccagggcacctttgaacgccccggcacacagttcgatctctacaacgtcgttcagaagtctggagaatcccttcgagattacatccgacgcttctctgaactacgcaacaagatctccgacatcaccgacgacgtcatcatcgccgccttaactaaaggcattcgccacgaggacctagttggcaagttcggacgtaaacctcccaggacggttaagcagatgttcaaaaaagccaacgagtatgccaaagccgaagatgctattaccgcgtccaaacagtcgggcaccacttggaagccaaagaaggacacgccgaccgcaggagggagtggaagtaacaaccacaaggatcgcaagcgtaagcctgaagaacttgtggcgaccacctctccaccttcccgacaacgttcccgcgtcaacaccttcgacaagataatgaactcccaatgtccgcatcatcccaactccaaccacgtggccaaagattgcttcgtctacaaacagtttgcggagcaatatgtcaagaacgcgcgtaagccctcagacggagatcaaggcacatcaaataagaacgatgatgaagacgatgccccgactggttttcaagatcatcgcaaagaacttaatcacatcttcggcggacccctggcttatgagtctaagagaaaacagaagctaacagaacgggagatcaatgcggttcagcctaacacgccccaatatcttcggtggtcagagactgcaatcaagttcgaccgctcggatcatcccgaccgagtggtccacccggggcggtaccccctggtactagacccagtggttcgcaatgtcaagctccgacggactctcatcgatggtggcagtgcactcaacatccttttcgctaataccctggacgatatgcagattcctcgcacggaattaaagccgagtaatgcacccttccacggtgtcatcccaggattgtcagctacaccactcggccagatcacgcttccagtcacctttggcactcaggagaattttcgcacagaaaatgtctgtttcgaagtcgctgatttcgagacagcatatcatgctatacttggacgaccggctttagctgaatttatggctgtcccacactacacctacatgatgatgaagatgcctggtcctcgaggagtcatatcactacagagtgacatcaagcaggccgtcacatgtgacaaagaaagttgcgagatggcccaaacccacgagattactctcgcccgtgaagagatccaactggctgcgaccacggcaagcgagggagaagtgcctgcaaccaagctgacgaagaccgatgaaagtgatgccaagacgaaaaagattaccttagatccctccgatcctgataagactgctgtaataggcgctgagttagattgtaaataggaaagcgcgctcatcacctttcttcagaataataaagatatttttgcgtggaaaccatccgatatgcctggtatccccagagaggtgattgagcactctttacatgtcaaggaagacgccaaacccatcaagcaacgactccgccgttttgcgcagaacaggaaggatgcgatcaaggaggaattaaccaagctgttagcagtaggcttcattaaggaagtccttcatcccgactggctggctaacccagtcctggttcggaaaaagacggagcaatggcgcatgtgtgtcgattataccgacctcaacaaatcttgtcccaaagacccttttgggttacctcgcattgaccaggtggttgactcaacggctggctgcgagttactcagcttcttggactgttattcgggatatcatcagatccgactaaaagaatccgactgcttgaagacctcgtttatcacgccctttggggcctactgctacatcaccatgccctttggattgaagaatgcaggagcaacctatcaacgcatgattcaaagatgtttttcaactcagatcggtcgtaatgttgaagcttatgttgatgatgtagtcgtcaagaccaagcataaggatgacctgatcgcggatttggaagaaacttttgcaagcattcgtgctttcaggatgaaactaaaccctgaaaagtgcatctacggagtaccgtcagggaaattgctcggatttatggtatctcaaagaggcatacaggccaacccggagaaaatcaacgcaatcctcaacatgaaaccgccaagctcccaaaaagacgtccaaaagctgactggttgcatggcggcgctcagccggttcgtttcacaactcggcgagcgggggatgcctttcttcaagctgctgaagaagactgacaatttccagtggggacccgaagcacagaaagcctttgaagacttcaagaaacttctcaccactccgccagttttggcctcgccacatccgcaagagccgctgctgttgtatgtgtcggcgacctcccaggttgtgagcatggtcctggttgttgagcgagaagaggaaggccatatccaaaaagtccaacgaccaatttactttgttagcgaggttttggccgactccaagacaagatatcctcaggttcaaaagttattatatggtgtcttaattaccgtcaggaaattatctcactactttcaaagtcactcggtcacggtggtcacatcgtttccacttggggatatacttcataaccgcgaagcgaacggacggattgcgaagtgggccttagaattgatgtctttggacatatcgttcaagccacgaacttcgatcaagtcacaagctttagctgatttccttgccgagtggaccgagtgccaggaagacatgcaagaggaaaagatggaatattggactatgcattttgatgggtcgaagaggattacaggcactggagctggggtcgtcttaatttcccggactggagaaagattgagctacgtattgtggatacatttttctgcgtcccataacgtggcggaatatgaggcgctactccatggattaaagattgcaatctctttaggcatttgccgtttaatcgtccgtggagactcttagttggttgttaatcaagtcatgaaagagtggtcaggtctagatgataatatgaccgcttaccgataagaggtacgcaagttcgaagataaattcgacagactcgagctcacccatgtccttcgacataacaatgaggcggccgatagacctggccaattttggttcaaaacaggaagcagccccttctgatgtgttcgttgagcatctttatgaaccaaccgtgcccagaaaagaaacaattgaagccatggatactcaaggcgtaagcatgattgaagccgactagagagaacctctcataaaattttttactaaacaagaactccctcaagacaaaaatgaagccgagcggatctccaggcgcagcagactttacattattcatgaagctgaactatacaagagaagtccatcaggaatactacagcgctgtgtatctttggaggatgggagacaattgctgaaggatatacattctggtatttgtggtaatcatgctgctgcacggaccattgtcggcaaagcttaccggcaaggttttttctggcctacagctgtgtctgatgcggacaagattgtgcggacatgcgaaggttgtcaattttttgccagacaaactcatttgccagcccaagagttgcaaaccatcccgttgtccaggccgtttgcggtctgggggcttgacatggtcggcccgtttaaaaggggcagtcggcggttacacgcatctctttgtggctatcgacaaattctccaagtggattgaggctaaaccggtcatcacgatcacagcagataaagctagagattttttcatcaacattgtgcatcggtttggggtacctaatcggatcatcactgataatggcactcaattcactggcggagcatttaaagacttttgtgaagacttctgcattaaaatttgttacgcctccgtggcacaccctatgagtaacggacaagtcgagcacgctaacggcatgatacttcaagggatcaaagccgagtttttgaccgactacgtccctatgctggtaagtgggtagatcagctgccgtccgtgctttggtctttacgcactactcctagtcgggctaccggccagtcgccgttctttttggtttacggcgcagaagcaatgttgccgagtgaagtggaatttgaatcactacgatttcggaacttcaacgaggagggctatgaagagggccgagtagacgacatcaaccgactagaagaagcccgagaagcagctttaattcagtcgactcgatatttgcaagggttgcgccgttatcataatcggaatgttcgatcgcgagcctttttagtcggcgacctggttctgaggaaaattcaaacaacacaggatcggcataaattatctcccttatgggaaggaccgttcataattgctgaagttactcagcctggttcttatcgactcaagcgcgaagacggtactctcatcaacaattcttggaatattgaacaccttcgtcgattttatgcttaggcatcttgcttgtatctttcctatttgactgctaacttcaagtttttccttgaagttttcagtcagggggctattatgataataatggagtgtgatttttatcaattcaatttgcttacttgatgtatcattgccctgtttgatttcttggcttagtcaatgaggactgaaagttttttaacaacttttgtgggttttaggctcaacaaggtttgacaaaaacttataagaaatcaggagctaagttaagatatcaagcacagcataaattcatcagtattgtacaaattgtgcctccatcatcattaatcatcaaaatcattggtacattaatcagtataagttttttcatcatcagacttatcagacccagtcggccgaaggtcgacatcttggaatctctcaactacatcagcagcaattttgtcagccgctttctgcgcatcactgatgaggtcaagagcagcatcttcgctcgtcccgtctgcaaagccatcaatggcatcaatatcaactcttggataaagggatttggtcatcgccaacgccagacttgctcccatacttccagcttctttgatgttcttgaaataagtatctggagtgactctcagcttgtcgaagatttcggcagcatcaagtgtactcgaaccagcgttattgaaaaacatcgcttgaacaattggggcaacagcgttagcaacctcatcccgggctccttcaagttttttgatcttgccaactaggatgtcaaattgagcttgagatttgatcttgcggtctgcatcaacagattcacattaataagtcagtatatggaggataatggctnttgaggtattgattgttgataccttcaacttcctttaaagccatttctctttgtctcgccagttctgccttgtcattttccagaatttgaatctgcttctccaactgagatatcttggcagcttgcactacattgattacggttaatcaagattgcaaagataacagtatgagtcagttgagcagagtttgtgcgtaccttttgatgagccactcagttcaaaatttgattcctgcagctcagcgatccgatccctcagatcatgttcattcttcctggcaagttctttcgcttcgtgcagttgattcctggtggcttcgagggttccgagatgagggactaacctctctaaggttaccgttttggcttcgttcctaagatgaatcctctgcaagacagtttaattagcgcatgaattaaatggcaaacaagatggttgagatcaggtaccagagggcttacatttacaatacgggttgcctgaccaagtgccttcttcagtaggcataactcttcgtcctctttttgcttatttatcacgatcccttgaggctgcatgttgtcatcccaccacttgaccagaatcggagggcgtgaatcctcagctgcttgtatccggaggatttcttcttcatcaccaattattggccctagtgtatccatgaatgaagatgaagcagctaaataaagtctattggatcaaaatgatttcagatagcgtgtctacctgtgatgattcccggtcggggacgagtggactttggtgtcttcacaggagatctgggttctgattcactgtcagcatccttcccgagaggactgttcgtttgagcttcaacctcgggaaccttttggcttggccctgcatccgactggtttccagtcgggggctcctggttagcgccgacttcagcttcggccgactggttcccagtcgggggttcgttgctgggttctacattgttggttgccgactgcttgtcactcggatgatcctcaacagatggcccggtttctttggaagagcttgtgtctatgttggtcgggtcagagtctttcccagacggatctatatcagatggtttcctgcaaatttgattatcagtattattaccgcaatgggtgcgcatcaatgcaaggaagatcattatatgagttgcacctggaagacttcctgatctttggcacagggcgactagatgttttcttccttggagtagcttgttttggtagtttcttggttgtctctcggtctccaggcctcctggtggtatcatcggcttcgtcgtcacttagaaccagcttcctctttcgagaatctggatggccgactggatcagaagcacttggttgagttttagaccgaattcttggtcctccgctcccttgcccagtttggtggcggggagatcggcgttgagcgattgggggatccgacttcattaaagcaaattcctgggtgtaatatccttcattgttaactggttcaacaagaaaacaagatcatattttgagaaaggttgaagtgtatgaatacgtaccggtggaggaggattgaatgcattgaacggtacgactggcagcacgtgtgagtagctgacaacgatggcgtttgagaagatcttatacattctctccttcatgaccttgaagtcaagagaatctggatcttcacggtttgggtcatgcttgccgtcaaattcgaaggctgtgcgagatctttctttgattggagctaaccgacacttgataaagtgccgggtgatttgttctccttgaaggccctgttctttcagctttatcatcctctccatcaattccactgcctgagtagcttcatctcccataggcaatgagttccatgtgtcctggtaaaccggaggaagatagcagtactcggggagtgcgggctcaggattttgaacatagaaccagcttgcatgccagcctttgtttgaggttttgaagggcatggagaagtatttttggcttagtgttcccctgagttggaaaccagcacccccaacaacgcacggtttgcttttgtttggctggggcttgaggaagaagatgcggcggaacaaggcgaaatgaggcctaatgcctagaaaagcttcgcaggcatgaataaaattggcaatgtgcactatggagtttggattcagatgatgcaagctaatcccgtagaagttcagaatgccccggaaaaatcttgaggttggaagagaaaatccgccatagaagaaatgagcaaataccacgatttcgtgtgtgtcgggggtcgggaatgcctcaccaaatgccggtcgccacccgatgatttcttttgctggaagaacgccgtgcgccaccatctccttcaaattatcttccgtcacatcggagggcgcccactgactctcgaagctttctctttcttccgccatgaatgtgaactggatggtctgatttagttcgagatacggctgggaaaagatggggaatcggagcggtggatgcagggataaatttcgtgaagtttttgagggtggattggagcggattggtgaaccctagtttgcccggcgcagttttgcactgtagcaagaaatggggaaaatggcgagagtctcagcagggaagacgaagagacgtttttcacttcggtgttattagggtatcgggagtactaatgggcctgggcctgtacagtactttagcccagtcttatttccagcgtggcccgttgtgatccttagggacttaggcactttttgctttggcaatttgtgttcacaatgatgtggctcaatgctgttaaaatcctttttagtgtggtttgataattctttaagaattaacacgatgcaaacaaaaggtgcccgacagaaaggtgttataccgtttttgaaagctttattaggctgcaaaggctgtctgggttgatttgagatgactggtttattaatagtcattcttttagcatgttatatgcttattttggttatggtaagggtcacagcctaggctattggactcattaattaccatgattttctatcctgtttggtgggttattttatgagattttttactcggattcctatcaaacatgtctatttttggaccttttgagtgtttatcactcggcccttcttgtattttttgtccttgatatactcaagttgagaagcagtcggctgggtatcttactaagtaccatacgtgcttcgctataaaaccactcggttcttgactatatgtttagtttttcaactaatcacatagtcgggggctacacctaattaggtgcatctactcgatgcaccatgttttattttcgcccttcacagtttttgatttttagtactcggcaagctggagcaagttgaattgaagcactcggactactgttttttgtttcgagaaggctattttgtcaactgcgaaggtctcgggggctactgtggagattatggataccccatatctacatgacggttgtaatttagtcggatatacggtaccaaatatagatggaatatctctatgaagactcgggttaggttctaaacttgtatgtcaaggaaatacccgggatcttagtcggttacgattgtattttatctataattccatattccgttaggatatggactgtattttgtaaagcggactccttcccctatataaggagggtccgtgtgcctctggggggcgattcttttttccagtttatacaatcaataatatactcggcggaatcatccccggacaggagtagggtattacttcttgaatgagaaggcctgaacctgtataaaattccttgtctccaaacccgtccactttcctagcttgatagccacccccttttattattgccgaaatcttgtttcgacgataaggtaagtgtgatgtgctcatgtgcacacatcatatacaagtctatccatcagccatataatagaggtgaaaaattcacgttagacgatattgatagaacctcattcttttctgcttatttattggattattttcgctgattatttccttcgtacttcttaaaaacaagatttcttaaaagaaattgctctactagattccttgaatctcttgttcaagttcataatatataatatttagttcttacctataaccaagtactagataatgtaccagcttttatccacggaaaaaaaataaaaagaatactagtatttcaccacataaataacttgtgatcaatatagtatcttttttaaaatatgtatatatatatataattaggtgtattcttgtgtgcttaattagggggaccacactctagtttattggtttatactattactatacattgtgcacaccaaaacagtataaaccatcaatgcatgtttatagtactcataaattccgtggaaaatctaccggctcaaaaaatctcaaatgcactgtaatatgaccttgctacatagtaataacttgttggttgttgcaaataaattcttggtcgctccaaaacagcttactgtcttcctaaactcaccatagtttaattcttatggtactgtcatgaataaacatgatttcagatgtcaaagagaaaaaaaattgaggcctggtacaaactatagaatggtttttagcaaaatctggagaattgtaaaccatatgtgttgcagtggaaatggactttcatggtaccgaagcatgcatatataaataagttactttgtaacatcatatcaatattttctagttgaaattatggatctgaataagtttagcatttattaactaggaaccattccatcttctggcccactttatcccattatcttaaccatgcgaatgttgaaatagagatatatacactactcgtgcaacttgactagcagaggccactttgacaatttttggatatgtttatattttatctagattaaagcttttacagtttgctcttttcccgttttccccaaagttttcatagtaaaatttaaaaaaatctctaattaataactatttggtctccaatgttcttcttccctttggatattcttggtcaacaaaagcaaccatgttagtgttgtgtgacacacaaaaggaactgtgagggtggcatacataaataataggtctgaggagtggtgaatcgtgtggtacatgatatagatactcgatacatgatagcgtgaaatttctttggtaaagtttttaccagcgccagcggcatattttttgggttgtcctcaaagtttttcgttataacctttataaatcaattgtactagatcttagatgtccattcacttcagatattttttttcaataaaatcgaacatattttctttagtgaaccggcacttagaggtgccaataaaatcaaatgtattagtgctccacgacataaagaatatcgttgttacggaagtgtcatacacataaagagtggcggattgcggatacatgataaagacatacgattccataatggtctagaacttttttatgtgatagatgtggttagggatttccaagtcgaccatcatcaccatacgtgataagtagaaaagataagtttacgaatcattagatcgagagaatatttatctcattctcaatgcgcacgcttctcgaattattaacaatccgttgtttgtaaacaaaaataaatagaaattgcttttaaaaaatatattaatctattttcaaatttaaaataattaatactcaaataatcctacgctaatgactcactcttatatatcttctcaatctcactcttctcctctaacactcccccgagtaaaaccgtacaatcaaggtcagtaaaaaccacaaagaaaatcccatgattgacttatatacacgcacgcacgaacacatgatgtgcgtaataccctatagtactactccctccgttccaaaaaaagacaaaccctgttttccgtgtccaacatttgaccgtccgtcttatttgaaaaaaatatgaaaaaattaacaagacaagtcacgcataaaatattaatcatgttttatcatctaacaacaatgaaaatacgaattataaaaaaattttatataagatggacagtcaaagttggacacgaaaattcagggtttgctttttttttttttttttgacggagggagtagccgacaattgcttaatatccgtttgcttcttggaaggtgcaacacaaaaaacgagactttgggatctctacgttcccatgtactagtacaaactacacactagctatgcaaagattggcttcatgtccttatcaccatgctgctagtaaccattagccaatgtagcatcaggaataaaaaaagttttttttttttgaagacagaataaatcgctttgttgcaacatgactgaagaaaagacctttcttcgtcctctgatctttcttctttctgtcttcagaggcctcatccttttgaacctttggaggaaatattgcacctaaatgcgactttgaatgcctcttgtttcctatagtcaagaaatgacattggatgctctctacttcccaagagaaattaagaaaatagcacaggagaaaaggcagacttatggtgatccatatatgttttgagtggacacaagtctcaggtttatgcatggttataagtctctgagtacaatttttgcttcggcatgcttgatgctaacatctgtcgaatgtaatttcgcgagctccttgtgccttcaaaagaaacaagcaatggagattttttttctgaatacttggagaagattggttgaatctctcatgtgtatgcatgccccctgataagaagaaatcttgttcgattaattcgtcttctgttgatcattgctagtgtaaaatggaagnagcnccccccacctccgctccccagganagcaaaattgtactgtgtttttaaccatattttcttttgacaaatgatggataaatgtgaggtttcttcaatattgcatactttgtacacagaggcatttcagaatttcccgctatggcggctaattgctgaattcagccttaagattcaatgttacctcaaatgcatacagctgttttatatctagttattttggaatatcaacatgattatacctgagaaacgtatgaaatcttgattccaagtgagagaaaaagtcaggataggagcattttttgtttgttttgctgtctgacaggcaggtgtcaacttcttttgatgttgtgctttggaattttggcagtagattgcagacttaacccccaacatgaatccaagtgtttcgaaaatggaagcacggacaaaattttatagctctttgattattagccgccattctgccaccaacaagcgtttggtaaactttgaaatttacactgtcagagatattcagtgaagattaatttatctggacaaaatgacaaataattatagaagctcaattctagctgcaggaaagagtgtcctaactcctaacctagtactattcatacgccaattacgaaataaaagatcttgcaaatatcttgaaagttactttgccaaataatgctgacagtgtaatcttttctctggtctctagggccgtggcctcaaaacttgtaaatgttaatttttgtacaattcgcttctcctctattcaatgaaaattggcgacttgccgatttcgttcaaaaataaataaatttgccaaataatgttccaatactcatggaattccatatcattccatgaaactgatcttctgattttcgtcagaaatatgagcatactatctgagctctgtcccgtacagcagcagaagtttgaattgctcttcaatacgtcatttagaaagctccctgtaacttggtcctaaatcaatactcctacagtgtattaaatcttcagaacctttctgtccagcagtacgtagcaaaccagtcataaatccggacaaagaactcaataccgacagagacaaaaacctacttttgtgcctacggattcctcatgatcaaagtcttaacaacagcattcttgattggacatctcatgtgtgcacaagcagatacgacgattatctttactgttgcagcagcccaacatttatgaaatcccagacttatgcaagacttatatgcaaacatttatgaaagattatttcatgattttcttccagagagaatctcattactgcgtcataagaaaccaaatgctgcaagacacggccacagtaacataaagcatatctatcatctcaaaatcaatcctgtacaggaaaaaatatctaagaaacatgaccaaacgccgagttgctgaaattttgtagcaatagaggatgaaaaaagttatgcagccacacttaattcgagccatcgtattcgtaattccagagatggaatcactcatctcaagaggccccgttcttttttattaagatcgatacagattttacctcggtttccattagtacagttttccataatgctaaacggtgtatttcgtgcgaaaaatttatatatagaagttactttaaaatatcagataaatcaaaatttcatgtttgaaataattaaaactcaattaatcatgaactaatggctttctcattttgcatgctcgtacttaatcttcatcttcagtgaactcaaaacggtgccttagttagttgtatctttccatgagcagtttggtgcaacaaaaagccaggaggatgcagtttattctgtgactgttttcaggtctgctacagcctagagctaatttttctgttcattttcagtcacattgtgcatgcattttctgtccttgtttcttgcatctctttcgcagccatgcaagtacaattgcataataaatacagtccaagatgaagggcctctctcctgtcatttttcttctgctggtcccagagacagattgtaagcttgtaatttaggagcatcaattgcagacgaccttccaacagttctgcttttgactggaaaaattggcaatgttgaagttttgcagatgaacttggaacaaaaggttatctgttgtcaacttggacttgcaggtttagacttgatgaggtgaagcattctaagatgctctagctctgaaatcaccctacgcatggattgtcaaaactgaccatttgacctggaacaaattactgacatttgctcagagctagatgaaaggtctatttcttcagacggatagacataccagttagtcaacaattcaacctgataagaccatgatctggtcccgacttttgaccaatgattaaaattgattcacttgcttgcatgtctaattatctatcacatgctgtcatgcctgatcatccctagggaatatgataagactagaatcccataattcagtggttaattacccaggtttatcttagtatgtacagaatattctgaaaaaaatcagaataaataaagcagaaactgtgtgcaatatacttcctttgaatgaacatatgacagcaaatgttggttgctttgccgtcttgcaatcttcagttagaccgtttcctttccgtcagtccgtcttaatgaatgacacgcagagatttcgtgctctctattagaaatcttgcccttttttagttctaaactttttcttcaaacttccaacttttccatcacatcaaaatttttctacacacacaaactttcaacttttccgtcacatcgttccaatttcagccaaactttcaattttggcgtgaactaaacacacccaagtgttcttcagatagtacaaacttaggccgagtttagttacaatttttttcttcaaactttcaacttttccatcacatcaaaactttcctacacacataaactttcaacttttccgtcacattgttctaattttaaccaaacttctaattttggcgtgaactaaacacacccttactagctcaggaactgaacc

SEQ ID NO: 8297 - DNA, 9151 bp, Oryza sativa
atagggcgaattcgagctcggtacccacctatccgcatggccaatctagaagagccactgcacatatacccactcaggaccctggaccatccttgttagtcgtcagatttgcctatgtcgtcgaatgtgttttcctgacacatcccatttctgaggccaaaacgttttttttttaagagagagagagtagaaagcaagaccactactgaattgtaatgtgttattttctgtagcgaccatgtccaaagaggagcagcgtgggctacagggaagtgggagtaggcgtatatatatatatatatatatgtatgtatgctggcatgtcccctctctgttttaaaatattaacatttttagcatggtgacaagttaaacaattttaactttaaccattaatagcaacaaaattaaaaaaaccaatcatgtaaaattgacgttcctaaatttatcattaaacaaactatcataatatgcaactctttttatttaaaacatcttacttttatagatattgttggttaaagtagcatctcggtgaccgtgtcaggatctaaaaaaatgcttatattttgagacggaaagagtatatacatgggcaatataatgatgttatgaggtgatggttgacaaaattcaaaaccaaatcattagcaaaccgtctgctaagagacaatcatgagtttatccacgcgagagatcggaggctctgactgacagtaatcactcagagcgatggtcgatggtttcttcagcttgatatgccacaaacaacaagaaggacgaaaacggcccaaagttgctgcgtcgcccgggcacgtgcaccacacagtcgaacgtacggcgtgggattggatgcccatatatacggccgtgtgagccggtggcttggttgccaaacgttgacattgtgttaatgaattgctaagctaatattacctccgttttttaatagataacgtcgttgactttttttcttacatgtttgaccattcgtcttatttaaaaattttatacaaatgtataagatataaatccacttaaagtattatgagtgataaaacaactcataacaaaataaattataattacgtaaatttttttaataagacgaatggtcaaacatgtgagaaaaagtcaacggcgtcatctattaaaaaacggagggagtataattaacattgtgttgccgaattctctctttgatattcatcttccatccagggtttataattccgatcgattttggtaaaactgttagggttcggtttgtaaaaaccagacaattttacctggttttcatataaataagttaacagaaagtcatggtttttttttatcaatttctattggtttttcttggttttcggtgaattgatagggaccggttttcaactcgaaatcagaaatgtgaaacctgatcgggacatgtcagccaagaaacgatgacactcactggatgaagttaatagctacgttctggtatctatactgacttttcattgcactgctaaggcccatgtttaggttccacctcaaaatttttcaccgtatcacatcgaacgtttaaacacatgtataaagtattaaatatagacaaaaaaataactaattgtatagattcgcggctaatttgtgagacgaatcttttaagtctaattgctccatgatttgataatgtagtgctacagtaaacatttgctaatgatggattaattaggcttaataaattcatctcgcggtttactagcggatttcgtatttttttattagtatccaaacactctatacgataccctatataatacccgatgtgacacgttaaaactttacactcctggataagaaaaccggaggtgccagcgaaaactatctaatggacgaaccaaacggaaattggacaaaccatattcaaaatagtcagaagccgtatttcaacttcaacgttagttcaccagccacatgaacagttgttgcatggaggctcccaaacacgaatattagggtatgacctataataataaataattagagggggtgagacttcgaacctagatcagctagcccaccattttgtaaagctagccataagacccttaggcgttactaaggggcttaggatgagtgtaacaatgaggtcctatgccgatgagctatactatgcgcaaaaactgtatggagcggatgcaattcgaaatccccaaggtcaaagatattttctcgacacctcccattccgatcgagcccatcacttgatgtatatgccagttttcttggtgtcgaactgattttcctcatcgttcatgcatggctgatttgagcccgtaccttaaggaccatgtcaacatgagagtgagaacaatgttgatatatatatgcacacgggcaagtgaatcagtagatgtgaccgttagatggtgggtgggattcataaattagcttcaagcctgcttgattaagacacgaaaagattttacctacaaaattacattggtgtatagtatagtatttgtggcttatgtataaaaaaaaggaaaggtaactaaatagaatttccatatataacaaaaagaaacccatctaaatagaatttgaaatttccaagtgcactttaatggcatttccaagcttggatggggactagcttgacaacaatagtgttaaaagaaaggacaaaaggccatttcattagtgcatttttattgcgaggttatccttttaagcccttcaaccttacccaacatgtccgactctacagccatgtgaatcaaatagctcaactaattgacaactaaaggtgtgccaaagttttctcgcagcatgagagaatgtggcccatttacctggtgatctttcgcacacagttcaatcatatgctactagatgctaccacaccgtcgagaattagagaatttaccatcaaattcgtgtgccttaatttttttacctcttaactcgcataccctctataatatattattaggattctttcttggtattattagtttgaggcacacggatttgatgataaattatctaaattctcccacaccgtcacttcttgatgcgtcctctctgaggaaatcacgcttataacccacctggtgaaatcaccaagctggaggagtattagtctcatacgaactggggctagacgtgagtataccttaacgacaaccacggcaaatcgacaaaaacattttccttggtgtcactcaatcccaaaactatatgcattctctcgttgtagatggatatggcacgattaattgtcgtcctaatggtagcaatttgatgttttggggcgagaagagagcatgggctctcagcatatattgtgatgcaaagtaggacggacagaagcaatggattttgagaggcgcatgcagtgaaggccatgcatgcactgctgcctagtatttgcttctacaaactaatgaaagcaatatcaatgtgtattgcttcttaaacttaggccatccccaacccaaaaactatctagtagtttctatactagctatgtcatatagacactatgtatagaaaatatatatccaatggatggtgtcttcaaattaaattatcatccaatcacctttcttctctctccttttatccacctatccccttgttttcattcttgattcttgtagagatagtttctttatctttttatctctctcctcattaactttcttgccacatcagatttttacttatgtggcaatatattaaatgctatgaaactagatgacatggagggttaggatggccttagagcaagtttaatagtatagcccactgctaactccaatttatctatagccaatctaataatcaattcatacaatagatatttactgtactattaatatatggtcccacctgtcatacacacactgtgtcttggagtccgtgctgcagctggctacagatctgtagcccattgctcttctttctcatcttttatctcattaaaatatgtttatagctagctaatagcctgctattgtacctgctcttatgcaaggtggagaattcaaagagcatcactcttaggatgcgttctgagatgctaaaggccaggtttctaataaatggtgtgttttttcaaatactttatatacaaaagtttcttaaaaaattaaataaatttggttgatgcacggcctgccaaatgcatgttttattgtcgttatagcgtattattataccgtcttcgcatttgaattctttacatgtacgtacaattatagctcgaattacttcggatctttctagaggcatttaggacactgcgtctttgattacagcaataataacatcaccaatacgagcatatcgctgattactagcagctcctatgactcgaatacacatcaattttcgagctccactgttatctgctacatttaaaagggtctgaggttgaatcatattattttgattttaatttgttatttcaatgctcgggaaaaaaaagaaataagtatctaattagagctcgctcctttagtatttaatagggaaattcccaccgaaaaagctatgaaatcacgttgaaaataaggcaagcaattagagtattacgtaaggaaaaatacctcgcagagggtcttatggccgcttattcctattccttttgcgagcacaatactaattgaatccactccccatgtgtgtgcttctgcacctatccgggaaagaagagtggtgagattctttagcccgagaggggacctgggccggattcacaccaatccatggcccaccaacacgtgccgccgacgagacaaaccaaaccctcgttaattcgcgatgccaagtagggtaaatactattatggtatttgaatcttctaaagataaagatgaatataaagattaagtgtttcataaaaataaggttgtagtactgtgtaattaattaagttttaattattataaatttgagaaatggattaatctgatatttataaacaatctaagcataagcacacagatcagtgatgatttaaacacatagcctaattaaggtcaaaaaggaggaggggacacctatcctcatggccgatcgaactgagccactgcactttgacccactcaaggcccatgactatcaagcctattcttggtagctgtaggagaattgtctaacattgtcgaacgtgttttcctgacgtctcccatttctaagtccaaaactatttttcaagagggaggggagtgagaaaccaaagccatatcaaccttgtcaccagattgtaccccccctttttttttttgacaatgtccgaagagtagtgtgaatggactccaggccagggaagtgagtacgcggatatatatgctggcatgcgtacacatgggcaatgtaaatgaggttatgagatggtggttgacaaaattcaaaagcacatcatcatcagaggggggtttcctccccacgcttgagatcagaggccccgacaatcaagaccacaaatttgataaattcctataagattttatatggcgtacatttgatttatgtattttttttcttatttctacgattttcattgacgcgtttcataggagccctaaattaacctccgagggttgatcgcaattcgcaacgggtggtaattgctaaacccagggatgtaattcccaagtgcatagcacgctagaagtacgcattggccttgatcggccgcgattgctaccatacggcttcagtagttgaaagccgctgcaagtgcaagcagacattttgatgagaatcggagaagctagataactatggagatggtccgttgagccttactactgttgcccaaagaggcaaatatctatgcatgagccatgacaacgctggcgagctgtactagcggcctacactgtcgaaggtgtttttcctgacgcccccatttcctatgccaaaacttggatacttgagagagagtgtgtgtgcacgaacttcaagtatgtatggttaattgtacgtacagatgttgcttgacattgagttgttctcagtcttagtgagatgatgtgatgtccaaagaggaggagatatatatgcattaaggactactccagtacatagatagaagtgagtaggtggatacttacagtggtggagccagaaatttaaatctgtgaggtcaattactagtggtttgtatttaagtggggtcatttctctaaattcttttggatttatacatgaaaattaagatttataagatgtttttcaaaaagctgtggggtcagccgaccccacagaaatggcctaaatccgccattggatacttatacatactgatatgagaacacatgagcaaacaaatgagattatgagttggtggttgacaatattcatcaaaagcatagacggggaatttgtcatgataattgggaaaatatatactgcaaaccatatatgtagtgaaaattactgttgaatcgaaaaatgaacgtctaagattcgtccacatcaccactcactaaaatttttactcgtgagtaaatctactagtaaaattcctcgtgatgacatggactgatattttccctgataatcagagcgacgctcgtaggcgctccataggcctcgtcatcttcacagtcacacaccgaacgcgacaagcagaccgaaagcccaaaatcgcctctcgcgacgcggcccaataactcgtagcccatttagccgggcgcgtgcacccgattcgaccaccgccaagcccgaatgattccaccacacgccaccgattcgattccgaccgttgcgtccgcctcaggtgcgcgcccgcttttccaccccgaccgttgccagccagccaccctcgattccgcccaaaattcccccttcaaatccaccccccacaaacacgccaaaaccgcaaccaaatcccctcacccccacgacgcacgcgaaaccacctcgacgaatccatggcggccgacgcgctcgtcgtggcggggcaggcgaaggcgaggcacccgctgagccagatcgcggagagcgggacgcaccggctgctgctgaagcagtggctcaaggaggaggacctgctcgcccgccgcgtcgccctgcgggaggcccgcctcgacggcgcccgcaaggagatcgccttcctctactgcgccttcttcgccttccacgccgcctccatcctcctcctcttcctctccgcctccgcctccacctccgcggcgtgccggcgctcgtggatcccctgcctcgtgtcgctgctctcgtcgctggccatgctgtgggcgctgcggtacaaggcggacacggaggcggtgctggagcggctgctggcgcgggagcgggaggacgcgctgctgctcggcaagtgcgtcgccgagctcaagcggaaggggctcgagttcgacctcctcaaggaggtggacgcgctgcgccgcgccaagagcctgcgcgtcgaggccaagggcggcgccggcggcgagaggcccaagcgctgggcggccagggacctcgccgtcttcctcctcttcggcgccgcctgcggcgtcctcgtgctcaccaggtacttgctctgcaattagcccacccaaccgcaagaggaggaaggaggagatcggatcgcagttgcgccttcttggcgttgatctaatcccacgctgctcgttcgtgcagaactgtctgttctgcgaattttgatgttggttactcacttcgttcagtttgtaataaggacaaggattcgatacattttattttgctttttgtgattgtgattatttcagagagcaaatttactctccaaatgtgcactaatttaagtagcctctcatctgaatttctccaatccccaatcactccattattcagaggtagtgatgttcagaattatttaccttgggacaaggattttttgcttgaacaaaaggttgggatggctagaaggagctagccatccaatggaattaagataggaggagtcacatatttccaacccttcatttaatccaggcggaaggtgaggagttcaggaatcgaaccctggcttgaacaaactttggacaaaatttaaaccgttaaaattgatatttttttgaacggaattaaaattgatatataactggtaaaatatgtattcactcttcagattgtaatgcactactaccaatcagtttcaggacctgggctgtcgacgagtgcaaatttcttgtagctgtcaccgtctgaattctgaaattagatgtgctgaattctgaagttggatatgctgaattctgaactctgaagtagatgaccaaaaaaaaaaagaggaaaattgctgctttgcttgtccagtagacacacctaatgtcctaatgctcaaaccattcagggggaacaggaacaaacacatagcagcatgactataattttaaggcctatgcatgtttacaaattagtacaggttcaagtggatatgttaattttgttacttcaacatggaagttggatctcgacagataattccatcgacacttggaagttgacactgctaggtacagtggagtactttgtttccacataatcaagcatttggttattctaacagaacttacaaactaaacaatgctgaatcagtagacttgatataagtggcgcccaggttcactcatgctttgagtaaggtcatcaagttcatgtgtcttgtcttccctctgcctacaaaaatctgcctcggcaacatgagaaataataacgaaccgtttctttccaacaaattttcttgtggtgctccatttaatgtggcattattctgctaggttcattattttgtttgcgctgaatccactacttggttcgtcgacagacaatttatgaatatgaaccaaataatgctaaaccattaaacctgagatgagtggcaccaaggttcactactcactttttaatacaacagaataggatcatcaattgtacataaccctttctttccaatgaaatatcttgttatgctttcagtagacaatacgatgcaaaaaggagaaatgttaatttcatagatagtgcactcattaagcgctgcaaaaacaaatactacctccattttttaatagatgacgctgttgactttttctcacatgattgaccattcgtcttattcaaaaattttatgtaaatgcataagatataaatcacactt

SEQ ID NO: 8298 - DNA, 26478 bp, Oryza sativa
atttgtacaaggatgggtcttggaacagattgcgaggatgatggaggtggctgatccaagtccaacaggattctatgactgtagatattgatcagtaggaacagggtttcagaatagatgctagatatgcagaattcgccgacaagaacagtgccccctttgtgtgagaggctgacatgtagggcccatgctgcagaggctgctatcactattagtcttgtacttttgttttctgatctaatatatacactccagatgggatgtgaactgtcatacaagatacctgattgttacttgtgtacttgtgtctgtgatgaactgctggctatatgcatactacacctgtttcaaaatataagtgatattggctatacaattcatagataatatctcttagattttgagatggaggtaatatctcttagtacttaatgaatcattttttggggtgatcatgacgaatgatgttattgcaacagcaatgtgcaactccctttgtaacttacccatctcactcaggtgtacataggcaactactgtcaatggttaaataaaagttggctaaggagaatagctgtaactctggtaacatactcaagaatcaattcaaaggtaataacataagtgctttgtcactgagatttgattaaattcacacaagtcattcaaagctgcacacgtatgcgcagacataaccatctgcaacttgcgtgcgacgtagacatttgatctggtgtaaagatttgtcatcagtggacaaaatgttgttataagttgtagaattgcacataaacaaatcatggatcattttcagaatttcttgtgctgactcctaatttgactcttccagcaccctagaggggatcaactggattactatcaagctggtgtccaggtgattcaattcaatgtatctgaatcacctgatgagtgacagggggtgaaactgtaaaaaattccataagaaatccttttcaggtcacctctatgaacagttgtgcgaaaaagatgtgtacaaccattctggatgctgaatgtgacttcccggaaaattatatcaccatcttgaagctaaaatggcactaagagccataccacatgaacagaaaacatccagccatacgaaatatttatgtgtgatatttaatgtgttaggataaccatggaagcggacaaccagaatttgtggcttctctgaccaaggaaactagagttgtgtttagatgtaaagttaataaaatggtttgagctagcagtgatagactagaaacagtccaaaacagaaccaacagaattggtgacacaatggtaaaaagacaaatttgtattgagcaaaggcaccatcgaatatactccctccgtttcaaaatgtttgacaccgttgattttctaacacatgtttgaccgttcgtcttattcaaaaaaatttgtgaaatatgtaaaactatatgtgtacatgaaagtatatttaacaatgaatcaaatgatatgaaaagaataaataattacttaaattttttgaataagacgaatggtcaaacacatactaaaaaatcaacagtgtcaaacattttgaaacgaatggagtagtacacagcaggataaaaaagttgtttgattctgtttgcatctattctgaagacaaacaggtatgtgtgttcatttatctatgatgtgccgcatatgacaaataatcagctggaataaaacatgaatatataacaggaaatatcagaaaccaccccgcaatttacactaaaaagaaccactgcaaaaggagagaaatatgattcagcagtagcagcatagttcagaatgtcacacctcagctatatttgaaatcagcaatgctgatttttcttaaaatacaattgtcttaatacaaagaaattgacagaaacatcatttctggggactacctagtaggctagtacctgctggaggacagcagagggaagcaggactgtgcaaaacacaccaattaggaagatggcagcggaaaaccataccataccagaagcttaagtacctcttggtggatgaatatatcatgtaatagcagcgacacataggtagttagaagtagatgcggcagtatcattttcctctccttccagcccagaaagctgagatgtgtttccactagagcattttctgccaaaatcatcaaatgagaaagaaaatcgcaccacacaaccatgtggataaaatagtacgatcaccatgtaatttaatataaaacgaaaggaaattcgaacctttgtgaaagcaatttctcatcagataaagccttctcaagcctctcctcgaatggtgttgcgtgccaactcaccttttgatcctaattatgtaacaaactatagataagctatttttatatgtacatatgagaaagtaagagaagcagaagcagactttacttctttgtatttgtttgttgagttgggaatgccatttccatcccaccatttaggagtgaaagtatctggttctgtgtctctccagtgagcagcgaccaatccaataataggcctatcttcttctgaactcttagcagaatgagatctgtcacttgtcaagggctcatccctgaacacctttggatttggaggctttaaccactgtgacaagcttgggaattcaacctcagaatcatttcctttgagcaccttctttctgctggaatgaactagcggctcacttttaagacatttctccacagattctgtgcttgaattctctcttctcttattacaggatgatactgaaccctcagaactctggaatagggaacattcattagatattgaaagttcaacagaaaccaaactgtcattctttgcatacttgaaatcctcatctgatatattgggctgacaggattctagtctcaatttttcacagcttccagaggcctcaacagaactcacagcttcatatgtatgctctgaacaagtcctagtattgttctcatttctcagctcttcctggtcaggtgcatgagttgtagctggtgtctgtatctcagcagtcgcttctgaaggagttgaaatgggtaaagatttggattcaaccaggttgatatcatccctacatgtgaaagacggtgaatctaaggcggttaacttgttcccacagttgattgcactgtcatcattgcccacaacctcaacttctatgctcttgcacacagcttcagaatcattctggtttgatgcatcgcactctttccaagaagaactgtcatagttaagcagaaccatcgaaatattaaattaatctattcagtcattgcagcaaaaaggaagccaccagcctcatcagaagttggtaacaggatgaaggcattggcattagtagcgaatagcacaaggttggcatacctcatagcatcaggtaaaatggagctctgatgagaccctgatggagtttggcaagcctcagccttcagcccttccatgaattgtaagtcatcagaaatggcaggaagacatgtcaaatgtgtttgactttggtcagtattttctggcccttttatgatttcatttgtagtttccaccaatgcatcacggtgtatgagcaaacggacctgttgacaccggtgaaagtcagtctgtctaccaaaatcaaacctactggaaaaggaataacaaataaaaaaatcgttattacacctccactctgtaatctgtattgcctaatgtacagcaacaaattcaaattctcatgtagataggttgggtatgacctatgaacagcatcgtacattcaagaccaatggaacaggttgttattccaatttagaaacacaactggtcgcacaattctaacagataaacaacagccacaagggtcaagggatatattagttctttttgaggttagagtaacatgtaagtatctaccacctagagaacaatgctccttcatcattgttgttttatagaaaaatgacgaatataatatagttaaccgatcaaaaggtccttggttgactacgaatcacagtggggatactagttgtcagtcatccaaattctggctcaagtggcatgatacttgagtgagattttcaaaagggcgaagaactagtcatgataaataatgggaagaaattagcggtgaatcggtatgcggaatcggaatacctcgttcttgtgctcctgatccaccttcgtcctctcagtgatcccgttcgctcccaagctcgtactatgctcaaccctcgacccctcatcttcacccaacaaaaaaaatccaaacaaacccaaaaaaagaaaaaagatcagcacgaataaatgacaaaatcgctacatcacaatccagaaatgatcgcgataataagttcaaagagaggcgcaaaaagggaaaaaaaaactctccagaaatgtaccttctcgcaagaatacagcggagagcgcgttcttggacggcggcctcttcctctccccgacctgcctcaccacgaaacacaacacaaacaatcaacccaaaatccgaaatcgaagcaccccgcaacacaccccccaccaacagcttccccgccgccgccgcataccttgggagcgtccaccggcggcgaaacggagggagacgaaaccagctggtcgcgttcacgttcgcgtcgcccctcgccgctgtacccggccacccggaagcagccgagcagccaccccatcatcctccccctcctcctcaccgcgatgccgccgccgccgccgccctcccccgagaagccgagccgtgggcgcggggcgaagctttcatccgcctcgaggaggaggaggagcagcaactgcgccccaagtggcaggcaggaggaggaggcgaaggtttaagcaggaggaggtggtggggatttgaaatttaaaatcgaggcggaggaggcggcggcgagggaaaagaaaaacgaggcctgcggagtttgcgacgaccgcgtgagcctttttcaggggctttttctttaaaattggaaatgaatgattaacacaagatggggtttatcactttatctctctcttttttctctctctctctctctcactggatgggagcgattttagggggtaataaagtgttgcttgtgaaatggattattatgaaattatgattggtgttaattttgccaatatagtggctcaaatacgatatagggggaaataattgggaatgaactgtgtgtggaaggttctagatgttctcaaaagtatcagcgcgagttgcgaaatctcaagatgaaatttagtttgattggaattttttttgttctttttacttcttgtattgtgttttatacttttattgctctctgtatgcttgcttgggtcccaatcacagactagactactccctccatccaaaaaaaaaagacaaaccctgatttccgtacccaacgtttgaccgtccgttttatttaaaaaattatgaaaaaaattaaaaagacaagtcacgcataaaatattaatcatgttttatcatctaacaacaatgaaaatacgaattataaaaaaatttcatataagacggaccgtcaaagttgaacacggaaactcagggtttgacctttttttttggacggagggagtacactttttcaggtttcagtagataaatgcctttgtttggactagtgtcaaactctactagtacttcctttcaaaaaaaaaaaaaaaactctactagtactagtctttttccatctaggaatatgcagcagttcattctagaattgcgttggaattgacctgaaaatttcgataagggtgcaggaaaggtactacagtttaaatttaccccaagattggatgattatcttttgcaaatgaaaaaagtacaccgcaaaaccggatacaacacatccctcaacttataaaaccgtacgaactaagtcttttgacaccgattttatctggcggctgagtcagcataggacccacgttggtcccacatgtcaggatgccacgtcggcaaggcagcctctcccttcttcctctcctttcctcctccccccccccaccccccttttttttttttctctctcccccactcttctctctggactgggtaggccggcagactagttttgccggtcactcccgaccctcgcctcgccgcccactcgcgccgcagccgcaggcacccctcctcctccacaagtagcagatggcgtctcgtcctcctgccaccgcgcgcgcgttccgagagtccagggcggcgttcgatcgattgatttgatttggtccggtgaggcgacgccattgttgcgaccaagaaaccgtggacgcgtggttgtggaacgcggcgtggcgagatgtaggccgtggtggcggccacttctagagcctgggtggcctccccgcggcggcggcatgtcgcctcgtgttcttcttccccgatgacgacgactctgtcgtctctcaatcgatgcacggtcgccggcgtgctgccgctcggcattcgcggcgggcgcatgctgctcgcgcccccacttctgtggaacagcggcgccgcgacgaggaagatggcggtggcgacggccgcggcggcctcgccaccggcggaaggtggcgggaaggcggacggcagcgccgtcgccggcggcgtttcgcggacgatgcagctcggagccatgatcctcgtctggtacctcctcaacatctatttcaacatcttcaacaagctggtctgcacgggcatccctcctgaagcaccggtgcgccgccgccgcgtcgccgcacttcgtgtacatgtcaaccagcgcgttccacgcgacgaaacccagagcaaccttcctttccgcgacgcgccggtgcgcctcccgacccagcgcaaggtctccaatttgcgtgcacgccgagaacgcgacggcggcggcggcgacgatgtcgatgcacacgccactatcatccgccatggcgaagaaaagcaccacagcctcgtcaagaacccgtgcctcgcgtggcttgtcaccatggccgtacaagaaacgagcgcccacgcggaggcgagctcgccgtgtgcgaggtagagctcgacgagcccattgcggacggcggtcgaggccgagctcggccgcgcgtgcctgcacggctggcaccgttctcgctgctgcggcggcggcggcgacgacggtagcggtaatggataaggcgctcggtggcagggcgaggagcggcgaggtcgacgatggccgccgcccacggcgaggtccccgtggaggcggtggtggccgacgcatggaggaagcggagcggagcctgagcgggcaagaggtggttgggcttctcgtcggaggtgtgggttccgaggatgaggcggtgggagcgggtggagtccggcgaccgggagcaaggcgtaggcggcggaggggggagcaaggcggcggcggcggcctccactctcccccagcctctccgcttcggactgaggccgcgtggtcgccccgtccttggcgccgacgaggagaccatgagcaccgccgcgccgagagtctcgcgctcacgccgccgccgtggaggagaagaggacggacggcgacggcgaccctatccctgctcggagccgccgccgtcgacatgagtcgccgccgccgctcctccctcgtctgcacgccgcgccgcgccgctcctcccccgcccgcgtgccgcgctgctcctcacccgcccgcgcgccgcgccgcgctgctcctcccccgctccgccctcgtcgcagccgcagccgccgccgccgccgcctcttcgctcgccgccacgtcgccggccgccggacgtcctcctttcccacgtcgctccggcgacctcttccccacccgccggccggctttgccacttaccgctggatagggatgatgacgtggaggaagggagaggaggggaaagaggtaaggatgatgacgtggcacgctgacatgtggggcccatgtgggtctcactaaaactaggtttaaaacctaaggatctcgggtgcactttttcctttgcaaatttcccttttcctgtactccacatgaaatggcgctaatgcttgtgctaagccggcccatatactatctgcagttgggccatactagctgtggaggggtttccggcccatatactgcctgcctagtactctcacaatcacaaaacacaagaaatttcatttgctcctctggaatctcaaatgccaaaggttcaaaggtatagttcgtgcctctgaagtctgaaccctccatcatctagaatgtgaggcgaaggttcaaattcagtcttcagatatgattgcttgtttcaattactagctagctgcagctaatcctaactcaatctaacagaaatagatgcacttggactacaattcctttattaccatcatcatacacaacaaccaatattcccttcaagacatacagatacaggtggatgagcagcattctgatcctatgatcattttaacatatgctcacaaacagctatggacgtatactacaatctgaatataaatcaactatggacaaaagcttgtgaagcagcgcaaaacggaggtaaggtcgcacctttgttacctcggtcactttactatatctttgaggagcatgtgtggaattagatctctgtggcttgagctgctcgcgatcccgctagggctcgttactacgtctggtgtggtttgatattcccaggtttccatcctagttcacgagctctttcttcccacaaagcagtcagtttcctttgttcaaccaatgcttctgatgatttttcccgggcttcttcacatgtatccatacctgaactgcatttgtcagcctccttttgatattgtgaagctaattttttcgcctccagcaattttacatctgcttgctgctgagcttgtgttgcctcttcttctctctgcttcagttcttctatgagtagctccgtgaaactcttctctgtttcttcaccagacgcacggctcttaacatccttgaattgtttggaacagtctgcaaatatcaaaagtaaccacaatcagtgaaactgcagcctctaaacaactgcaaaacatgtctataaaagataaatttcaaaaggtgattgtcatgtttattgcaagcttagatcaaatgaggtaacaatgttcattgtcaagataatgattcagggaagaattagagttgctacgatagaggctaaggtcactgaaacaattctcatgaggctgtgtttggcacagcaagttcccatctcctcccctcgttttccgcgcgcacgcttttcaaactgctaaacggtgcgttttttgcaaaaaaaaagtttctatacgaaagttgcttaaaaaatcatattgacccatttttgaaaaaaaaagctaatacttaattaataacgtgctaatggaccgctccgttttccgtgtgtagaagattggttcctatctagcccaagcgaactcagcctgttaagcctccaattctttttggactttgttatttcatactactactaggtattatgaatgagcagctaaagagtttcaaacatttgttatttcatcaagaatactcacaaaagtattaaacctttcatttgttagaggagaaacctaaaagagcactacaaaactattcttccttgtcattcatcatagcccgaatcgatgtaggagaaaaggtaaacacatcacaaaatatttcctttcgtaagcaacggcagtccatctgacgcttgtaaaaaatcataacactacaacagcagaagcaacgaaacaggtagggattggctcacgttgatcattaagtaacaatcttgtataacaaactaacacccatagtaacaaagtagtatccttttttagcatacccacgagctatatgttcaattcaatcttgtccagcatccaactttctttccaccactaaaatctaattgagctcctaagtaactccaaaattattttctccctcagttttcagcaaaatcttaaagttaagtggaacagattctgccaaacaatcactaattcagccatcacaagcccaacacaatttttttttcagacaaggaacgctaaactcaacaacatagagaagctacagatctccgaatctacacgctcatatcgtgctacttggttgccaacctatcatcaactaaactaaattcctttgcgacatgtcaatagcaaaatgtaaagctactacaagaagccgcgatgctaagctctgaatactaaagaaaagaaggaaagcacaaaaaaaaaggaatagagatatcggatccgagcagcgggcgggtaatggctggatgaatgagctcccgcatgtcaacaagatctgggaggagagtgagcaccgacacggaccttcggggagcgcgagcagcgggcgggcgtcgcagtcgcagtcgcacgcgggacacgcccccgtggagcggccgagcgcctcgctggcgtgccagtagagctgcgggccgacgatgtaggcggcgaggccgagccccagcagcgccaccaccgcggtcaccagagccgggctggggccccacgacgaggaggaggaggttgagccgcccgccatcgccgacgccgcgcgcgcgcgcgaggatggctgctgctggtatacagttgggtgtctcggcggaggggaggcggcggcgcggggaggttaaaggagtaggagtgtggggggagtggagatggaccggacgcggtcggtggaggtgggatgggagtgtggaagtggagagtgcagacgggcccgaacacgatatgagatgggatgggatcgtgggatggtggtgggttcggcggcagccggcctggacgaacgcagttgtgagttgtgtttgaccaagtcagccaaacaggtaacagggtccaaggtttaagcaaaaagcacaccgaattccgcggaaaatgagtggttttttatgctctcaagtctcaatgtcttggttaccctcaacctattcgggactataacataagtataagttatgatttgtttgcgcaaggatggctaagaaattcttcctccggattaataatatttatcgttttggataagagtacgatcttaaaaaaaaaagtaactttaacaactatttcctattataatatacatagaaatatcaacaaatatatagttttcttgaagtatttttttagaaattatttatagtcaactattttaaagtttgactttacccttattcgaaacggctgatattatcagctcggagggagtagttggtcacaagtgtgacatgttagctctaaattcgagattgtgatgtatgagtcccaagggtaagaaagtgtggtatgatacagttgtggtagcgaaataaacacatgcctgagaaaatgtagcatgactaaaatgtgacgtagtaaaatgaagcaatcaaccagacaccctctaatcgtgcacgtgcaatagacgtatccgcataacacatcacacgagacataaatccatttaaaatttattgtgctttttcacaatataaatcacacatgaaaaggaaatttttataaaagaacgataacaacaagcagtcaaagtgagatatgttgtaactgcagcttcatggtgagatcataagctcaaagtgttgttgtgactaggggatgcaactggtatggatacttttcgtctgtttagacttttttcgattcaaatttttttatcggaaacaaaaacgaatataataataacactatcggccggtcggaatcagaaaacactctatgtgggaccaggacatatattactattatagagctagttatatgccattcttatttagaaaatatcgtgtaaatataccatgtgacatggattatatatactgctatccagttcatcgctcaattttctacacacctttactatgacaaatttcatagacaattcattcttatgtctatgctcttatgctaacatcgaggtttcgcagtctcgacgaaatctgaatggattctgttaatttcgaatattttgaggcggctcgaaatatgcatctgataacagttttatgtgaaaatagtagaaattcgttcagaattaacaaaaaatatgaatgtctctattgggctcgaaactcacttgccaatctcgaaaacctggttaacatgcgtggaacttgggagtagattttcgacacgctaaggctctctttggcacaactcctaattcaagaatttttttagctgagaatttctggcttcataaagccatggatatccacgattgcgttgataatattttagactaatgtttctattttaggtaaaatttaaaaattttaaactactataatttagtaacatataaattttaaatcaaacacaaataagatatctatacgccatagctatatggtgaatggtcctaggcttcaacgcggcttaggctgtgtttggatccaaactttcaactttttccatcacatcaacccgtcatacacataacttttcagtcacatcgtactaatttcaaccaaaacttataactttggacacagccttggaccgtttcatcgttgccagatcaccactcgtcgatctctatgcaagtggaccccctatcctcaaaacacccgtaaaaaaaaatccaaaatcaattgaggaaaaagaggatcgcgccggccgatacctccatcgtctccaaaaactccaaacccccgcttgaaacccacgacgacgaccaccaccaccaccacggatcattccgccgccgccgtcgccgccgcgcgcctcccctccagtcaacgctagaacccgccctcgacctgccatggacccatctcccggcctccagcgccggcccgcggcggccgcggccgcggcggtgaggggggaaggcgcggagcctccccgcgggcagcgcgtcctccacggcgacatcgacccgccccccagggcgcggccggcggtgcagaagctggccatcgccgccatcgtggtgctcgggtgcctccagttcctccccgccacccacttccgcgaccccgccgatccccagcggaactggatccccttcgaccgctcgcgcaagccggtggtatggatacgatacgatacgatacggccgctgctgcgcttcaccccccccccccctactgcctctctcactctcgcttcatatagctctactcttttgtccattaatttttgccatgtttgagctccgggagtaccatttctggaatggtgatacaccagttacattatcatgctcaggctgttacattttcacggtgtaatggaatattttcttttaatatgcctttttcccccttatcctggaggtgaaaattgggtttgatattgaaatgcgaaatgtgtgaacaagacatttttggtacttcctccgtccccctaatataagagattttggcatttgcttgcactgtttgactattcgtcttattaaaaaatttagaattattatttattttatttgtgacttactttattatccaaagtactttaagcacaactttttgttttttatatttacacaaattttttgaataagacgagtggtcaaacagtgcaagcaaaatgtcaaaatccgttatatttggggacggagggagtagttggtggcagcgtgacttaaactgggattgctgtgtcatgctagatatctcaggagacggtattgttttggtcagagttaggggaaaagacaaatttcttgatgtactgatggttccttttgcaggatttgcccgatgaggttggaagcgttaatgtcttttcttggataagctgtctggatcttcggactcttgctgtgctgacaaattccaccatatccagctcaaggttctgtttgatttcagcatttgtaactaatgcatatttcaaataactatagtgatagcaaaaggataaactcttttgctattggatattattattcagtgttcatttgcactgttaatgatatggaactaatgacgaaatctgttttcattctcaagtttttgttttctgatgtaattgtctttgtttaacagtgatccccataacatatccttcaatttcttaatacctgaaagaggcacagataaatcgccctactacaagctaaaagcagtactgcctgattcgaatgttactgttgctaggtgagggggaaaaaaactaaaactctacttttatcctgggcattgttgcaccctgattcctgtttcgttacattacagtcaaaagaaaattgaggacaagctaaacgttgccactccagaaggaaacctcttttggtcattccccaatgaattgtcacccatcattattggaacgactcaattctcgcaaaagagatatgtctatatctcagcggactcaattgtaaaggtacttacacttctctatatgtgatcatttactcaaacctgtcattgagttctctgaaaaaattaataattgaagtattgaacctgtataaactatcatgcgagcattagtgccagggacagttccatgcaattgctgatctaattgcttgttcacctttttcaatcatttcaacttgtgatagtgaaccataattctgatttttatgtggaatacattgaatacaaatctaccaagtttcttcaaagacatcactttgcttggctagcattatcagaagttttttttataaaaaaagtcaagagtatggaactaaatctgtgattccatgactggtgcaacagttgcttcaaatagtcaattaggaaacaaaaccctgcatatgtaagtgagtagtaattgagtatattgccatggctgtgttctttgatgaaggacatagaagcttttgagcattgaaatgttgtgtatccaactcaaacatacaaaaaccatacatatgtttgggttaacttatgttaatcgtcaatctcctcccagggaaaaattgaagatcttggtcgcatcgatttaggcacttatgctattgctgctgttgaagattgtaccaagcgcattggtgactatgttagtatagatgttctgaatgccgttcagaaaacagctccgaaaaatttggtgtataccgaaccttatgacaaggatgcatgcttacttgattttgatgtgcttgtggtggagccacgcaaactacggaaggaccttattgattctatcatggtgtggttcagggctttcagtctagccaatccaaggtcagtgactcacattctgtattgggcaacatccaccattgccagatcaccatgcactcaaactcattcaaatagcgcactgtttgtctgtggactttccatttttcagggatcaaattaggttggcaataacattggccttgtatgacaattatctgaagctcccttccaattggaagcgcgcagatgctaactcagacatactgaactacaacgggccaaagaatgtttgctctgaaggtggacgtcagcttcaagaagaaggcaatggcgatgagtggcaactgtaccttgatcagaaatcccttgccgtacttagttaactgaacaatggcatttcatccaacaacctgcacggttctctgttgcttggttgttgggagctgacgaccaccgtgagaaatacgcttcttgttaacctgtcacttgctcgtgaaaggattgtgttttgatgttgtactcagtagactgatttgtttctgctaagcttaaagaatgttcgtttcagaggaatataaacttcagttcagccttgttttgcttcctcctttctcttgcatttgacatatcctgtacaacactacaacttgactacacaagtccattcgagtatccagctgctgacattcttgatggcactcttttgacctgcgcacaaggctgaatccgagacttagccgcgctcaattgttccactaacatagaaaagctgctcaagctggcataatttagtttctacattattgccattacataatttacagctagattgctagtactatggtacatgctagtatatcacagcgtacatcacaggaaatcccagactggaatggtgtactggctttgatccgtggcttggtgacccagttgaggattgctgctaagaaactgcaatgactggatgtccggaggtggggcctacacgaaaacacggcatgcgacctactattaatttttgttaagcaattttatatgatcaaaaaacaaaggttaattccactacaagaaaagtatcaaatgagatcatgggacagagtgataacaaaaggttgatttaactataacacacctacatgaaaatcttcaagggaaatatgtgtatactcaacgaacacttgtagtcttagcctagtaattgctaatggaatctgtgaaagtgaaatcccttgggaagggaacatgggtgtaagttataacaatcacctgggggatttgtggaccgctatgaaagggtggttgctgtagatgaggttgctggagaggagcaggtgctggttcctgcaactgttttggagttcaaatttgcaagttataagaagaacaaaattgacacttctcttcagccattcatcaatgtagtcaatgctccaattacctgcccaaatggtgatatgccaggaaatccctgaagagagctaagtccgaattgctgtgcaatatacggtgcctgtatatgtgaagcaacaatattcagtacatgggtcatacagagttcaactacaaactacagttatcaccgtctgcactctgttcatcaaaactggggtttaggactggagaaagcagaaagcaaatataaatgttacctgcattatatggcttgttgcaagaaattgactggttggagttctcagatgatttggaatgtcatttgatattgtaggaggatcaaccctaagcggaacttcagcctcctcaggctccggtagacctacaacattttaataagatcaatccttgatctatataaaatctagttctgaagaagcttggatgaagaacaaaccttgtctaccctttttcttcttatttgattgaagaggactttgctgctgccgacgcgtatctacatttttaattttcttactacttactctgcgagtttcactgttgctggcttcattcggaaacaaatttggctgttgaactttcagtatagtgctcaatgaagatttatcatgtaactttgcttgcaatagaagttcaacttgctctataaactgatcacattggctctccatgtatgtataagcttcaatattttcggcagcttttgctgcaattttgtagaacgttcgatacaacatgctgtatcgtttagacaacaagaacctgggatcttcatctacagcttcaaaaccatagttctccctcggagattcactctgagcatcctttctccatcttttcaaaatgtagtgtggtggaagttctttaatatttcttacctcaagaactttcagtacatggcaacatggaatacctgtgaattcaaatttcttacagctacaaacaaccatacattctgatgagtcaaatctaacaaaatggtcacggggcctgtttttgacagttacctcatactcagatattggtccaatctcaccacagcaataagccatgcaagtcaaggtcagttcaaattccaacctgaacatctcaaaaagtgtaggagtatatgcattagcagcttgccaaagcatccgcagaggtgctactctctgtgccatttgaaccccaaggtagtcagcttgttgttcagctaggcgtttgttctccaaaagtttgtcataattgttaaagaaggatgggaaatccgtttctttctttagaagatctgccagtatagcatcagtgttattatcacttcggagtgcggctgcaatatctgcacagaatgaatcacgtccataaggtaaagcccatctttctctatctgcatacaatttacctagccactcattgtcctttagattgtacttatctgagaggatttcccagcttgacaagaaatccccctcctcctcatagccatacaaccacatgctaaaatcgtctgcaaaagtttccgaggcttggaaggcatcccttaatatcttagtggcatttttatataaatgaatcagtgaaaagcgctgggtggtccttggccaaacagaagcaactgcttcactgattgctgtagattgatcgatcataactgtttttggttgcttgccactcattgcagatttgaaagtttcaaacaaccatttgaaggattcaactgattcatcataaaccaatgctgcaccaaatatgactggctgcttatgatggttaacaccaataaacaacaatagaggcctactatgatcacttgtgctatatcttgtgtcaacacacagtacatcaccaaagtagtggtaatccagaatcgacttaacatctgcccagaatacatttgtcaactggtcatcttcatccacttggatggcataaaagaaagaaggatgttcacctttcttcctctgcaaatattcataaattgcctgggtatcacctaattgcatatcttttgtgtgccttgtccttacataatttttataatcatttggtatcaaaacaactcttggtggatctggaggctgctgtaactttgctaataacttatgtgatctcagaacctggatgtccaccaaaggagtttcaagatcatgattatgatcagccacatactcagtcactacatatttgccactcacagtgattttaatagtcatgtgtgccagacaaccagttcttgtttctggccgtggcttcttgggatcagtactgacacttttagagcggaatccctctttagaacagacatatgcccgagattttgtagtatttgttgctgttttttccaaccatccttttcggacgctgaaccccacagttccagcataggtgacatagcagtcataggccttgtcttcattcaggaaaaccattccaacttttggttctcctccaggtccagcaactacttccatttctggatctggttctccttcaattatttcatcttctttactctcaccctggaccaaagaaaacaactgtatgtgttaaagcaatgaggaatcgaatataaagaagtggttcatttggaatttttttggggttcattaggaattaataatgtaaagtttaaagtataagccattgttcccttttgttacccaatcaaaaataagacggaggacacaaacaattagcttcaatgcagcattgcagagaaaaaacttttcaaataaacatacatcatttcacaagtgggtcttaccttatcttcttttttgagattttgcttttcaagacgtttagagcgcctttccgaaggttgctgcagtggttgccaattcatgaatataagaaaatacaacaagatggcataaatgaaatatctatgtggaaccaatatagaattaatgtatagtttgtgcagcagatgccaagaagtgtcacagaatacacagtttgttttgatattaaccccagagaagtgaacaattacattggtatgcaataaaagatttgtgtattgctaataattcctagttcagtaacaaacacaaactgtgcaaactacaaatgaagtgatagtgcattctttcaaaaaaaaaaaggaaatttatatgccagtttgcaagtgagtatatcaagtgcagtgagttgtaaactgagttgtgtgacctctaacttctgaggtactaactgctagataccagatgtgtactattttggctcttctcattggctaattaatcacgtactaaaatggaaaaaaaatacaaacagagcatcagcaatatccattagtaacatggaagggaagttaccgtcagtccttcgcttgacagaaatctacctccatcaccacgttttcgtctttcagccaaagcttgatgtgaggcgatctgaaaacgacaagcatatacttaccaagtgaaactagttaaccgatgtgcatgtaccaactactgttggtatatatccagacaattcaacacttgtagcacatgcttatgtgttgacatttctagcacaaatgtatatatcctcacatgcttttgttgaaatttgaaaaactatctgaaatccttaaatatgatcaaccttgcatgcatcacgtatgaaaatgtgtgtgcatgacctagcgacataaatatcttatattgcctgggcacaatggtcagcttccaatcactacaagaaaaatgacagcatatatttctatccaaagctatatattgttcctgatttccagttgtgggctacagcgctttgtcgctttcctatttggatcactatccagttgagcgactgctaatcattttgagacaacattgagttcaaaactcttgacatatatatatgctcatttgcataaataaagcatagctacctgtgcagcttctattaagtgtgtgactagtacaaaaaaataacttccttccctttctatgttaaaagacatgacgaccagtaaaatgtcacgtatcaagcttcttactttccatcttatcagtgttcagtggtgcctacatacattcaaatctaccccctcagtaatttatattcatctttgtcacagctaataactaactccaaatattttaccttggcaggccttgccgaaacaggtctgctctgtcgctttgagaggtacttactaactatcttcttcctctcctcattagtgtactgtgatgccctcaaaccgagttccctcagcacacgtgcctgcagggcattgccctcggcatctgctttcctcggccttcccctccctctcttttcctgcacttccacttgtacctcctcttccatttcctcctccccttcccctttctgctcctcaacatcatcaccatcttgcgccaccacctcgtcctccttttcggcctccaattcgacaacaggcttctcatccttctctgtaacatcctttttagtcctacccctcttagaacccctcatcttgcgcgcctcttgcccgttatttgggactgctgtcccgacacccttctccgcagagctctccacttcgatcacctctgagttatttttcacagggttgggattcctcttattattggcgcccctcttcctcttgcctgcagcaccatcctgcacctcctcctctttcaactcatccaaaccatttgccttgttcctccgattggcgtaatttcctctggagcagaggaacctctgcatgatcatgacgccattaccaaccgatcggcgattggagcccgtgcgcgccttgaaccccaccctctcgccgtatccgtagtagaaccccttggcggcgtgcacggattcgaactccatccccatcaccggcaccgccgcggccacctccccctccccctccccgcacggcgccacctccacctcgtggttgtgctccaccaccagcttcgacaccctccacttccccccgaccgcgtccttcttcaccacctccatcatcgccctgcacctctcctccacccccacccccacccccacccccgccgccgacgaaggcgctgcctcctcctcctcctcctcctcatcagcatcagcagcgtccccgccctgacggagcgaggggtccgcgtccgcggcggcggaggcggcggcgtggtcagccatgagcggggggggcgaggcgaggctagggttgggggggatttgaaatggcgcggggatttgggcggcaagcgggcggcgcggggggattatatagtgatcggagatgggaggggagatcgggtgtggggaggaggcgtcttgccttggctgcggcggccggcgagaggaggcgagagagtgtggggggagctgggtgtggatgcggggcgagaggggatccgagggagaccgagaggcatctactactccgagatgcgggtacacgggctctgtgactgacagtggtggcccacaggggggtatggcccgcgtggcagtgggggtggacttgccggtgagtgtgacgttttagataggcggcggtggggctcgtggcggcgaccggaggtgggcgacagtgtggtgccagtgggggcgcgacgcgtgtcccgaggcatagtggtgtgggtttaaaaggattaggatgccggatttgtgcgggtcccaagcgtcagtgggttggggctagtgatactgtggtacaagtggacaactggatggcaattgtccgatcaaggtttatactcatgcttatcggctaaaatttgaatttttaatcttaaattttgaattgtttcaaggtttttttcattaatttttattttttatcttttacttttatatcgctaagaacacatatataaaagttttattcacaaattattttttttacaaatatgtttcgcttattcgaaatgatggctagcctagctgggctaaatataatttcgtttatttaccggatataatttcgtttatttacaaatataattatatcaggcctttagctgcctagctgggccgtcagagaattttaacgaggaaaaggtccactttgactccctttaaaataggccgaatctaattcgtacccctccaccgaaaatcagataagacaacttccctaactattgaaaccagtgcaatttgactccctcagcggttttgaagagtggttttgctgacgtggcgctgatgtgacggtgctaacctggtcttcatcccatgtggcgcctatgtggcattaaaattaaaaattatatgagggacccacttgtcattaaaataaaaaaatattgtggagcccacctatcatcctttctctctccaacccttcttcctcctccctctctctctcccccttgtctctctcttttctttcctcttccgtggtggcggcggcaggcggcgctacccttgcagagacagcgggaaatggctcccactaccgggggcggaggcggctgggcgttcggggacatcagtaccgtccgattttcttgacccactgccatccctagttgtcgtcgcgtgcttgacgtggacggtggcgacggtggacttgatggcgatggtggtcgcggcagcggcggtcgtaggtggtgacgatgaggcgtggcgcgcagtgatgcttcccgtcactagctgtgcaccctcgatcggttagggttttgtgggtggagttggcggtggtagcgaacctcgtgccgtgtgccgccccggcctccaccctctatttatgtggcgcagggtgacaaggcccaccagccattgggctgggcgcccccgatcagggcgcaggtcaagatccccgttgtgccgttgggcccaacggggaggggatctatctaacatgaagtagcccgtcctgaaggcctgggtgaggtcggaggcggtggagacggtcgccatgatgacgccgtaggcggcgagcccagtgaccacgccgccgtccttgagccccacccacgcgccgaatgcgaggaccaccaccttgccgaaggtggtcgcaatgttcatgtcgatgacgccggtgacgtacgtgttgcagaaggcgagcaccagcgcgacgaggcaggcgacggcgacgtggtggtactttcagctcggtgtagaggcgcagtacaacaatggtggacatgaccgacaggaccacatacccggcgacggcggccacgctgggcatccggtcacggacgaacacttgcttctgccgccggtcgtcgaagctctccgccgaaaaatcggacggcactgacgtccccgaacgcctagccgcctccgcccccggcagtggaagccatttcccctctctctgcaagggtagcgccatccgccgccaccacggaagaggaaagaaaagagctacaaggaagagagagggaggaggaagaagggttggagagtgaaaggatgataggtgggctccacaatatctttttttatttgaatgacaagtgggtccctcatatattttttaattttaatgccacataggcactacatgggatgaagatcaggtcagcaccaccacatcagcaccacatcagcaaaaccacccttcaaaaccattaagggagttaaattgcactagtttcaatagttggggagttgtcttatctggtttttcaattgagggtacgaattagatacggcctatttttaaggaagttaaagtggactttttccttctaatgaaccggtgattaggccggccgtcttggctgaatcagctggcatccgtccatggcccatctgcaaatggcccaatacaagctaaaatagaggggcccgcctacaaatttaacatatgccctctaaaaaaacaatttaacatgcgtaatttctgcatctcaatagacaattgaacatttgggatttcatttctgtttcattagtctttccctgaccattccgtgtaagctgcagtgtctgaactctgaaacacttccataatcttcccatcccaggcttgcacagaagatttcaaccggaaaacacactgaacttgcagtgctgatcattctccgaaaacgcagcggttcagttcagatgttacaaaaaaacccacttgtttccagtaggcttagccaaatcatcatgccgaggcaatcgaacagcactaatctactagagacgagacgaaacaaaaaataaagcaccagaatattttatctcaaaagagcattcaacttgccatattgcatattcgggttgctgtctgaaccatccctgtcatcgtctgccgcccagcccgccccgttacatacgttgtagaaaaacgaaggaaaaattctggtaaaatcgacggaaaactaacggaaacatcaccacactgcatgaccaagaggcttcgtttgtttgaaacaaaatcatcaatttaaatcagcctttcacacagcaagtgcatggctgatcgcattctttaaccccttttccctgcttcatcctcaccttggttatcttgagaggcacgaaagcatcgaaaatacgcaaatattgtgtacgtacgtctcgatcaaccaggatgaagcttccaagtaatacctggctaaccagcgcataaatatgccgatctcgcgaggccgctgcatgcaaacctgcaacacacaagaacaggactgagttgctgatcatgcgcttctcccgtctcgttttttttttattgtttggtgagacgagggattagcgacggtttcgatcgttttgttttgttttgttttgttctacagtgagccaagtacaggtcgatccgttggtgttgggtttaggccctgtttctttcagcttgggattattataatctagattatttggactaaactgaaagaaacagacaacttattgaagtagcttattataatttggagcccagcttattataatctgataagctcatttaggtgagctttttccagattattgggtgaaaaattatccaccatgccaccccactctctctttagacttgcaaacccaataatctaggctctaataatctagaaaagaaacaactaaccgcttattctactacagattataacaatctagtttatagtaatctgactcaataatttagattataataatcccaagctgaaagaaacatggccttaatataattaagcggcttattcgtagcacttctgccgttaatttgctagtggtgatattgccgcatgcttcatcaatttaccagtgaatcatcagctctgcgcttttcagcttcttaggtcccggccgtttgaactagggcggctgatggattatggctgaaattgatttcgtgatcattatttgagggaaaaagtatgaattacccccctaactatcgcggtcgtccgaaattcccccctgaaccacaaaaccggacatttttcacccccaactatacaaaccggacgaattacccccctcgacctaaatccgcggtggttttggtctacgtggcgtacgcgtggcagtccagtcagcattctatttattaaaaaaatgtgggacccacctgtcattctcctcccactcttcctctctcctctccctcactcttcctctctctcttctctcactctctgtctcactcaacctctctctcacgcccacggcgagtagggcggaggggcggcggcagcggtgagcgcggcggcgagtgaggaagggtggagggacggcggcggcggcgaagtgagcgcggcggcggaggaggcgaggcggcggcggcgaggcgagcgtggcggcggaggaggcgaggcggcggcgaggcagggcggcggcgagtgaggaagggcggagggacggcggcggcggcgaagcgagcgtggcggcggacgaggcgaggcggtggcaaggcagggcggcggtggcgaggcgagcgcggcggcgaacgaggcgaggtggcggcgaggcagggcggaggcagggcggcggcggggcggaggaggcgaggtggcggcgaggcagggcgaaggggcatcggcagcgaggcagggcggaagggcggcagcggcggcaaagcgagcgcggcggcggaggtccacgccggcgacgggatgag

SEQ ID NO: 8299 - DNA, 24893 bp, Oryza sativa
agtgaggtgggagtcggggattggcgcgggggagtccagcgtggacgtgtggggggcgcggccgtgtggagatgcagattttgtgggggctcggtgctttcggccttgtggctgccgcggtttgaagatgattttgtttggctccggctgtgtgcctgtgtgtgctcgccatatgcacgtcgtgcctgccagagtctcgattaggattttgttcacgggggttcccatttcaacgaggggaaataaatggttctggagatgtccatttctactagagttacttcctccgatcataatatctggcgttcatgatagcatttgattatacttatttaaatactaaccgctcctttattataaggtgccaagtgatcagtagtgctagttatctcaattaggattctttatttcccggaaaaaaaaggattctttattaagctgaacaaacatcgaacaattagggcctgtttagttccccaaaattttttcccaaaaacatcacatcgaatctttggacatatgcatgaagcattaaatatagataaaaagaaaaactaattgcacagttatgggggaaatcgcgagacgaatcttttaagcctaattagtccgtgattagccataatgctacagtaacccacatgtgctaatgacggcttaattagtatcaaaagattcgtctcgcggtttccaggcgagttctaaaattagttttttcattcgtgtccgaaaaccccttccaacatctggtcaaacgtccgatatgacacccaaaaatttccttttccccaactaaacacacccttaatccactatttcacacagtagcgtagtaccacacccgttctgcgcctgcacgctacgcgaaacctgaagcccccgcgcgcataccagctgggtcgtgttattcgatctcacaaacacaagaactcaagaagtaccaataacatttcatccatggactgtacggttcgcaaggctgtctcgcgaggtttcgctctagcagcagagccgagctgccgatgggtgggtggcatctgaaatcgatgcacttcagtggcttcaaccgagcgctatctgtggatctctcagctggagtaatactggagcccatggacacttgtgcccgctccgcgtatttcctgatgccacccatttctacccgggcacactagctactggaaaatttaaccgccgtgaggcgaaaccagatggccaatataccagaggaagtggcgatgtgtgagaagaaaagaagactcgccatatatatgcaaaatctcgtttaggatttgtttactgtgttctcattccaacaagggaaagagaatagataaagctctagttatatggttgttgccaaaagatatttcgatcattattttaatgccagcctctttcgaagaagagataaagctttacaaaagacggttcaacacttgtccactgtgcaagataaatctgaacaaattttagttgaattcaaacatttagaaaactcaaaatttgctcgaaattgcaaaaacagaaattgccaaaaaaaattaaaaactaaacagattttgctaaacttaaacaaccatttgcaattttttttgatttgtataattggtgacaagttttgaattttgtaaagtatgtttaaattcaacaaatatttgtttccattagagtcttgcacatggtcgcccaagggtaaaattatcctttgcaaaatttccaagatatattaaaatagtggttggaatgtcttttgccaaacaactattcaactcctttaaaaaagagtaacgatggtgtcagcaaatatgccaccccatctattccaatgtagatttggtgctaccccttaaacttcttgatattaaaaataactaaatataaatggatgatcacaaataataatattacatcgaggtgaatttctatgacaaaaagataggtaacacattaatgtattttctcttatccgtatccaagcacgtcattcaactagtaaaactagaacatcagcaaattttacctttctctttcttagtaacatgttaacttagaattcaactgccctggggatgttccctcgtgaaaaactctaaagaaaacaatagagtatagtggcatctattagttcatcaaaaatcaagtttagatttgatctatacattggaaacaaaataagacaaattcgagtgtgaatggtatgttactatatattcatacgctgaattttttttatctcaatgtgtgagaagttgagtttggacaaaactcagaatttttgtacaaactatcaagtaacatgtagccgacacatttcatccatgaaccacacagcatgtactgctcgtccacgcaactcgcccgtctcggttttgctgtatagcagcgccgcaacacagctgctgatggatggacgagctccgaaaccaacgagttctctctatgtcgttagccgagcacttccgtcggttctcatctccactttggtgcttcagccaatggacgtaagcgtatggaaaacggccgccgtacgctcctcgtgcttccggatgccacccatttctaccccgtatggtacgctcgcactgccatacacgcgcatacttctactaatggtttgacacttgagctaattacaactgccgcgaggcaaaaccggatggtcaatatatttgaggatgtggccgtgtgtgggaaataaaagaatgcgctcaattttatttcttttgcaagacagacagttagttattgctgtatacttgtatgtgctgggtaatatatcaaaccggacgaattaacgaatggatcctctcatcctcctcaaaattaaaagaaaacattttttttaggggggggggggtgggggatcatgtgtaggagatgaagtaaaaggctcgcaaaaaaaagtaaaatctgggttgttgatacgaaaactaaaatttggatttatgttagcatggccacgaatccatgatctcatgtgcactatgtagtatcgactcttttttagaaacatgttacaaaagcaaacactcaaaacgcgcacacacttatccataagaacgcacacatgtccaccctatgcctatgaacatttttagaagattaggctagcatatcttgaggttgatgaagtcaccacgagcacctcattgtcgagaggtacgtcgcttaccactgaaaaattaattaaccataaatacgagcaccagtcttaagtataagacttgaaccactagtcaagcccgtagctattttgctactagcactcccaataatctagccactctaaggtctataagatcaagttagctcgtagacaccggcgaatgtacacccttcaccacccagttccatacgccacccatttctaaaccgcgtgaacatgtagttttgtgattttggcccatcgagaaaagatcagttctctagtagtgcatgcttgctcgcttgatgctcgcgcacgttcctgtgcgcaataagctagtgctaatcttaaccccgcagagaggccaaggtggaggtggatggtcaacatatatatccttcggaggaagcgacaatctttttgggtggaaaaactaatgcctcctaacattatattacggagaaactcagttactatgcacttatgctgggcaatcaatgaatgagagggtagttattagttaccagttcaagggtggatcttattgaaaccttaattggcagttctcctgttcggtttagttaaaaaaaaaaagatgaacatataggacaaagggaaaggctagctagccagaatgtaaaattttgatttatctttttaatttgttaggaaaattgaatctggaactttgcatgacagtgaacaagattgtagtacaacagtcttgcagcattgcaccactccactgctactacaatattcaccacagctaatttacaacattcagttgctggcagtggaaagaaccccaatcgcagctaataatttacaacatttgaatactttcactccaaaaaagtatctcgtccatcacttgtcgctacattctcgatccaaccgaccaattgatcagcgctaacggcaggcggttgatgagaatgctcttgtgtaggcagttcgagttcaacccgggaataagccttattagttagcatgcttcccaataccgctcattccaatcggttttcatcatatcgtcgtcgtgcaccggccagccaagagatacacagaagcaataaaatataatgtggagatgtggaacggtgggtgatggcggcagggtgtacagtacaagatatacacacaggggttgggttggtgcctgcatatatatgtgtggcgaatcatcaataatggagagagatgtgcatttacatgcatggtaaacatcgatcaacacacgtgccagaaacttcacatggaaattaattggcgtccaggaaccgattcaaggaacataaataagagatgtgctgatggctagttcgtcagaatataaaaacttgtactgaaattgagcattcgcagcagtgtgtatatttttcactaactgattccgagaaaattttatagtatttgagaaaatacctcgaggtatctaaatttttacactatctcttagtacctttattatggatggtaaaattatccgtctgttcctactcttagataacaaacagtctcatcgtttcagtatcagcttgtagtacaagacatatagttgagttaattatttgagctttcagtttaaccagatatataataagaggccaacatttagcacttatactgaatttagttgagagactaagcttgaattaagcaagtcgattcttcattctcttcatagacgattctgcattcacctcatagactaagcactggtgctccgtgtgccgatcacgagatcgagacgacatggaactaaactaaacacaattccattcttccatttccatgggaagtcataaaaatcgtggccattctacttcgatagcattcgccgcagcatttcgaggaagtgatgtacagtatattgctgccaccttcatggaatccttcccggtgccgctcattccgatagagagcaactgatgaacatgttcgatgtatcatccaatttttttgctaggcctttttaagcgcttatatattatcctacaatgcaccactaccatcgatctgctggactgtgcttgtgcttggtctcaaggaaaaggacaagtgagagagtacttagtatgatatggagaaaaaaaaagaaggggagatatgtcatggaagaagagaagagattatgagaaatatacatatactgaagagcaaaaggtggatatatatgtacatgtggcatgctaacaagttaatatgcaaaaactagctaggatgacttgacatggatcatacggcatggggaaggttttttttttctctcaggggatgtttttacatgtcacctagaaagctataatcttttcttataaatcacaaatatgactcaaaacagtacacactattaatagtcatattaatagaggtgagtgcacgtgctcataaaaataaggtgtgcctttgtgtattcatagagatgagtgtgtgcgcctatgttcctactgtgtttctcaaagaaaaaaaataatagtatatttgttattttattaaacttgtatacgttaaatttggacttgcatgtacagtgatatctcatattgacctatactgtcaaagaaaaaatatggctttttaattacatgacataggtaaaacgagtggatattcctcgagagagacaagggccacttccttcctgcatgcatgtgaattaaactcgtaaatgcctcaacaagcaatctttgaaggccgttttttttctctttttttagggaaaagagagctttattgatctcgtaatagaattacaatcttgctacagtatgagcttaacacaggatggggcatgatcactctaggccagttatgtatgtcaaagatgcaaagatcttgcaattaaaatggaagagataatatcgatctaacagtgctttaatcttagatgaaaacatttggccatcatgattttgtgttacatacatttttcttaaggaaggtggccgagtaaaacaatcaacacattttaaatctttattaaatccttgaaagaaaattgtgtcatctgtaatatttttggcccatcatcgatcccccacctctaaacttatgctacaacataaattgggcttgaaaatgtcttgggtgcgcgacttgtgacagtcctatgatcagtggacagtggattggatattgttagaaatgttttctcaatgccgctcattcccattgaatccgcactagaaatctacagttcggatagagaagaaataaattgatcagtttgggctagagatctgcacaattgaaaattgttaaagaagtcagctcacggtggattccttatattatgagtacaatgagtagtcgagatgtaatgggttggtaggtggtgacgtgtaatgttgcggtgttcatgctcagaaatgtaacgcttccgtgttctaattggaacacagtgctctaaattttgttaattttccaatctgagaattatatggaaaatcataaaattaaaataaatacatagccttggaaaaaaaattctaacacgcagaggagtcctgattcatgttggtaattaatagtaattttccagattggaaaattaactttctaaaagaaacattcaggttactaccatgggcaaaccgatctctagtccacactccacggccgttttgtttcgttatagcagcacagtcgatggacgggtgaggcctcaaatcgatgaagaaatccgacagccgttagcacaccccttgtggagtctccgtggtcatcaggaatacttgagctcatggacaatggcagatggacgatggccaccgcctgctccgcgtgcgcatgccgcccatttctacctcgactccccacactcgacgcacgcattgcattgtttaaccgccgtggaggcaaagctggatggttaatatatatactccctccgtttcataatacaatagattttggtttgatgtgacacatcctaaagtgtatgcccagattcactatactataatatgttacatccacctaaaatcccttacattataggacagagggagtagatcgaaggaagcggcaaacgagaggatgcatgcatctcaattaattactacctcaatcccaaaataagtgcagccatgggtatatatccgtgtctaatatttaaccgtccatcttatttgtaaaatttatgaaaaaaactaaaaaaatagccacacataagttacttttcatgttttatcatctaataataataaaaatactgatcatacaaaattttcaactaaggcgaacggttaaacgttagacatgaacaatgaaaaactacacttattttaggacggatgaaatacttcatatggtttggagtgcactaaagttattaattactaattaatttgtagtcctctccatccagatgtaatttgttcttttgctctgtcgtaaacctcttttgaatatgttattatggaattgtatcgtgaatttgtgaattgaaaactataaatggacctgattggtgtttttttttcatttttttttgccaaaaaaatcttttcacatgcggtcccataaaagagactatcctataaaaatcgagaatttccaacaaacctgcaaaacttgaggttttccacatgcctctaagttagagacggttcatccatccgcatgtgaaaatacaatataattatctgtaaaaatgttttttttaaaatagtcataaactcctaatgtcatggcagcgacaacagctgccatatgcagcacacaaaatgtccatgaccgtcagaacaggattgccgatagggtgtgaagatatgtttctactccctccattttataatgtaagtcatttcagtatttctcatatttatattgatgttaatgaatctaaatagatatggatataagaaatgctagaataatttacatgatgaaacggatgaagtagcagggttgccatggaattgtgcttccatccatacgagacaaaacgtgcaaaatccattaggttttattatctgataaaagcaaccgcaagagctagtttacaatgtatacgccgttgatcatggtattaatgttggaaatttggtcataattcggcatattttaatccaaaataacaagataataatcatgatatttacaataggatttgatccagtgatagtggtgaatgtaatcaacatgagcatgcttaacgttgaataagcatcaacaatcacataatgacacaatgttgacattgcgatgaacattaacagtaaaacttctaattgaaataatgtaataaggttataccccaagaatggtcctccgctggagtttgaggcagtattgcctccgttggtgttgacgggagtctccttctccttgtctccagtgttcgacatgttggtgaagatgaagtagatgttgacgaacagtgagtagtcgcgccttgcgctccccaaaaacctgatcgctcgcccgtctgtgcaaacgtcgcagcaacgcgtggtttcggaggcctattctcccaacgcgtgtgcacacattcgttgggatgggattaccgtagcagcaacagcttttgaaaatggataaaagtgtgtcttcttcttctcgcgggagatcaaatccattcccattttataagaggaatggaagatgaagagtaagagtcatggaataggaagaggaatggagcaactaattgtcatcaactagccatgaaccatcctccactacacaaccatcaaccaacaatcaattaagagtaattgatgtaagttaccaatggaataggaagaggaatagagcaactaattgtcatcaactagccatgaaccatcctccactacacaaccatcaaccatccatcaattaggactaattgatataagttaccaattccttaatcaaatggattaattctcaaaactcttcatcccattgatatcccatagaagaatgaattcacatgaattcctagcataatgagccttggaatttatttgatttaattgatttaaatggattaattacccaattaaatctaacaatccccaccaaatttcaaggctcatgagaatgctctctattccatagcagcttttatataccagtgtttcggtgaagactgttaagttgaactttcacctagaaaaggagctacacctgaccacaactgaacaatggactatgccttgaattgtcagtcttgtgcagttaggtttcactcaattccataactgatactaggcaaccattagtattccctcgggttggagcttataagtcatactccaggcctttcatgagtatctagagatcacccaaatctcatagactgtgactagcagtcgaactcatataggtgtgttccttctaagatgttctgcaggtcaacatctctgcttggaaaagccactcggatcacattaagacataagccatcctaccatgcaggaaagaagagaaacacatcatgaaaatgagcccttttcaagggtctcttcagtcacacaatagtttgtttcaccatccaaattcacgggatctccgatcataatggacaggtttccactattatgcaaccttaggtgggtatcaagcccatttccctcgatgcactgtctatcacattacgtggtagccccttggtaaactgatctgccagatttctagccgtttggacatagtccaatgctatcactccggagtttttctgctttctgacagatttcagtcttctcttgatgtgtctagatgacttcatgttgtcctttgaactgttcactttaataatcactgtttgattatcgcagttcattaggatagctggcactggtttttcaaccaccggcaaatccatcaggagttcacgaagccactcggcctcaactatcgcagtatctagtgctgtaagttctgcttccattgttgacctcgttaagatggtctgcttgcaagacttccaggaaacagcgccacctccaagtgtgaacacatatccacttgtggcttttatctcatcagcatcagatatccagtttgagtcactatacccttctagtacttttggatacccggtatagtgaattccatagctcatagtaccctttagatagcgcattactctttccagagcctgccaatgatcatctcccggatttgagacaaaccggctcagcttgcttacagcaaatgagatgtcaggcctcgttgcgctagccaagtacatcaatgaaccaatgatttgagagtatctcagctgatcccttgctattcttcggtttttccttaatagcacgctgggatcataaggagtaggagctggcttgcagtcactatatccaaagcgactcaaaaccttgtccacatagtgggattgcacaagtgtaatcccaccctcatctcctctttgtagtttgatgttaagaataacatcagcctctcccaaatccttcatttcaaaactcttggacagatagtctttgacctcctcaatcacattaaggctggtcccaaagatcagtatgtcatcgacatataagcacaagatcaccccttctcccccaccatagcgatagtatacacatttgtcagcttcgttcacaacaaagcctgcagatgtaagcgtggtgtcaaacttctcatgccattgcttaggtgcttgcttgaggccatataaggatttcaatagtttacacaccattccctcctgaccttctagtacatacccgtctggttgatccatatagatctcctcctccagctctccgtttaggaaagctgtcttaacgtccatctgatggacgagaagaccatgagaggctgccagagcaagtagtactcgaatcgtggtcaagcgagcaactggtgagtatgtgtcgaagaagtcctcgccttccttttgggtataacccttggccacaagccttgccttgtacttttcgattgtaccatcaggcctaagctttttcttgaaaacccatttgcatcctacgggcttgcacccatatggacgctcaacgatttcccaagtaccattagacataatcgagtccatttcactgcgtactgcttccttccagtagtcagcgtcaggagatgaatatgcctcttctatggttcttggggtgtcatccacgaggtatacaatgtagtcatctccaaaggattttacaaccctttgtctcttactcttgcgagtatctacaatgttgtcctcctcaggattttcctcaggcgtttgatcattatgttctatcggtgtaaagtgctcatggggcatgacagtttctttactagaagtgctaggtgtatatttcataggaaattcattctcaaagaatgtagcatctctggactcaagaattgtaccaacatgcatgtcgggtactccagagtttactattaagaatctataacccacactgtggatagcataaccaagaaacacacaatcaacagtttttggtccaagtttccgctttttggctataggtacatttaccttggccaaacagccccatgttcgtaggtatgagagatttaatttcttcctttcccattcctcgaatggtgttacttccttatgcttcattggaattttattcaggacatgacacgcagtcaaaactgtctcaccccaccattccttggaaagccccgcagtgtctaacatggcattcaccatctcagttagagtacggttctttctttcggccaccccatttgattggggtgaatagggaggcgtcatctcatgaataattccaaactcttcgcaaaaggatgcaaactcattggaaaaatactccccacctctatcagacctcaaccgtttgattttcctttcaagttggttttctacctcagctttatagattttaaagaaatgcaatgcctcatcctttgttttcaatagatacacatagcaaaatctagtgcaatcatctatcagcgtcatgaaatatttctttccccctttagtcaacacgccgttcatttcgcacaaatcggaatgaacaagttctagaggtgccaaattcctcgcctcagatgccttgtgaggcttgcgaggttgtttcgattgaacacaagtatggcacttggaaccttttaccaaagtgaattttggaattaaactcatgttagctaagcgcgtcatacaaccgaaattcacatgacagagtcgcgaatgccacacattagactcatcattctcgctaatatggttcacaacattatgattattacacatgtcattcaaagaaaagcggaacaagcctccgctgtcataaccttttccaacaaaagtcccatatttagatacgacacatttattggactcaaacacaagtctaaaaccttctctacacaatagagagccgctaactagattcttctttattgaagggacatgctgcacgttcttcagctgcacggtctttcccgaagtaaacttcagatcgaccgtaccaacaccatgaacagccgcaagcgacccgtttcccatcaacaaggaggaacctctcccgacctgataagaagaaaatagagaaatgtcagcacatacatgaatattagcaccagtgtccacccaccaatcaggtgaatgaaaaacagagagaactctaggtaatattttaccgtaccccgatgttcctccgccctcgctaatgatcatgttggcagacttcctgtctttgcgctcaggacagtccttggcccaatgcccagacttgccacacacaaagcagtctccctttgcctttcccttgcttttcttcttaaaattggttgcagccttgggtttgacatcaggcttgactttcttgttgttgtgggatgcatgagggttcttcttctgtaccatattggcactagaacctccctcaacctttttgccccggacgtcctttgccctcgccttctcctcaacacccaaagagccaatgagatcaggaacactgaactcttgtctcttgtgctttagagaagtggcaaagtccgaccaagaaggtggtagtttggcaataatgtcacctgccacaaacttgtccggcaactcacagttgttgttctcaagttccttagccagcatctgaatctcatgagcttgttcaactacagaacggtcatcgaccatcttgtaatcatagaactgctccataacatacagctcactgccggcgtcagaaattccgaacttggcctcaagtgcatcccacatgtccttcccagaaggcatgtgcatgtacacgtccactatgttgtcagcgagtacactgatcaatgctccacgaaacaggcaatccgaagcctcgaacttagcctcttcctcaggagaaagaggtggttcacttcgtttgccccgtgaaacatagaagcactgcatcgctgtcaaccacaatagtgcacgtgctttccatctcttatagtttgaaccatcaaaagcatgtggtttcagtgcagcagcaaagccaactaccgaaaatgacctataaggtttttggaatgttggaaatttggtcataattcggcatattttaatccaaaataacaagataataatcatgatatttacaataggatttgatccagtgatagtggtgaatgtaatcaacatgagcatgcttaatgttgaataagcatcaacaatcacataatgacacaatgttgacattgcgatgaacattaacagtaaaacttctaattgaaataatgtaataaggttataccccaagaatggtcctccgctggagtttgaggcagtattgcctccgttggtgttgacgggagtctccttctccttgtctccagtgttcgacatgttggtgaagatgaagtagatgttgacgaacagtgagtagtcgcgccttgcgctccccaaaaacctgatcgcccgcccgtctgtgcaaacgtcgcagcaacgcgtggtttcggaggcctactctcccaacgcgtgtgcacacattcgtcgggatgggattaccgtagcagcaacagcttttgaaaatggataaaagtgtgtcttcttcttctcgcgggagatcaaatccattcccattttataagaggaatggaagatgaagagtaagagtcatggaataggaagaggaatggagcaactaattgtcatcaactagccatgaaccatcctccactacacaaccatcaaccaacaatcaattaagagtaattgatgtaagttaccaatggaataggaagaggaatatagcaactaattgtcatcaactagccatgaaccatcctccactacacaaccatcaaccatccatcaattaggactaattgatataagttaccaattccttaatcaaatggattaattctcaaaactcttcatcccattgatatcccatagaagaatgaattcacatgaattcctagcataatgagccttggaatttatttgatttaattaatttaaatggattaattacccaattaaatctaacaattaatccgtgtgattggacacgagaccttagtacgggcagcagcacatatcaggatcgttgtgtatgcaggtgcctccttggtagctgagcatttggcagtagcccatgcacatttctgtgttgcatccttgtagcggcttacacgccattttctcttcgcctacattgcctaaacaaaaaattgcaatgtgcagctagtagttaggccatgaatatgtttgattcgtgcataaatatcaatagtaattaaaaagatatactcgcagaacatataattaatgagcaattttaccattcaacatttgatacctcaaggtaccacataatggtatctcgaggtactaatttttatattagaaagtatcttgagataataaaaatttgtgatatctcgagatatcaaatggtggatggtaaaattgctcataattaatagtactcggtgattgcagaacaaatagtaaaccgtaagaatatataattcatgatcaaaataaattaaagcatagtagaccaaaaacgaattatatgctcatcgcagacaaaataaattcatgatcaaaatcatttatttaaatcatttatttgttgtctgcgagtaaatcatttatagttaatttgttgattgcagaacgaaaattgtattatcgttaccttgtccttgggcagcatgagaggatgaaaaagcagtagccatgaccactagagctgccaagaacacggcagccttgcaactagtcttgccaagaagagccatattcagatttagagggaattagctttctaatgagtggtggtagctagcctatccttagttccctatgtttggtgatcctctcctaggtgtttatatagagaaattggatgatccattcctaatatcatttagaatgcatttaactgttatatatcctagtatatctctccacgacattaatattgtcctttttttctctcaacgtctcaaattggtagcatgcatatcctatatatcttttgggttaatttggtagcatttgatccactcttaatctcttttgttaccattaactttattatattctacaattgtcctcctcttatcgcatcctaagctttggctgcgatgagcaggtccggtatgaaccgtccatatccgaacatgtcaccaagatgaaagatgtacggtcatattcgttttggatgaatttcaaacgatttggtttcctaagaattaatttctataaaagccattcaattcattaaatgtagatacagaaaaataaaacaaattccttttctacaatgtgtagagagaaaacataggaaattttccattcactcaaacctcttgaaatatgcatacattcatattctttcaccatttctattcgtaatttctgtgttaaaatttcttcaaaacgaataggccctacatgatttatgagaggaggaagctgaattccaaaccttagagattagagaacgtagtagaggaggaggaggaggaggagaagaagaagttgcaccggaaacagttgttggaattttcttttctttcttttttttatgtttttgagaaggcagttattggaatgctgggtttgagtgccggggtcgacggggtttgggccgcgatggacgtcaatacacggcctgccaaatggggggggggggggggcgctaatgggcgcgtacgcgtcagcaatttagctggcgcgcgtcagctcggccgcctcccgtgcctttttttttttattttcctattcgcactttttccgatcgcctctgagcatgttttttttcctgtttctttccgatttttttcaatctttcgcacacctctttacgaatgtagaattgaaagtttttatttttgaattaaaagttattaaatctttacttgaaagttttctaattttatgttgaaagttttctaatttgagttgaaagtttttaaatttaatttgaaagttttcaaatctgggttaaaagtttttcaaatttgagatgaaagttgaaagttttcaaaatttgacttcaaaaaaaattcaaatttcgagttgaaagttttaaaaattgagttaaaatttttcaaaatctgacttgaatgttttcaaattgaattaaaaatttaaatttgtagttgaaagtttttaaaattcaagttgataggttttgaatctttaagtaaaaaaggaaaataatgttgtgtgaaaaaaagaaatatatcttgattgaccgtgattattagatctaatcacgtaaagcgcagctaatcactgttttttctcatgattcctgtgcacatgcagcgtcttcgcgaccaaaaaaagaagaggaacgacggttgccacgcgcgacgaagattaatgggctgcgcatgagggcgtgggccgcatgcagagttatgggccaaaaatgcgcgcgagttaagtacatggcacgtacgtgctaattagcaattctgtgccaaatgcatctttattcggcccgagagagaagagctgggccttgattccatcggtggcgaagtttgggctccaaatatgcgccaatccaatatgggcttgaaaacgaggcctaacggaaatgagccacacgatcacctgatccacgtccaatcggcgcagtcagccagggcacgggttctatcgagtgccgacgagacaaaccaaaaccctcctcgttgatacgcaatgccacctagggcgtcgtcgatgctggcgcggctcgtacgcgacgcggcggccgcgcgcgacgccgcccgcgtagccgcggccgccgtatctcgtgccgcgcgctcctaggcggccgccccgtctcgtcgtcgtcgtcccgcacgcctggcagccgccgcgctcgcgtctcgccgcgccgcggcgtctcgcgccgcccgcgtagcctcatgcgtcccatattacctcgtcgacgacgatgatgacgacgaccatgctacccgcccattgccatcatgtaaaccaatcccctcactcagtctctcttttctggtagtgcttgaatctctttttttttttctttttttttttgaaaaaaaggcaaaagctttacctcgcatatattaatagggtagaagaaaacaaccataacaaaggtctatttataaggctatgtcaatagaaacgggagcccgaacaaagaaattacggggactcttccaaaagagttaactcagcaaactttgaggctcccgccttggcctaggtcatggtctctttcttgatttttgcgacgatggtggctggagtggcggcgatacggcgaaaaatcctagcatttctctcacaccaaagttctcaggctattaggattattagggattttagagatcttatggggttacgcggcgtgtgtagcatccaaggtctatgctatcccaatgttgcactgctgcccatacccttctggagagtttgcaattcgcaaggagtacttgaagtcttgaatcttggttcaatagtgattaaaaataatttgtaggtaaaacttttatatgtgtattacgaaaagtaaattaagaagaaaaacttcaaaattcacgtgtccaattgtgtttataagccgaaggctaaacagtagatctgaatttttcgtttctttgtgctcgcaaccaaccaaattgcaacttacaagcctccaatttcgctgttgtttgactgtatcaatgttgttgtattttgtgatatagatgatcctgagccaggtaaggatatctcgggaaaagacttagagtcggacgaagccatatgggccttgtacgagcgctggtgcgaggcttacgagaaagagcgtgaccatgctgagatgactcgctggttcgagatgttcaagaacaatgcagagtatatttatagtctcaacagtgagattacttcggaagcagagcaactaattttgggtccgtactgcgatgggttcaacgagaaagacaaggctgaatttctgaatgattttggccattttaacggggttcacgaatttgtagagtagcggatgatcgactcccccatgaatcgcctttgatcccccatgaactgcaaaggattgaaccacgactgtttactcgggctggcgtcaactatacattgtgattcagcattttgtataaaaaaataaactataatatactcccttcgtcccaaaaaaaaaaaactctgagtttccgtgttcaattttgattgtccgtcttatatgaaatttttttataatttgtattttcattgttgttagatgataaaacatgattaatattttatgcgtcacttgtctttttaatttttttcataattttttcaaataagacggacggtcaaacgttagacacggaaaccagagtttgtttttttaggacggagggagtacatgttggttcatcgactcttcagagtaatcaaagttcctgcagtgaaagtgacaaaactttaagcacagataccagtttacagctcaaactgtaagaagacgcatatgcataggccttcgcaggcttaggtatgtaacatgactgttgatcattagaaaccttgtgctggataacatgttcaggttctcaacaaaatttatgttcagacagtccagatccttagccccagtcacaggttcctcaaactggcgcggccgtcggcttcggatcggcgttggcggcgcgctcgtcggctccggggaggccgatcggatcagagatgcagacctctagttcaacatactttctcgacacctctcattccgagaccatcacttgatgtatgtactacctttcttagtatcgaactaatcttcctcatcgttcaagcatggctggtctgagcccgtaattgtaactatcagtttgggcaagagatctgcactactgaaatttgttagagagaagttagctcacggtggattctttatatataagtataataagtagacgagatataatgggttctaggtgatatgtaatgtcgctttattatggcccaactttttgacataaattaacttttaagccaaatttcttatttttgtacgatttataaattggtggcttttaagcctccctatgggtgaagttctagctgcaacccacctaaaaagattactcaaagtttggcttaataatacatgaatatttatagattttaagaggcttttaaaaaaaacggtttgcttgtttggttctcctcgtatattccatttttttttctaaattcaatgcaaatggtttgttaacaacgctaaaacattaataactgtaattcaatgcaaatggatttcaagtttttttattctctaagctagttgaggtacatttctattgataattgaagtgccacttttacctcaaaaaattaaagtgccacttatgctttcgcctcacggtcctgtgcttgcaggctaagcgaaatctgaagaattgcatcgatctctatccaaaaactgtaacgccagttggaacacaatggtccaagcatgccatctctggggacggggggttccagttgtgagttgactcctaattctctgttaagttgattgtttcccagtctatgataaagaaaatcataaaattaatacacagccttcaaaaaagatctaccacgcacaggcgttcaggttgatggaatttgccaaactttctatgatgaacagctcagaattcccatgtacttcggccgtctctttgcaacacaggaaatacacaataagtggctgccacaattcatccatgggtcatactatacatgcccgttttgttgtaacagcacagttgatggatgggtgaggtcaaaaatctaccaggatcctccgacgttagcactccctttctggcgtctctgccagcttggggaacacttgagctcatggaccatggcagatggacgatggccaccgcctgctccgtgtgcttccggatgccacccatttctagctaggcacccactacattaatgtgaaacatgcatgcattgtttaaccgccaaaagatcaaaactggatgcctggatgaatggatggtcagttaaatactccctccgtttcacaatgtaagtcattctatcatttctcatattcatattaatattagtgaatctagacatatatatctatctagattcattaacatcattataaatgtgaaaaatactaaaatgatttacattgtaaaacggaggaagtagaaggaaccgaggaagggtacaatagttaacttccagtcctcttgatttgtatgtaggccctatttagtttccaaaacaaaaaattttcacccatcacatcaaatgtttaaacacatacatagagtattaaatgtggaaaaaaaaccaattacacagtttgcgtgtgaattgcgagacgaatattttaagcctaattgcgccatgatttgacaatgtggtgctacagtaaacatttgctaatgacggattaattaggcttaataaatttgtctcgcagttttctggcggaatctgtaatttgttttgttattagacaacatttaatactttaaatgtgtgcccgtatatcctatgtgatttttttagataatggaatagagcattccggcctttgctcaaagagttacagccaattattacaatctcacactcaaaatgagtgaagttcaaagaaacttaaaagatgaaaccaaccatcaagaagaaacaacttaaagactgccaacccaagataaagagtacacaattattgaatttgaacctccatccaaaattgacaaaaagttgcataaccgttgtttcaagaatacggcatgcagcctttaaaagctcactatcttcctcacacttttggggtatatcctatgtgataccctaaaacaaaaaatttttgccatctaaactgggccgtagtacatgtctcacggtccttgtgcccctcattctgatagagcaactatgggcatcgggaatttctatctaaatatatgtatctctacttttgttggtagggtggtttttattggtagtagggtgttttttatgtcttcattctatctataagctaacaaattttataataaatggccgtaccttctttaaagcaaaagccagattttatccattaaaaaaataggcatcgggatggtatgtgctctagtctaccagaaaaccaggtgaaacatgagatagtgtgacaatggaagaaattaaggagatgataagatgattagatacatacacaaaccaacacctcgcacaatataccgtcatgctttgtatacttgttgtatttccctgttatccaaaatactcgtcccagacactgtgttactgggagtatataaacttaaagacgcattatcaagtagatcacggatggaagaagattaaacgcacaaactatcagaacaaacatacagcctaaggccaaagaggatcgaggcggtaagatgacaccgtggccgatcaagctgagccactgtgcttgtacccactcaagagctctgactattctcgtcgagaattccacacggaactttagggttgaaaccacacgcttcttaccgttttatcaccaaaagcatctcctatccctgttagtcgaaagagtatccaactgcttagtcaaatgtattctcctggcgcctcccatttcaatgcccaaactatctttatctggggaaaccaaggcccccggccgcaaccttgcatcattgtcatcgaattgtaatgttcttttctgtagtggccagctccaaagaggagtagcgtgagtggactccaaggaagtgagtagccggaaatatatttgtacgctggtttgtaaacagatgggcaatgtaatgtggttgtgagctggtggtgattgacaaaatccaaaagcacatcatcagtatcgtgaaacaaatctctagcaaataaatttcttgtgagtcaatccgaaccggagtaaagataagatttatcttcttctaagatccctatatatacatgattagactgagacatttgaggttagcttgtactcgagattaaatctataacagagagagtttcaccctggtccctacacctatgcctattgtctacttttataatgttctttctctaccgctgtgggtgggaagaaaacggtgagtttctccgtgctaaagatcggagcctccgactgacagtcagaacgatacccgcatgtgggccggtgacttcttcagtttcacgggccacgcacgataactaggcgcggcccgggcaatggtagcccatttagctggggcgtgtagcaccgacgaacagcgtgggattggaagttcatccggcaatgtgagccggtgtggctttggttgacattctgttaatgaatatttcaaagctaattaacactcactggacgagtggataacgttgctagcaacgttctaaaaattatttataatttgttaggtgaaaaacaagacggatggaacaaattaatgagagctggacaaaactagaagccgtattttgacgggatcgtccaccaggcaccagtcacatgaaaaatcgttgcatatgggcgaagactcccatcaaagtgaaacagtgagctttcaatccaggtagcagacacgaatttactatgacggcaagaactgaaacttcctacctcgtcacccccgagaaccgtgactacaaccatataaacctttgaatcacatcgaggttggaatatacccacaagcacggtaaccaccatatgtagcagatgatcttgtcgatctagatgttttctcgacatctctcattccgaggctatcacttgatcgatatatgtaccagtttacttggtatcgaactaatcttcctcatcgttcatgcatggctgacctgagcccccatatataaggggaaatattacgtgaaaacgagtaagtgttaaaaactcgtggaaatgatcatatctagaaattttatgaatttataaaaaagcctactaaaaataggtctagatatgaaatacattctcaccaaatcttaagtacaaacttaatttcatttgagagaaacaaaaatgacaaatctcaggtgaatagtgtcatattaattgttattattcacccaaaattagttttatatttttagtcccaaatgaagttaagtttgtacatgagatttggtaagaatttattttatatctacacttatctttagtaattttttatgatttacaaaatatttagatatgattttcatgagtttctatcactttacctgttttcaccggatatgctataatggctatatcaagactcgagagtgagcacagaaacgtgggtatcagggtacatatatcaacacggacagtgtgctctcatcaatagatgtgatcatgagatggtggatgggactcatagattagcttttagcctgcttagttaaaagtaagaaataaatagaatttcactttcgcttcattgtgtgcttggatggaggctagcccactagagacaattaataatgtgaaaagttaatacatttcattagtttttcgatgtgggattatccgcttatcccctcaaccttttccagcatgtctgactactagtcctatgactagaatagctcaaatgattgacaacaaaacgtatactgaagttttcgcgcaacatgagaaaatttagcccgtgtacccggtacttctccattccaacacggttgtatcagatgctaccacaccgcgacgatgcattgcacctctacgagggatcaggatgttgagttgcctcacgggcacacccacttccgaagaaatcacacttacactgggctttcacgaactggtgctaacggtgagcaaacctgaactacaaccatgccaaatcgacaaaaatactttcctggtgtcgctcattcccaaactatggatgctctcattgtagaagaagaacatagactcttactctcttagcatatattgtgatgcatatcagaaataagcagtgaatgttgtgtgctgcacagcgaagttaattatgcttcatgtggccatgcatgtgcgcgcagctatatatgcgtgcactgtcacctgttttgttctacaaaatagttccaccattcaagtttaatcgtcatatataaaaattgaatcttttgcattctttcccccccccccccccctaaatcagttaatcctatcattgctccacatttcattcacactcaaaacaccctaaatcccaaaactacatgctccacaccgccccctaaatttactgtcacaaacaaacacctagctagtactcgcaagcatgataccactattctttgtatacttgcttacattgctctgtaatccgaagtgcttgtcgtgtcctagactgt

SEQ ID NO: 8300 - DNA, 47062 bp, Oryza sativa
  unsure (1)..(47062): unsure at all n locations
tgtccctgatatggattttcacatgctaaggagaagaatcaggagcttcatgaattggtgtgattcatggctccacttagcacaatctgaacagtttagcaatcctttagttgaaattgtttctcaaaattttcaaactcaattaagaactactgaaaattttcaaactgagtgcaccttggccccattatctcaacaagctttgctggtttagcatgagatgagactctgtaaagtttatatgtcctaagtagtgcatgtccctagtcatgcatgtttccaatatcagctacctgtgtggatgaaattatctgccaatatcagctgattcaactgaactttcattgagtccttacatcttttctcgtccttttctctagcaaatcacataggattagttatctagccgggagagcaaacgaatggcaacccttggaccaagcttgattgctcccctgctgtggctccatgatctcagacttcgtcagagtatacagtaatgcactttcttcagaaattttcttgacagaataagctcaagtcacttaactcgatgttaaagccctgtagcgtatcatgtaaagctcatgattttgatctcttgagatgacatagggctccgttcgttaccagggattcccaacctccctcccgcgttttccacgcgcacgctttttaaactgttaaacggtatgttttttgtaaaaaaaaattctatacgaaagttgcttaaaaaaatcatattaatccatttttttaaaaaatagcaaatacttaattaatcaaccgctaatcgctgctccgttttccgtgctgtaggaaaccgttcccaacagtgagtatcgaacagagccatactgtatgttcatacatcgttgcctagttgatgactaaaaaaacataaatattaaggaatgacataatattaaataattaaaagaggtaaggcttcgaaccacaccttgtggagctcatcaactgagcttgtccagttgatgactgaagtgctgaaaattttcctggtctgaattaaaatacagtagtactgatatagtagtacatttcatatatgctgcagaccattgccttttacaaacaacaactgtgaattgtattattagagcattgagttctccggaaaaaaagagtaatgcaagataatggcaaaagtcacaaagaagagtgtagataattatagaagcatcattcgcagtttgaaaagaaaggaggaagaaccacttggttgattacgcgtgtatacataatctaccttttaaaagcaacgaacaaatgcttaattattttgagggaatcagattcttaattagaccaaaaaagcaaaaaaaaaaacaaaaaaaactgtttactgcttggagatcttgaagtgtccaccctgaacttttgactgcaaggttaatccattttgtccaccgtcatttcccaaccaaagttctctttcccctaaagaaaaacacacacaaaaaaaaaatttctctaagaaaaacacacgaaaatactattattttcaagtagtagaagtcaagcttccttgctttgctttgcatccgaccgttgggccagaggctccaagccaacggtcaccagaggaagaggtacactgtcacagtagcaaactccacaagcttccatctgccttcttccataggattcttcaacctctgctgcaccccgcagattaccagcttccatccatggctggtctcccctatttatacaccaactccttcccctgccagcttcgtctcccaaggcaagagcaacgcaaagcaaagaacagatacttcttctctccacctgcctcgcaagcttcttctgtttcttggatctcacctcgccacgccattgacgccataaggagcttgtgagaggtggtagccaagaaggaggaggaggagatggggttcgtgctggtgatctcgctgcccttcatcttcttctccatcctgctcggcttcggctgctacttcctcggcaagcacaagggccgcgaggagatgcgcaccggcgtcggcgcccaggtctacggcacgccgctgccgccgcccggcgtcggagcgccgccgccggagccgttcacggcgaagaaggacggccccgagaatctcgtctgatcagcctcggctgctgctgctgctgaatcggctcatttctttttcttgctatactgtactgttcgtgccgcggtggtgtacatgaagtggttaatttggttgttcttcatgttgagttcagtgtgataatttgtaatcacaatctatgtgtttctttttttcttttggtaaaatgggttcgaatccaaaatttgtaatcacaaattcgcaattagcgcccagacaagtgatttgattgattggctattggattgatccatttgaataggttctcttacttgttgctgatcgtggagacgaactcgaaaacgagttgtactctggttgcttccgcatatatgcgagaattcaacaaggtcaatttctccatccattgatctgccacaagagagagagagagagagagagagagagagagagagagagagagagatttccacctcaccctcgagcattttcagacaataattttgatttgatggatccgcttcagccttgcctcgtcttgcagcaagataaaaaccgagaattttcagcatctccgatgagaaggaaatcgaaggtggccgcgacattgccgccctgacgagcagcaaatcgtgggtgacgccgcaggggcggattcttgttcgcgacaccgccgccgcaaccacgttcctgcagcagaatcctcatggctcagtgctacttcgcggcgtcgtgctcggcggatgagagccggtttgtgtatagcaaatgtcaatgtttgtagtgtcattattgcaaatctccctgttcttcccaggccatgatggcgacgcgttcgtctaagatttccaacgtgagagatggcaatggtggagttcttgtagcttccagcggcccacagagtaattgtggatcctgcctactgattgagtagttgtttaggatttgtagtcacagcaaaaatgttcaggttttagcaaatcaacattgggggttgatacatttgacatttttttttgggtcaaatttgataaaaatatcttcctttgttaccagtatcttgttttcggactgtttcgatgtgtcattttgcatcaaacagtctattgtagcccaattatctacagtgcacaaatagcatctgaagaaattttgttagaaagaaaaagtatgcttcaggttgtcattaaagacagattttcatactaaggacctgtttgatacaactccaactcctaaatttagctctaggagttgggcctgtttggcacaactccagctccagctccacccctcctggagctggagctcagccaaacagtttcagctccaccaaaactgggagtggagctgggtggagctctctcacaaaatgaactagagttgtggagctgggtttaggcagctccacaactccactccagacctaacttagggcctgtttggtacagctccagctccagctccacccctcctggagctggagctcagccaaacagtttcagctccaccaaaactgggagtggagctggatgaagctctctcacaaaatgaactagagttgtggagctagatttagacagcaccataactccactccagactgtcctgtcacgccccgaactagtaccgactggaactagcccgtgacgctccaaattaacctgttaatcgataccagtcccaggaaacagtgctggtatcacaggaagacagattatcacagcaacagaggtctctttattatagagtagaggtacagtcatgttgggctgcggacagatcccgagctcacaactgcattacaaaaggggaatggaagccaggacttggatcaaacaatacaggcgtgacttgggaactaggccgaaaccctaaaactcatcgtagccggcttgctcctggaagaactcctcatcagcaggattcgcttcatcttcttcagcaactgggggagattatttatatagagcaagggtgagtacgggagtactcagcaagccatgggaaataagtgtttaatgcaggctttaagggaagggctgttgtttttgcaattgattttatttgaactcctttctgaaaacaactaggtgagtgcttctcaaacgacacggatgagacagtgcgtctcgtccggtcggagtatgtgcaatgtatcaatctttagaaatgacacaagattggcacctggccaacagcttttcaaccggccacccgggccaacaactttcaaacggccacccgggcctagctgatcccatcagctgcagaatctttcaaacatcgaacccctttccacaacagcaatttcacaagcggtagtcaaagaaaactacactaggaatcacctcacatccgcccatgaccgtgggcatggctgttcgaacagtttgttaacctctgcagagggggtacactttacccacacgacattactaacccggatcacctagcccgtggggatcagccacgtcgggagacctccaagctttcatgacaaggcatttccaaagccgacacaggtttaccatatgccgacgagaggggtcccagaccaacaacaggttaggtcccagaccatactgtgccaggaagcccaggggtcctccccgacaccagcccggcgaatccacatgtctctcggcatcaaggctcccctggtaagctagttactccgccaggggtgtcccattccacccatgtggtcgtacttgtcttatgtttggatgaaattccaaggaaatggtccttaagtgcgagagcgggaaaccgtacacccggtacgttccccggtccgcggttttggaaattcatttagttcgcaagcaccgacccaggtgtcgggttttccaagtcttttgtaaacccaagttttacccaagaagtttttcagattttaagtttgaaggcgtccgtcgatactcgcgcaggatgcacggatatcgagacgcaactagatggttacaaggggacatgatataacaattaacaaagggaggatcaaatgcagcaaattatgtaagtccgccaatctgccttgcagacgggacaacagattaagtgcgatcctatcagtgcataatatttttcaagcaacataattaaatttcaaatataggctcaagatgttcaaaggtggcttgccttgctcgagatctggagcttgatcctcgaaatcctcgcactgcgggtcttcgggctccgaaactacacgcgaaacgggacaactcaacaaacggcgaaaataaagccctattaatgacctctaagcgtgccattagatagatctcgagatttgaggaattttggaagttgaacggagtcaaacggatttacggttgggaagatattgaatttctaagattattggatttttggtctaaaggaaaaggatttaattaaatcctttttggaaaagaaaaagaaaagaaaagaaaatagggagggattatagacttttcctcgggcggctagggcgcggcccaagggaaaaggagcggaccggacgagctaaatgggccggccggcccaaggcggcccaagtgcgcgcgcgcgggaggggaggagagagagggccggtagaccaggctcaccgtgcgcggtcccgagtgggacccgcttgtcagcggctcggctcaccgtgcggagggagcacgcggcgcacgcgcgcgggcgggggagggacgcggtgcacacgcgcggtctgcggaggaacggatgcagcgggcccacgcgcagcctcacggcttgcggtggaacgcgcgctcgggaggggctgaccggggtcggcccgtcctgacctcggctgagctggcgccgacgtggcgcctacgtggctgccacgcgggccggcgggaggtagacgacgacgccggccggaacggacggcggacaacagcggcgagcggcggagcgaaccacggcgataccggcgaaagcgagcacaccgggtggttgcacgagataaggggagacgagccaacggctcggattcgccggaggaagcttgacggcggcgaatcgcggcggcggcaaccggcggggagggaagaggaaaacggcgacgaggtcacgaggggccgattcccggcggcgagagcatctacgcggctacgggaatccgatgctagcgtcggattgggcggagctacgccgagcgaggctggcgacgagcgggtgctacggagctcgagcggcgacgacgacgagcacacggcgagcgacggcaacggtcggggcggcgccggctagctacggggaggctactcgtgctaccaccgaaaactaaggggggaagatggagcgaggaggaagaacggagagaggcactaccgtgcgggtcggggcgcagtgacgagaggccgacggcgcgggagtaatctctccggcctcgggccggggaagaggaaggagagggcgcggccgaagtccccttccgcgtccttgctcgtgccggctcctccgacacgcgcaacgacgaacggcgacggcgaaacagagggatggcaatggcgcggtggcggcgagcgaaacgggagggggaatggatgggagggcgccttggtttataggacgacgatgtcggtttgaaaaccgaccttgggcggtcaaggcgcgagctggcactcggcgctcgcggccaagacggtgacagagggagggaggatgacgccggcgggaggaaaaggggaaaaaggagggggagaaaggggcttgcccccttgccgatttaggaaaaaggaggaggggagcgggggcgtcgcggcagagggaggagggctcggcctccgtcccttggcggcttgcgtgcggagtggcggggccgaggcgatgacgacggcgatgacggcggggcggtttggagcggcgcgacgacacgggcgataggcgcgggctggcgcggcagagagtgacggcggcggcgaccagatggtcggccactcggcacgcgcgcgcgggaaacaacgggagggcgcggcggatggagtggcgcggctcgggcacgcgcgctggctgcggggccgagcggctgcaggcgcggcagggcagcggggccgggcggcgcagatgcgacgcgagcaaggaccacgcgggcgcgcgcgcgaacgacgcgcggggagcggcatcgagggagcggaaatgagggctcggctcggcgcgggcggctcacgcgctcacgcgcgggcagagcgaagggagcggaggaggggcgctcggctcggcgcgggcggctcacgcgcacgcgcgggcagagcgaggttaaagggagggggcgctcggcgcggcggctcacgcgcacgcgcgcgcggcgcgcgggcggggcggagcggagcggagggagagggggaaagggagcgcgccgggggaggggagggggcgagagagagagagagagggggagaaggagcgcgccgggggaggggagggagagatgggccgagcgagattcggcccatcgaccccggaggaggcaaaatagacttttgcggaggaatttgatttggaaggatttggattcggatttgaacttgacgatagatcggggattgagatcttgagatggcacggacactagacaacaagcaaagaaacaaatctcgtaattagggtttttaagagataattttcccgctaggcgccacgacggaacgggcgccacatgtctcaaccaaattttgtggaggatggaactgtcttccactgttcccagtccaaactccaaaccgaagtataatacgtttggtaaatttgtctcaagtttcagaacatggacaggtgattttatacttttgctaaaaaaaaaaagattcagtcacactgtttggatttggattgagtacatcaaacatgtctcctttacatgcccggctgatgaattattcttttaaactcaaaataccaaaaggggacaattaaaattgtttcttccgagttctactcaagttcggttttcctttttcagagtatcgcgtttgcacgcagttatcgtaaaccaaatcagataagccacaagattttttcttgtttctcgcaagatcaatctagccagaaattacaagaaaccaaagcgacgtcgtcgccgtcaaaatttcttctttgtgttgggcggcgaaaacgatggacacgtcgagcagcggcgttcgtctaccctgcctcgccctggagcacgccggcggcggctccgacaagccggtgctgttcagcatctcggagaggaaggtcatcgacggcggcggcgacatccctgggctgacgaatgccaacgcctgggcgacgccgcagggctggatcctagtgcgcgacgccgccgccgccacgttcctgcagaaccctcgcgactcctacgacacgattcctctcccgcatctgccccaagacgacttgccgccgaggaggtgcacctgcctcctctccggcaagccggccggcggcgacggcggctgcgtcgtcctcctcgtccaccctttctccaccgtgttctggcactgccgcgtcggcggcgacggcgacggcgagtgggcgaagcacgagtacgacatcggcacgcagagcgtcgacgacgcgagcctgcgcgtcgagaaggtgccgatctgcccggtcgccgccgctcgccacggcgcgttctacttcaacgccgacgcggccggcaacctcggcgtgctcgacctcgcctccgcggcgccggcgttcgcctccctcgacatcgacgccggggagctgggcgacgtcgaccacgcgcacttcttcctggtggagtcccagggggagctgtacatggtcagcctggtgtacgagctcggcggcgccgggatgacggactgcgagacgcgggtgcacaggctctccgagcacgagcagccgccgccgcggcggtggcgcagggcgcgcgacctcggcggcgggcgcgcgttcgtgatggctccgtggtatttcgcggcgtcgtgcgacgccggcgagtgcgggctggaggcggactgcgtgtacatgttctacccgggggaggacgcgtgcgtgaagatatcgagcgtgagagagcgcggcggggaggagttcgtcggacttccaccggcgaacagagcgtcgtggattctgcacgttgatccatagtttcagcttggaattattaggtggtgtttggataattttagtcactgtcgtatcagatgattgacactaattacaagtattaaacgtaaactaatgataaaactaattgcataaatgagagctaattcgcgagataaattttttaagcctaattaatccctaattagcatatgtttatataggctaatcatagaatgagttttgtcgcctacgtttaatatttctaattagtgttcaaacatccgatgtgacaataactaaaatcaaccaaacagtcgcttatacttcatttatgtttggatttggccagtttatttttcttctcctttttgatattgtagcatactagcaaacgtgcttgtgggatgcaacgggaacaagttcatggttgcaatcaattactttcttccggttgcacctgttctcgaattagttagtaggtgatgatggcaacatgatgaagagtctatttgggaaagcttgtatcagaatccgaagctccccaaacaatctaatttttagtttaaattctgataagttatagttgtagaattcaaaaaataaactaaaagccagactaaaaaatccaaccttttcatattttgacaactctatattttcagattgtagcaactctacttttccaggccttgtttgtttcaacttagaattattataatatggattattagcaataatttgaaacaaatatgtagattattatgatacattattataatctataagctagattagtataatatgataatcttctctaaatgtgccttttcagattattaggtggctaaagaccattaccttacccttaaaagttttatgcaaattacccaccactgccatcgaacccaattgatcgagcacatccgcttcctctgatcctctctccctagtgtgcgcgaatccggtgcctcccccggccgtgtgtgcatccgcttcctctctccctatcgtgcgcaaatccttcccaagtccccaccctgcgctgcgcaaatccttcccccgagcccccaccctgagcccgactccttccccaaggcgcgtcgttgtcgccgtctcatccgttggagtatataaagtgaattgatcgtctttccctatcagtttaggcttttaggtgcaactggctggtgcatgtagcttaatatggtatcagagccagaggtctcgagttcgaatcttggctggcgcgcaattaaataaaataattgcagcccactctaatattccacgcttgagacttgagaggggtctcgcgtgagggggagtgttggagtatatatcccattccgcaatagctaagggcattaaagacattagccatttaaactcaataatatatgtctccgataattcaaagaaacaaacaactcataacttattataattctgtttatactaatctggtttaataatttggattacaataatcttaattaaaacaaatatgacctcagaatgttaagctccacatactagtacatgcccaaagaagaccttagctttgcttgtcccatcccctcccaaacgaacggtcatatgcgtggaatgcaagcccaaagccgcgggcatcttctagggcaagaggtctgaagccctgagcagagaggtgcccggcggggggcggcgtcacttgccggccggcgcggccttttggaaggcaagtgctcggtactagaaggtcgattattcaactgattcgacatgttctgatgaacttctgatatctgaatatctgatggtatttcagtaatccgatttgatcgactcggagtcggattctggttctgctctccaaagggctgtttggttcgcctatttaagatatcgccacgccacaagggtagtttctcttcatcgagacagatcttgctagatccatataagaagtagtaaagggtacgatactctctaggtgtcgccacagcttgcttgggagatttagagcacgatatttgggatggctcctctccctgtgccctgcctcgccttgcagcagcagcagcacggcccggaatcagtgaagacgacactgttcaacatcttcgagggacaggacatcgcctgcgacatcgatgccctgacgaacaacagcagcaaattctgggtgacgccgcagggttggatcctagttcacgacaaaacttcgctgtccaccttcatgttcagccctctgaatcctgacgagaaggttcagatgccacatctacctgacgacttaccaagaaccagctcctgcttgctctcggacaagcctactcttcctggctgcattgttctccttgtcgagcccaatgccaatgtcatctggcactgtggcgtcgacggcaagaagtgggcgagacacgagtacgacattggaacgcagctcttggatccagtcagtgacctgcacgagaaggtgccgatatgcccgatcgccgcttgccggggcaagttctacttcaacagcgagagcctcaccgacatcggtgtgctcagagttctcccccacgccggcgttcagctcgctcgagctcggtggagagctcgaggctgcgaacagggcgaaggtgttcttggtgggatccgaggaggagctctacatggtcagcctggtctatggctttggctgcgacatgattgacggtgaaacccaagtccataagatggatttctctgagcagcggtggtgcagagccgatgaccttggtggccgtgctttcctgctagctcctgggtatttcggtgcatcgtgttcggccgacgatcgtggactggaggcggattgcgtctacatgttttatcccggggataaggcgtgtttgaagatatccaatgtgaaagatggaggggtagaattcatggaagtcccagcggcaagaagagcattgtgggttctgcccacttatccatagtctaggcctaggtttctgcaattttggaattgtgataagtttttgttttgctgcgatattttgtcttgctattgtagatctgtaaaatgagtaatattcttaattagtattttgtacattttgcattgaactgtctattttagcccagttatctgctactacacgatatccctgagacagattttgttggaaaggaaaatgttcagtgtttcaggaatccctgagacaaattttgttggaaaggaaatgttcagtgtttcaggaatccctgagacagattttcacactgataattttagttcagagattgttctgaaccaggaacttcatgaattggactgaaccatggcatcacttgtcacaatttgattagtacagcaagtttgcaactttagattagatattgtttctgaacataatgatatattttttttaaaaaaaaatactgcactcagctgaccaatttcatattgccattcaccagcaaaattttgaggaattgtattccactcttccgggtccaatctttagtgatacgatggctaaatccatcgtcaatttcataacatggacaagtacaccatattaaactttgggcaactgctcaattgaagccgaagagctctaatgatgcttttgtgaacaacagtttgacatgaacagaacaaagccacccgttggtggtgataggactgtttgagtacatgctaagaaatacaaaagtttctattacccatctaaaaattgaatttctgctaccaactttttcattcactagaaaaaaatacccgtgtgttgcaacgggaaaaattaaaattacattaaaatttgggtaattaggattttctatattcatgatctgagcattattcatgcagatgatttgttatcgttcaatagcacttacacaagcatgtgcaatgccggaggtcctgtaacctaattttatcttagctctttggatgaagcataaccgatgaagttaaacgtgtatattaagggagttgattggactttttcctaaataggctacacatgtgcatacaggctccaatatgcgtgcacgtgggctaactgggtcaagtgggccgcaacgcgttgtatgatcttttttttttcgaacgaagaagaattgatcttttgcctccgattccgattacttctgatgtctgataatgttcgtgtcggaatcaacattcctctggcagcagttttcgcctatataagcaccggttttgcagataaaacattaaaagaagagaggaatagaggttgacaacaccacgctgactatggagaacgcaagcccagtcgtcagtgtccctgtgccttgcctctccatggagcaacgcgacgagtctgcagataagcccgtgctgttcagcatctccgacaagaaggccatcatcgacggcgacatcccggggctgaccaacgccaacgcctggttcacgccgcagggatggatcctactccgcctgagcaccgccacgttcctgcagaaccctcaggattcccaagacaagatccatctccctcatctaccagaaggcttgtctaccagatgctcgtgccagctttccggcaagccttctctccccggctgcatcgtcctcgtcgtcgagcccatcgccaccgtcatatggtactgtcgcatcggcgatgacgagtggacgagacacgagtacgacattggaacgttgcccttcgatccacccatcgatggaaaggaccacgatgatgtggcgatatgccagattgccgcttgccatggcaagttctacttcaacggtttcttcgacaccatcggagtgctggagttcaccccaacaccggtgttcagctcgattgagatcgtcgacccgaccccgggaggattaggggtgacgggcgcggcgcacgtctatcttgtagagtccgaggacgaactatacatggtgtgcttgcggattgactatgagtttaccatctacgatatgacagtccacaagatggatttcttgagccgtcaatggcgcagagccgacgagattggcggccgcgcattctttctagctccgttgtacttcggcgcttcatgttcggctgatgagtacgggcttgagaaggattctgtgtatgcctcgtatgcagtggataaatgttttgaggtatccaaggtggaagatgatgaaaccgaggtgcatgatctcattgatgctccagactcgaaaagagggatgtggattttgccggttgaaaaaaaagtagagatgataagagggagtaatagatgtgattgctacctccaaatttatttatggcattcaccaataaattaagatgcaagatactccctccattccaaattgatctgcatatagttttttttgaggttattcctaaatgatctacatatttgtgtttatttattaagtctattcgttatttgtccattggagtaaatggacattgatgcatgcatccatgcacacaagtatttataacccacatgcaatatcttaatttgctattggctaggaaatagtggggatggtgcatgcattgggtttgttgctagagtaaataaaatatgagagagttattagctttttttggtcttggtgtacctatgaaatatgtagatcaatttggaatggagagagtatacaataggtcacctctaatacacaaatatcaatgactttagtactctcacatccttcttgaagtttgtgtggggggtggttcatcatctctgtcctcacttctctcctccacctcatcacccaataggggcagcacataaaacattatagcacttgcactaatgattggaaaaaagtcagaagctatacactctagatggaaatgatgctcacagaaattataaaaatcaaaatttgtatatagctgatcgaaatggtgggaaacagcatcactaaaaaatgatacttggtcggtcggccgggaatttccgccgtcgtttttatttgtttttgcagcgtttggtgagtgcactatctgtaaagtgagtactattcttaatcagtacgtatcttgttttctagttaattgttcgtatttcgagtgcttgatgagagttaattagttaagtcatcatttcccttatgcccgggcgacacacgttttacgatggatgggtgtcaataaaaggaaatggattttttccctcgagggaacgtctcttcgttttatacatatcatttaaaaagttatcaattttttttaaaaaaatatcagattgatcaatatatgatatatctttttgcaaacatgcgagttaaatatcgacttatataattcaaaacacaattaacaaatttgaccgtgaattacgtgttctattcatagtcaaatttgttatttttgtttctacttgtataagttaaatttgaatttgtatgtttataaagtaacatatcacatattgatctatcctactaaactttttaaatttttttatgactttttaggtgacatgtaaaaatagggatatctccttaaaggatgaattgaggttttacgtcgatgaaatcaacattcctttcttccatcacactctgtaatcctatcttactataaagttatcccccactaagtactccttaagcttgacatgcaaagatgccacatcatcattcactaattaacaagatgccacattatcatccattaacaatcatcacatttaaacatcattcaaacatactatatatttatagtttttataatttaagagtttttcaaatacaaacatgttaaattatcatccaacataattcacataatatttcaatgtatatctgtattatgttttatgacattctatatacttatatagtttatcctcacttagttagtgcttaaatgattaatatatggttcaagttatctttctccatttttttcctcaaattaagtcatatcacagcctttagataattaatctacggtccaaactatttccctacttttctttttccataaagtcataccagcttactttttacgtttaaatcaccattctacatactatttaaatttaaattatcataaaccacattaatttacttaatctgatgttatctagctatcttacacgttattttttttattgttatcatacagcaatgcgcggggtttcacctagttattgataaacgcaagcccaaagccttgaaaacgtcattagcattctgccaaagctaagttaggacaaggcggcgggaaattgaaatcatccctcgaggagatatcccctcgtgtcatcaaaaaatatatgaaaaaaattaacaacatagattaatataaaatatatcactccacaaatatgtaagtttctcatcgatctttgattaatataaaatatatcaaaaaatataaaatagatcctccacgaacatgcattccgagtcgatccggcggcggcaagcgtctgacaccttggttccgtcggcggcggagggcaagagtccggaggaattcccgattcgccgccgtgcagatcagcgcgcgaggtcggtgttactttccctggccggtgccagcggtaagtttagcggattccgattagtaattctgatctctgattagctagtttcgcgtgagcttcggccagtgattgctgtgatcgactcggaatctgtctgtacgtactccgattgacacatctgcatgcccggcctatataagagatggttaagcacagttgcagttgatccaacgcgaggagaggagctaggcttttttttatcacaccaagccgacgtcgcatcaccacagttcaccatggacaagacgaacagtgtgccgtgccttgccctgtacgtgaagcacggcgccgactcagacaagccggcgctattcagcatctcggagaagaaggccatcaacaacaacatccccgggctgaccaacacaaactcctgggtgacgccgcagggctggatcctagtccgcgacaccgtctccaccgccacgtttctgcagaatcctcatgattcgaccgataagattcagctaccgcacctatcccagaatgtgcacagcagttccacatgtctgctctcctgcaagcccacgatgcctggctgtgtcgttctccttgttgagccagtcggcactatcatctggtactgtcacattggagacgatgacaagtgggtgaaacatgagtacgacatcggaacgcagccattggacccccccccccccccttggacggcaaggaccacgagaaggtgccgatatgctcgatcgccgctttccagggcaagttctacttcaatggtgacttcgaaagcatcggcgtgctggagttctcccccgagccaacattcagctccatcacaatcaccgaccccatcatcggaggattaggggtggtgggcatggcaaacgtgtacctggtggagtccttggatgaactttacatggtctgccaaatgtatgactctgaaatggagaccatctacgatgtcactgtttataggatggatttctcgaagcagcaatggtgcgtagccgaggacattggtggccgtgcgttcttgacagcttcatgctattttggtgcttcacggtcggctgatgagtatgggttggagaaggattgtgtctacgctatttttgcgcgtgataagtattacgaggtatccaaggtggaagatggagaaaccgaggagcacgagctcatcgaagctccagattcgaaaggagggacgtggattttgcccgttgaataaagtagagatgaaaattgtccaaatcagtaagaaatgacgtcgtctctatggaaacagagctgatagatattagaatgtaagtcaaaatttatatacggctagaataaaaaacttggtaagttgggaatttgtgccaccgtttcaactttcaaccccgttgaaagattgtaaatgtttttcttttcagtatagctattgtttattactccctctattctaaaatataaggtacaatcacccttaattcaaagaccaagaaacaattattaccacctctttatttgaatcgatccatacatgcacccaatagaattaaacatcttgtgagtgtatgatttaaaaaataataatttaggagagaagatatgctaattaattgtcatgcatgcatgcacgccttatattatgaaacacctttaaaaagtcgttgtgacttatattttggaatggagggagtacatgtttttgcaacgcttgatgagagcactatctatgaaatttacatttcgttttttttttgcgtactgtctactgcaagcataacaagatatttcgttgtaaagaaaaggttatgcacacacgaaattaatgattctggtgtattaaaaaaattgagtagtgaaccttgccatcactcatctcagttttattggtttagcattagtcagttcattttcacaagttgtctgtcgaccagaaccaagtagtggatttattggggaaactctaataatcccttaacgcgatatccccttatttttcgcgtcgcttaaaaatcatgaaaaaaattaaaaaaaagttagagcaacatgtgatatatcacttcacaagcatgcatgttcaaattaaacttatataattaaaataaaaacaacaaatttgacaatgaatagaatgcgcaattcactattaaatttgttatttttgtttcgaattgtataagtcgaattttaattgtgaaaagatatatcatatattgatctatcttaacagttttttataatttttttgatgactttcaaatatcatgcacaaaatgaggggatgtcccctcgagtgataaaaaaatccatctcgatttattgaaaacaaaatactgtacctagccgaataatgtcgcactgcatttgcccagttgcctctgaggatgaaattctttcactagttccaaatgaaagtgacacacttggtaaatctatttgaacttgtaaaagcagaggataggccgtaaaattccaggtaaacagtcatgtgtttttttatttcctgtttccaacctgaaaccgaaagattagagcattgttcctacctgatgaacaaagctggtatgcctgcttttactgaagtcctcgtctcggcgcgttccatggccgcctcctcctttctccgcagctaagctcaatccttctccgctgcgctcgtgctcacgggcgatcgcctccatggccgccaccgctagccgttgccccctctatgtcaccgctccggttcgcggcgtgggggtggaggagaatgccgccgcctgcaaggaatgggatgtggggaatacgatcaactcgtgcgtcgcgtcggcgtgggggggacgagatggacgcgatctcacctttttttctcgccggggaaggaggggagcgcggcgtcgactcgccttgtgcggggaagaagacaagaggggtggggtttgccaggttaaatgcctctgatcggtggcaatgaaaaaaataataaaaaaaaagtcgatcgtattttacattacactatttaccatccatatctttagataagatataggtccctatgtgtatatgacatggcaaaagttaaacatcatgataaatagttaagttaaatatctagggtgcgtgaggtttgacattggagagaggcttaggcggaggttaaggccctatttgagagagcttgtcacagctgcagctttttgctagaagctgccccaaacagtccacaacttctgagaatctgtagttacatattatgaaaaatgaactaagaagccagaagttggagaagctgagtttcagagtttttccagattctcagaagctgactaccaaacagctgtttttcagaatctaaagctcccccaaataggccctaagtttatgaacatttgtgaaataacggggtggcatgtgagaatttggttttttttttgacttctactttactttttagttgtataattacatattatcataatatatggatgaacaatgtggattgtttggggaggttgagattctcccaatctagatttttttttatttctagtctatcttttgattttatggttacatattttcagaatatgggcaagaaacttggaccgttggtgaacctagagattctagcagaagctctctcaaacatggccatagattgggagattgtgttcctgtgtgttcctgtgttggaggtggtgggttgagaatgcagtggcggtatggagatggcgttagagggaggaggtggattgagaatacggtggcggtatcagtttgtcactagaggatcggaagaaggattatgcttttcttacttgttggttccctatagcaatgtacttcctccgtttcacaatgtaagactttatagtattgcccatattcatatatatgctaatgaatctaattagcatctatattaatatggacaatgctagaaagtcttacattgtaaaacggaggaagtactaaccaagagcaagaacaatatagtgtatgatatcggcgttttggatagaatgcctacattatgagcgaggatatatttatataccattcaataaaatatttaatacactatttataccatttcgtacaatacatctgttctaaaatatagcaacttttggctatacatagagatatactcttgtttaaattaaatgtactgtggaagttgtaatattaaaagaccctcattgttatttaacaaaatagaatacaaagaaaacaaaattttggttttattaagggtagcgcagtaatcgtacaaaatacaaggacttgtgtgcaaaatatccttctctccggctctcccacaccaaatcctctcaccccccacctgcgccccgcgcctctcgccgccgccgccgccggcgacgacgaatttcttccacccgcatccccctcctcctagcaagctagccgacggcaacgcctcccggttccccctatgaactgacgtcgagacctcatcccggccgccaccagcgccaacgccgctcctcctcctccacgagccggtgcctggatatttctggatctgaggccggcccgtggctgcaggactgcgtgcaccattcttccgacccgacgttctgccgccgcgcgcctccatgccctccggatcaagctccccctgtattagggtggggttttttgcctgggttggcgagcgaggcaagatgctgtggtgggacacgctgctctgctctgctctggcgtacggcgtacctatacgagagaaccaagtgccgcctccgtcagccgtgaggtgctcatggagggcaagcccatccccaccgagctccgcaacaaagacctccaggaccaggaaagagcaggttagtgagctcctgtttctcaacgtttccgctccatctccatcgctgctgccttttctgcttcttctttttcatctatatggctgggtgtgtggtgaattttgcttcagccccaagtatccgcgtagacaatgagtattgacggtggcacgctccacgtgccaagattctcctggccatgtcttgcaatccgagcacggcttgcaatccaagcgtgcccctgatttagtttgtcgaggtgcggcggcctttgaccaggcaacaaattgttcttcacaagttgaattggacacatttggttgacaatgataatcagtaattactgtccattcgctaggaagtcaaacccataattcctgtctcgcaaagactaaactatggtagtcatatttagtatagttcaaaggcaaccttcacaattgaatctattctaaaaaagttcgaagcagtcactaatgaaaatcttgaactactttaattctaacatagttccagaaaagattggtgaagtatactttgaactattctagaaaaagtaatgctgaaggctgttgatgtgcttgctagcagtgagtgtgtcaatggtaccatctttttttttccctaagagggggatgataattcacaaacaaactgtgaattttggattctattcttctgtcttatttgggcataatttatcggttctcatatttaggtttgatcactgtaaaggaaaatgtctctggactcaagccagtgctccatggctttcatgtgcatgcacttggtggcaccactaatggttgcatgtcaatgctacattcatttctttcccccttttctttgtcaggagaaatggattgtggtgcgcgagttggggaaattgttctaaaagtgtaggaataatatactccaatccaactaggaaggaacatggggggcacaagaaggttagaaacgtcatgctggtggcgttggaaatataatgatttgaattggagcggatgcttttttttacagctcttttattgcttacattccaaaaatattttagtacacactgtctgcattggatgaaaatttgatagcttaactacaacgctgtgctatcttaacatttattaggtgttttactcaggtaggttctacagagacctagaaatctgagggacattagtgtgtctaagttatcttgaaatgtttcacgaaaatttttagtgttcaccccaagacatcattagtgtatgcctatgcttaatgaatgtcgttatccgcttgaatgaccaatgtttcttatgtttccttgtaaatcaaatgttatatcattgtctcttgtcatttcatgcagattttcacaccacttagcccaaccctgtttcatgtaatggcttcttgcttaataggccttccaagtaaagatggcataggctgagttgcaggatggaaatttatcaggagtcagctccactttcagtgaatccatccttctcctggaggaagagaagatacatgatgcagtgtatgttctttttattcgtgttctgacattgcatgaagtaacgcttcttatattttatttggaaattggaacgatctctatttttttccttctctcagtgagttcagttttctgaagaaaaaatgtgttttagtttaaacacaaccatttgtttagtagttaatccattacacgtttctgtgaaattttgatcattcgtaacactgttaaattttactttgtgatttgtaataatttcttctgcttctttttctgcagtggacaagttggtgaaaaaaaaggaattgaacttttgcaagatatactgaaataaagtcagtggttaagtctgataaattatctgctgcattgaagtcccctcatgcgtttctgcgcaaggtatgtagttgcatcgtttcctctttacacgcactgaaaaaagacatgttggaaagcctacaaccatagaagtttacattgtccatttttggattatatgttaattgccggaactgatagtcttcagatataatgcataagaatttatattcttgctagggagaaaaaaactcttcatggttttacgaatttcatcacttgcaaaatggagcagcaagttagccactatgggcacattcagttttaaattaggattctgatctgaggatttaggcttgcagggtacagaaatcagaattttcccatttgctctgcttctactggaaacataaaattttaaatgcttgtcctagaaccatgttatttcatatttaagcactatgctttatggtattccacatttaaactttttatttagggattggaggatattgagggggattaattccacaccttaatagatgtggaattaatccccttcgaaatcccccttgattcccttgtagggggattaactgaacaatgccttagtggtcancntnanttncanttccatnntgaaaaggaaataacttttggaaacaagtggccgtgaacttacataataatgcttggctttgttggcagatgatggagagtacaatggatgactggtcaatcagaaagggtcttcaacaaagtggaggtgtggttaaattatatgtacattcaaactaatatttatagatggctttggatgggatttcatggacaatgtttatatacattgtcactatttaggttagagaatacagaacaatacacactgtgtcatatttgggtacagggaccgctcatattctgggatgcattcttcagcttttgttaactgtgatgatgtagccttgagctgcagtcaacaacggttcctttcgattctgtcatgccaatttccccatccctgcactgtctttcacaattaagtcatccctatttttgtacaatgcaatgaacagctgcaagcatagttgcaagagtgatattttggttattcactaatatggtcatattatggtttgaagtttggtcaatttaattaaagagcacctatgttaacaaagcttccaattgtttttatattgttatgatcatgacattaacctgtgtggttgtacttttaattaatatgcacggggagtatttgcacgagcaaatttttacatgaagtttgttcatttgacatttggcgtcactgaatacaaatttctgactatgtatgtactatgttttaagattaccttttttaggttaattgaaatgaaggggaaacattcaatcaataataactaattggcatttcatgagacttttgcttgcgcagctgtgtgcggtagtagcaccgcgcttttcccttctaatactatccgcacactctatttcttttgaatgaaaaagacaggtggggttagaggctacacatgtcaaccactttttttttaccaactctctattttttttaattaaagtgattatatagggctaaagggtccacatgccagtaatagaaatacatacaataattaaaagatgatatacataggaaatgatgataatgcagattaatgatatttttgaaatcccattgcaatgcacacgcaatatggtaatatatataggaaaaagtccaaatcccccctagactatgcccaagagtccatctagcgtcccaaactataaaaccgggtatttagcccccaaaccttataatccagtccatttaaccccctaagctgtttcacaaggcggttttgcacatgtggtgggctgactggaccgtatttgccacgtcgtcatgctgaccaggcaattgcaaagtacaggagggaaaggtgaagtgatcgcgaaataaaatgagggagggaacgcacatcgctccatatatcattcttgcctcatcgtactccctcatcccatctcctaggtttcttctctcgagtgttgcgtctatgacgaccatggctgcctgatcacgcactgacgggaagattaaggtgatcgcggagtacatcttggagtaggtgagatccctgactcgattgcagtctttgatgcaagaaagtttcctccgtttttatctagggttttgtggtgattgttttactcacagtggttgacagcctccacgagggaggtatggaggcaagatataattagctttggtttctttagttttgttttctttttgttccgacattgaggtttagggctttgatgttttctgttgcatagtgcagatcgatgtgtgtaggatgatcttttttaatcttgtcaaatctaatataaattaaattaatttcgtcttttatcatgcagcacaagctagcaagaatgaataatttggagatacttcctgtcagattccattataatggggagttcgccaattctagaaggattgtgcaatacgttggtggagatgaagggatgttatatatagaaaatgataagatttctatgcctgaaattagaggacaccttgcagaccatgtcgaggtcaaggatgccatgcagcttcactggttgtttcctggaaaagaattaagcacatgattacgtttactgacagatgacaaggcatgctttgatatgtcaagttgcattgctgaaggtggagtggctgaaatttttgtggaggaaacaatgtcagattataattctaaagaaagtgattgggaaactgacagtgtgaaatctgatgagatggaaaacgtggaagggacacaatatgatgcaaacaaagaaggaagtgtgggagaagatagtgacactattgatagtgactatcaaccagaaagtggaaatagctcaccagatgatgaggaggtagtaaacctacgaaagtttgctgagatgtataacaaaaagttaaaagcaatgaggctaattctacaagatcctgatgcaaacagtgtgcccattgagttaataggtcatggagatgatagcttgaatgagataattgatgaacctacatatgattctagtgaaggttattcttatgacgatgatagtggtgaacacaacgaccatacagtgaggagaaagagtaggtggacaaggtatgactctaattctgctattccccatttttcggttggcatgacatttagagggaaagaggaaatgaagaaagctttacttaagtacggaatagtgaccaaacgacatatcgtgtttatcaaggatgagagggacaagatcagggctcctagatgtccttggctgatttatggttcaaagagaagcaaatgtgattggtttcaagttggtactctctgtgatgaacacacttgcccacctaaggaggaggtacacagtaaacttgcaaaatatgacatgccttaagtgctatttataagtcaggacaagccatagatggttttattgctcaatgctattcaattgaagagtacaacatatgatcattgcatggagcctgtggaaggagagaagtggcctacatcagatcaccccaagccttcacaacctggttatgtcaagatgcctggcaggccaaaaggaaaagctaggaagcgggagcctggtgagaaacctaaagcaactaaaatgtcaagagttggcacagttatgaggtgtgggctttgtcataaaactaagcataatagcatgggttgtccactcaataaagagagtggcaagaagaaaaatgctcttgtcacaggagctaatagaaaaagaaagcaacctgatggagcaacatcatcgactgttcatacaaaacaacaggcaatcacatctcccttcaactaactgcaaatttaatcctaatatgatttgtgtacattgcaggcatcacatagcttgcaaggagcaggggaaggaacaattcacaggctaggaaagacacctgtaaggagctccaagaaggtttcactgaagggcaagccaactggagtagcaatctgatcagcagtgcttttttgtgtttatacctgtattcttgtcaagatctatgttccttactagtttcctaccacttgtgttagtactctaaacctgaaaaacaatcaaatttgttggatgtactctgaacctgtaagcttgatcttgaacatggccttcgttcctgcacaattctcctgattacagtcatattataaagtaaaaatgtccaaatacaatcacatgaaaaaaatgagaaaaatgcgaataagataatcccaaaaggatacaacgtttgaattgcataataatatgcttactagattatacaatatcacttgggcaatctccacattacactcaacagtagagggataatagatgagcttcttttacacatttcattcctccctaatctatatgcatggatttacactgaaaaaattcttttctatcaccatgttctacagttcatatcacttggccctgtccatccttgccgtgcttgcggccggcgcgtcgagcgtcgccgtgcagcccatgcacctgccccgacagccacagaacttatcctgtagcctacaagctccgggaacgcatgagccccagcgccggcaaagatgacacatacaggatgctgcacgtacggctcctacctgtcgcgggcgccggggtcgtcgcgctcgccgtggctgcgcaccagcgccgctgctatgatttcccgcgctagagtcgcctcgccccaggtccggaatttgacgctgctactgacgtgcgggaagaactcgagatggggaatatgaaccctagagcgagaggaactctccctttccctcctgttacgaagtggtaaatacggtccaatcagcccgccacgtatgcaaaactgccttgtgaaacagcttaggggttgaaatgactggattataaggtttgaggggctaaatacccgattttatagtttggggactatatgaactcttgaacatagaacctgttttattcagcttagaattattataacctggattattagaagtaaagttgaaacaaacaagttaattattatgatagattattacaatctataagccatattattataatctaataatctcctttttttttgagcttttttcagattattgagtggctaaagactcactatttttagatgcctccaataatctagagaaacaaataaattacagtttattttatgtcagcttattataatccagcttagagtaatctgatttaataatctagattataataatcttaagttgaaacaaacatggccatagtttatgggagatttagactttttccatattatctgattatatatataatcaaataattgattatttaaatattacgtagataactaaatgaaacctattatctacacttactatttataaaaacgtaatggtcgtggtgaatcgtccactaatttttcgcaccttcctatattaccccatctttctctttattgaacctacaaagtcaaatgctagatcttctgtacgctcctctcttagaattattcgtacatactccccaatggtcaatcctttaaaatctttaaaaggcatacatttcataagtcacatgttttaaaacataataacacaaaaccccaccttttaccatttgtttcaaggaaccacatattttaaggtaaaatgtttcacaaaaccacatattcattcaaaatacttatacttcgttgtagtacacatatactcgcattaagggctgaacgtttctatactatacgctctatttccttcctacctcacaattcataatgggaaaattgttgatgcaaatagcatctcatgtacaaattacatataagcaaaaaaaaaaaaactcataattcatgaccggtgttctcttgagaaagtggctacatctactcagaaaatgcaacatattatttcttatacatgtattacgcgtaagtataatagccaatgaataatttaggcatatgaatgtaggttttattaaacgttttgccctaaaccccaggttccttgaaacacgctgtaaaatatgtggggtttttatgttacgcatgctttttttttattttgcgaaatttgctcaaataaaaaagaaaaacgcccagaacatcagatccgccacccgcaatccgccggccttgcccgtcacccacgacagccgtcgacggcccctccgcgcctccactgcctccgtccaagcggccaccgccgcgcgggcggacggggatcgcggcggactacggggacgccgcggccttctcctccctctctccccccgcgggaccttcccgtccccgccgatccgccgccccgtacgccgatcgccatctccgccgtccagtccgcggccccctacgccgatcgcgacgcacagcccccctctaacaaggtactgatcccctcatcgcagttaaggtaagcggattcgtcgcagttctatctgattcggtttcagttctccgcttgattcggtctatgatgttctatctgattcgatcgcagttcgtggaatttcatccaggggtttgtccgttgccatgaccgactcgaaatacgctgtggcactccgattggcatctgatttggactcgtcccaacccttcccaatttccccctcctcgcctatataagggagccactacggtggcagatcccacgaagaagagaggaatagaggcttgacaacaccacgcccacgaagaagagaggaatagaggtttgacaacaccacgccgactatgggaggccgtgtccctctgccttgcatcgccctgaagcatggcgccgactcagacaagccggcgtgaccaacagcaacgcctggccgacgccgcggggatggatcctgatccgcgacgacaccaccacgtttctgcagaacccacaggattccgacggaaagattcagctgccgcacctgccggaagtcgtgcacaacagatgcgcatgcgtgctctccggcaaaccgacgatcccaggctgcatcgtgcttctcgtcgagcccgaagacaccatcatctggtactgtcacgtcggaggagaagatgaggagtgggctagacatgagtatgatattggaacacagcccttgcttccactcgtggatggcaagggccacgagaaggcgccgataacctcgatcgctgcttgccaaggcaagttctacttcaatggcagattcaacagcatccgcgtgctggagttcaccccagagccgacgttcagcttcatcgcaatcacggaacccttggatttctggggcgcagctagcgtattcttggtggagtcagagggcgaactatacatggtaagccagctgtttgactacaacctcgagtacatctgcgatgtcactgttcataagatggatttctccaagcatcaatggtgcacagccgaggacatcggtggtcgtacgttcttgatagctccatgttatttcggtgcttcacgttcggccaatgagtgtgggctggagaaggattgtgtctacgctatttttgtgcgttataaatattttgaggtatccaaggtagaggatggagaaaccgaagagtatgatctcatcgaagctccaaattcagatatagggatgtggattttgcccaccgtctagtttcacaattgggaattttatcatcttttttgcatggaaagaaacatgttttttttatccagtgtaaccgtagttaattatttgtatttccaactttagtaagctatatatatgaaacagtattattggtcacacatcaatcagtgttacaagaatttttgttggaaagaaagggagggttcgttgaaagactgtacagaaatattttctctagtgtagccattgtttattatatgtttttgtagcgcttgatgagtgtgctatatatgaaattaagtttttttttctgtcgtactgtccactgaaagcataacaagatatttccttggaaagaaagggttatgcacagagatagcacacaggaaattgatgactattctggtgtattaaaaaccgagtaccgaaccttggcgccactcttctcaattttattggtttatcattatttagttcatattcatgagttgtttgtcggccagccagctgaataatgtcacactgcatgcatgtgccaagttacctgtgaggataaaaatctctccctagtttcaaatggaagtgacacacttggtaaatctatttgaacttgcaaaggcagaggataggccgtaaagttccaggtcatgtgtttttctgttcctgtttccaacctgaagctgaaagatggagcattgtgcctacctgatgagaaagctacatgtgcaggctggaaatttttcatccaaattgttagttgttggtttccatttccccatgagtagttggagtcttggagcactagatgttattaggagagaaaaaccagcacaagatattagatcgatggaccgatggtgtttcgtctcactatttgctttggtagtttgcttggctaatacggccgtcattagtttgtaatatcaatttgatttgactggctaatttcgtactccctccggcttagtaaaacttattattttaaacaacgacacgcggttaaaaaacgatttcaacaactattttttattacaatatatataacaacatcaataaatatataatttattgaagtacttttaggactaatctaacattctgagatgttattttagtcaaagttgtaaaagtttaacaatatttttgttcaaaataataagtattactaaacccaaattgtaattagtggtttgcatgtgttcagattaaaaaaaaatagctaacatcacctcgccatccccgttgccgtgccgctcagctatctcaacgtggatgcctcacttgatttgggaggagagaccgagaacaggagcatgggaggagagtgaggatgatatgtgaggcccggtttgtttttgccatgtaagcgcgtagtcagcacaagtggatcggatcaacttgccacgtcagtagaaaacaaccatctatgctgcgggagggcctaatctatcccagttttgcaagtttgggggtcaaaatttctggtatcgtggtccaaggatacgatttcaaactcgatgtcaagaggagggacctaaagtaaacttattcctattccaaaacaccggttcactcactcttgggccggcgaagtgaaccatgtgagaagtgaaagcccatacttggtttggtcggtgaggcctcgagccctcgactcccggacgcctcgcctgcgtcgatctccatccatcgccgccggcgtccgcggcgtctctctcgctggttggctggtgagtctcatgatcatccatcccttctttctcatctctctctacttattacgttcctttctcgaatttgcgttagccctagcttctcttctagatcttggaagcttttctctttgcctgccgctgtgatcacaaactgtgtgtcgcttgccataactgacatgctctttgatttgtgctagaatcgtgtgcctggctagcttgtttcagatctgtgctgaaataaagaacaatattagtatatgttaaatcgagggatggataagtttgttttctgatgaaatttgcgtgcttctataaattattcttgatttttctttttgaattttcaccggtgggccggggatgaatttcatttcccaaacgaaaaaactctgtacaggcaacgggcaaacaagactataaattcttcgttataccctctctagtcattgctcgctcgctccttgctgttattgattgctcaaaaataatccagatttctcacccttctccattgaatctctacttctcctttttgagtgtcagtcaggctaccaacgaagagaaaattaatttaagtcgctcatccggtttgttgacttgtggaatgatttctctatcccttgattggaccttcaggtcaaggaagcgtgagtgttgaagatgagctgcgagaagttgagccgtcagtctctgcatttggtgttgaacgagggtcgcggcttgttctcgctaaggcacatggacgtatcaaagctcttctacccatcaacggcagaagcactggaagcagaggctaaagctaagaagaagaagaatggcaccaacaaaattgggagcatcggccgtttgccaacaccgagcatacactaccagccatatacgtggtctgcgtctaatccctacagttcactgtgtgcacttgctctctttggtgagaggagcaagaacaagatcctctgcacggacatggcaggccacaccagcatctacaaccccgagttgcgctcattcatgagaatgcctgatctgaattcgcccaagagatacaatagttgtgtggctgtctccatcccaggtgcttctgcccatgccatgtccaactttgacatcgacacagaccacagcctgtacatcatggatatcgatcctacctactggtgtagttctgaggtgcttgcctatgatcctgtggaggagtgttggtgctgggggccactcccgcagccgccattctttcaggaccgagagtataaggtcccccttaagcctcgcttcatggtggtcgatagcaccaagatatgcgtgtctaccaccacggcgacctactcctttgacatggtgacgagagattggaataaggtgggtgattgggtgctgcccttcaatgccgagtatgtccctgagctgggccactgcctcggcatgtcggatggcggcccctttgacctgtgcatcttggacaacctctccaccgccgcaggctctcctccgccggtggtgcggcatgtcgggatggagtttgagctgccggagaactggtctcaggtgtaccgtgacctggtgaaccttggatcactgaggttttgcattgtcaatggctacaccattgaaaacgagcggtacgagtgtgactttaacccagtgactgtcttcaccggcgtggaggtgttgccaacaagcagtgaacaggggctccttatgatcaagcacaagtccaaatgtatcatgacttacatcatgttcgtgctctgaggtcatcgattggtcctcaatatttatccatgtttaacctactgggagaagtaggttcataatagccagtaggaggacaaatgctgcacgcagtgattttgctttaatgtgccatctatatatccatgttactgttgtactagtgttttattttttttgtcgtaaggactatgtatatcttagcccttgtttctctgccgataaaactaatatatgcaagcccaaaggtctggaagatttttggttccgatttgccagttgccgcgcgccgtgcagatctttgccaagacggctggtgcgggaatcgcataattgatttctgtctccgattccgattgcttctgactcgtgctgaaggctaccaaggatcgccatcaccgacacgaactaaccttgctcagcctgcagttttcgcctatattagtgcatgctgggtacagtttgcaaatccaacgaagaagagaggaatagaggttgacaacatcacaacaaacgaaagaagaagaagaggaagaagaacatcacccaatcatggacaacacgagccgcgtctccgtgccttgcctctccttggagcaacgcgacgactccgcggataagccggcgttgttcagcatctcggacaagaaggccatcgacggcggcatcccagggctgaccaacaccaacgcatggttcacgccacagggatggatcctacttcgccagagcaccaccatgttcttgcagaacccacaggatccccaagataagatccgtctacctcatctgctagaaggaggcttgtcgaccatatgctcatgccgtctctccagcaagccatctctccccggttgtgcgtcctcctcatcgagcccatcgccactgtgatttggtattgtcgcattggcgacgatgagtggatgagatacgaatacgacattggaatccagccattggatccgcccttcgaaggcaaggaccatgagaaggtgccgatatgccagatcgccgcttgccggggcaagttctacttcaacagcaactttgagaaaatcgaagtgttggagttaacccccacgccgacgttcagctccattgagatcgcggactctattgccggaggattaggggtgattggcggggcgtatgtgtaccttgttgagtctgaggatgaactatacatggtctgcctgcggcttgaccatgacttcaccatctacgatatgaccgtccacaggatggatttcttcagccatcaatggcgcagagtgtatgagattgggggtcgtgcattctttctagctccgttctattttggcgcttcatgttcggctgatgagtacgggctcgagaaggattctgtgtatgcctcgtatgcactggataagtgttttgaggtatccaaggtagaagatgacgcaaccgatgtgcatgagctcatcgatgctccagactcgagaagagggatgtggattttgcccgttgaaaaaaaaatagagatgttaatgtttggatacagtcggaaaactatataatctctatgaaatcgatgttgatagaaattgaaaaattcaaaatttatatatggctagaattggaagcggcatcacttgtacaaaacatacttggttggaaatttccgccaccgttttgaaccctagttgaaaggttgtaaagaagaatcattttccgaatgtaactgatttattatttgtttttgcagtgcttgatgcctgcactatatatgaaaataatatttcttttctttttggggtactttctactgagagcataaatattccgttggaaagaaagggttatgtacagagagaacacacaagaaaatgatgacctttatttttcgattattaaattgataaccaccttggcaccactcatctcggttttaatggtttattagcattatttagctcatattcgtaagttgtctgtcgaaaacaaccaagtagtggattcactggaaacaaaatactgtacctagctgaatttttttttcagtgtagctgtaaaattccaggttaacagtcatgtgttttttgttcctgttttcaacctgaaaccgaaagattagagcattgtgcgtacatgatgagaaagctgcaactacatgtgcaggctggaaattttcattcaaattgttagttgttggttcccatttcccccatgaatagttggaggcttggagcattttagatgttcctacctgatgagcgaaatctagcatgagcacgttttactcctgtccaggagccgttcggaatccggttatactccggacggctgcttgattccgattcggctgcaagttccctgcccagatgaagtataagaacacgatatttgggatggatcctctccctgtgccctgtctcgccttgcagcagcagcagcagcacggcctggaatcagtaaagacgacactgttcaacatcttcgagggacaggacatcgcctgcgacatcgatgccctgacgaacaacaacagcatccctgtttcttgtctcttttacctcaccacgaaaattggccttttgcctccaattccgattacttcagatgtctgatctctgatgagggatcgccggccgtgactgactctgagtcggaatcaaccctgcttaggtagcagcttcgcccatataagaggagcacagagcacgatttgcagatccaactaagaagagaggaatacaaggttgacaacaccacgccggccatggacaagccgagcggccgcgtctccgtgccttgcctctccatggagcaacacgacgagtctgctgcagataagccggcgctgttcagcatctcagacaagaaggccatcgacggtgacatccctgggctgaccaacaccaacgcctggttcaccccgcaggggtggatcctactacgccagagcaccgccaccttcctgcagaaccctcaggatccccaagacaagatccatctcccagaaggtctgtcaaccagatgctcctgccagctctccggcaagccatctctccctggctgcatcgtcctcctcgttgagcccgtcgccaccaacatatggtactgtcgcatcggcgacgatgaagagtggacgagacacgacgacgacattggaacccagccattggatccacccatggatggcaaggaccacgagaaggtgccgatatgcgagatcgccgcttgccggggcaagttctacttcaactgcttcttcgagagcatcggagtactggagtttacccccacgccggtgttcagcaccattgagatcgtcgatcctatccccggaggattaggggtgataggcgcggcggtcgtgttcttggtagaatccgaggacgaattgtacatgatctgtctgcggcttgaccacgacttcgccatatacgatatgaccgttcataggatggatttcttgagcttgcaatggcgcagagcctatgaggccgtgcgttttttctagctccgttatacttcggcgcttcatgctcggctgatgagtatgggcttgagaaagattctgtgtatgtctcgtatgcactagataaatgttttgaggtatccaaggtggaggatgatgcaactgaggtgcatgagctcatcgatgctccagactcaagaagagggatgtggattttgcctgttgaaaataagtagaaatgaaaatattcggaaactgcctgaaatgatatcatctctgtggaaacgggttgacacagaaagcagaaaaaattatataagactagaattggaaatggctgtcacttctagaaaatttatttggttggtccaaagtttctgtcatcattttcaagcctagttgaaagaatgtaaaggatttttttctcctaatgcaactttagtttattatttgtttctgcttgatgagtgcattatctatgaaattagagtatttttacggtccaacagcctgggtaggtaccaaatctacaccattcatttaacttgatcggatggctgagacagattcagtaccgggcagtaccaccgatcgattccatgcagtaccaccgcctgaagggcattttcgtaatttcgcgtagcctcagttcagatcagatcggctcagccagccgcctgcccgttctccatcccaggttctgagcttttttgcagcggcatcaacggcgtcagcccacaggatttgggccgacgacgagctacaggatttgggtcggtggtaggctgcgggatccgggtcaacggagtgcacgaagccgacggcggcggcgatgggctgcaggatgcgaagcggcagcgggctgcaggatccgttcgagggtgtgcgcgaggccggcgtcgatggcggatgggggaacctagctggcgtcgacgggctggcagggatctggccgccggcctctgtggtgcgcggcggccggcggggccggcgtcgagggcgacggcggcctgaatgttaagtcgacctgacaatgtttccaatcatgcccacggtaattgaacggttggatttcatttggtacctgatgtaccatctgctggaccgtaacaaatctcatgaaattaacatttttatatttttttccatcgtactatctattgaaagcatgagaagatatttcgttaaaagaggggactatgtacagagagaacacacggaaaattgatgacctttattttggtttattaaaaactgagtagtgaaccttggcgccactcatctcaattgtagtaatgacttagcattatttagttcatattcctaagatgcatgtctatcgaaaacatccaagtagtggattcaggggaaagaaaatactgcacgtagctgaatactcgtttttttatgtcacccaaataaccataattttttttaaaaaaattaacaaaatagattaatatgaggcacattgtccacaagcatataaggtcaaattcgacatttacaggttgtgataaaaataacaaattaaatatatacattcagtcatatttgttactttaacttgtatatttgtgctgtaaaatatcttatattaaactatcttgttaattggtttttaatattttagtgcacatgcaagaaataagttgatgtcccattaagggattaaaacacttttcttggataatgtcacactgcatgtgcccagttacatgtgaggatgaaattctctccctagttccaaatgaaagtaacacacttggtaaatatatttgaacttgtagaagagggataggctgtgaaattacaggtaaacagttatgtatgttaatttgttcttgtttccaccctgaagccgaaagattagagcattagctgtcctacttgatgggagagctgcaacctacttgttgatgatcagcaccgagaggtgaggacatcagaacaagtcgcttcagaattcagaattcagaattggacttggaaaagaagagaacgcaagaacctgatagtagcagcgcattgcaaccagaacttctgaagagtgaacaccagttatctgaattttaatggtttataaattacttatcacaaaacataaattacttatttgtctcaaagatgtctaatgcaccaaatattttaaatactgaaactctgtaaagttatcagtcaaaaaaaaaaaacctctgaaaaggggcagttctttggagggattggagatttaggagaaactcacacccgtcgctattactgtgattatctgtaaaactatattaaccatacttttagagactttcctctcttgcgatcacaatcaaaatcagaaaaggaacagaagacatcaaatccgtttccttgttaccaaaaactgaaccacatgaccgctgctataggaaggcgatcgatcttcttgtgactagttgtgagttgtgaaccgactctgaagccgactcgtctcgtcgtctgcaacacggcactgaatcggagtcttcgcctagagtatgtatgtaagagagccaaaagcgttgctacctgcagagatccaacgccgcatactcacatcgatcaccatgatggacaagacgagacatgtccctgtgccttgcaacgccctgaagcacggcgccgattcagacaagccggcgctattcagcatctcggagaaaaaggccatcgatgcctacatacccgggatgacgaacagcaacgcctggccgacgcagcagggatggatcctgatccgcgacgacgccaccatgtttctgcagaacccacaggatcctgacgaaaagattcatctgccgcacctaccggaagtcctgcacagcagatgtgcttgcgtgctcgctctccgacaagccgacgatccccggctgcatcgtgctcctcgtcgagcccgaagacaccatcatctggtactgtcacgtcggagaagatgaggagtgggttaggcacgagtacgatattggcacgcagcacttggatccacccatgaatggcaaggactatgagaaagtactgatatgctcgatcgcagcttgccaaggcaagttctacttcaacgccagattccacaacatcagtgtgctggagttcaccccagagccgacgttcagctccatcgcaatcaccgaccccatggattttgtgggcgcagcatgcatattcttggtggagtcggagagcgaactttacatggtatgtcagctgcttgagtacgacttcaagactgtctacgacgtcactgtttataagatggatttctccaagcatcaatggtgcatagccgaggacattggtggccgtacgttcttgatagctccttgttattttggtgcttcacgttcggctgatgagtgtgggctagagaaggattgtgtatatgctatttttgcgcgtgataaatattttgaggtatccaaggtagaggatggagaaactgacgagtatgatctcatcgaagctccaaattcagaaagagggatgtggattttgcccattactgggtagtctagtttcacaattgggaattggactttgttttatcatatatttcacctgtaaagaaacatgttcttaatcagtgtaaccgtagttaaattcgtgtttccaacttaatgagctatatatatatgaaacaatactatcgttcgtgtatcaatcagcatgacaagaatttttgttggaaagaaagggagggtcagtatttctaatgtgtgacacacagaaaatgcaggaatttgataacttaactttgtatactggtttagctagcatcgtttactttgtaagttctgtcaaaagagccaacacttgattatgtggaaacaaatgactacctagcagtgcatgttgccaaagccggccacctgtagatggaattatattttcatgcaaattattagtttttggttccctgaatagttgggtgttcctacgtgatgaacaaagcacaaattactttgtcgatcagcttctgaagaggagcaaaccctgcagatccagcacatgtacttccttcagaattcagataggcctgattaggcccaaaatgggaaaacgtctgtttatgcaagcccaagcccaaaattggaaaaacgtaagcatctggtctctgatttttcatgtcgtgtcaggctgcaattcgtggagcttcaggcagggattgctgtgaccgactcgtaatccaccgtttgtactccgcaacatctgaccttgtgactcgtctgcaaccagctagcaatcccctacataagagaggcttcggttcggttgcagatccaacgaagaggataggagatagatcagccttgatcaccatggacaagacgagccgtgtccccgtgccttgcctcgccctgtacctaaagcatggcgccgacacagacaagccggcgctgttcagcatctcggagaagaaggccatcaatggcggcgacatccccgggctgaccaacaccaactcctgggtgacgtcgcaggggtggatcctagtccgcgacaccgcctccgcaaccacatttttgcagaatcctcgcgatttcgacgataagattcagctaccccatctaccccaggacgtgcacatcagttccacatgtctgctctcctgcaagcccacgatgcctggctgcgtcgttctcctcgttgagccagtcggcactatcatctggtactgtcacattggagacgacgagaagtgggtggaacatgactacgacattggcacgcaggtcttggaccctcccttggatggcaaggaccacgagaaggtgccgatatgctggatcgccgcttgccagggcaagttctacttcaatggcggcttcgaaagcatcggcgtgctggagttctccccctcgccaacattcagctccatcgcaatcatcgaccccatcattggaggattaggggtgatgggcatggcaagcctgtacatggtcgagtccttggatgaactatacatggtttgccaaatgtatgactctgacatgaagaccatctacgatgttactgtttataggatggatttcttgaagcaacaatggtgcatagccgaggacattggtggtcgtgcgttcttggtagcttcatgctattttggtgcttcacgttcagctgatgagtgtgggctggagaaggattgtgtctactctatttttgcgcgcgataagtattttgaggtgtgtaaggtggaggatggagaaactgaagagtatgatctcatcgaagctccagattcacaaggagggatgtggattttgcccgttgaaaaaaagtagagatgaaaactgttcagaactgtaggaaacaatatcatctctatggaaacaacgctaatagaaattagaaaaatcaaatgttatatatagctagaaacaaggaaacgaatcatttctatgaaaatgatacttggtcaattggaatttctgccactgttttcaacctgtagcgtccgttccgtcgtggcgcctagcgggaaaatttaaattctaaaaaccctaattgcgaaaattgtttcttcgcttgcagtcagtctccgcgccattccggatctcgaatccccgatccatcgtcaaatccaaaccctaatctcaatcttccttcccaaatcaattcctctgcaaaagtctattttgcctccctcaggttcgatgggccgaattcctctcggcccatctctctccccatctctctctcccccctctctctctctctccctctctccctcgctctgcccgtgcgccgcgcgcgcgtgcgcgtgagccgcgccgagccgagcgcggagagccctcactgccgcttcccgccgacgccgcccaaatcgccgcgccgcccgttgcttcccgcgcgcgcacgccgtggtggccgaccggccagtcgccgccgccgtcagcacctgccgcgcctgccccgcgtttgccgcccgtgtcgccgctccgctccaaaccggtccgccgtcatcgccgtcgtcatcgacccggccccgccaccaccgcgcgctagcttccaagggacggaggtagagcccctcctccctctgccgcgtcgttctctctccctccttcttttcccaaagaagcaaggaggcaagccccatttccctcttcctttcttctttttcctcccatcgctggcgtcaccctcccttggaccgagcgctactcgctcccttgaccgccctaggtcagttcccaaaccaacatcgcctcctatttaaccaaggcgacctcccatcgattcctcccccccgtttcgctcgccaccaccgcgccattgccgcccctctgtctcgcctctgccgttcattgccaagcgccgggagagccggtgcgtgcgaaggacgcgtgaaggggactccgggtgcaccctctccttcctcttccccggcccgaggccggagcgatcacgccccgcgccgtcggccgtcgtcactgcgcccgcccgcacggtagtgcatcttcccgttctccctccttgccccccctcttcctcttagctttcggtagaagcttgtgtagcctccccgtagctagctggcgccgccccgactgctgccgtcgctcgcagtgggctcgccgccgtcgccgcccgagtccggtagccacctctcatcgccggcctcccacggcgtgtttcctcctaatccggcgcaagggatggattcccggagtcacgtagatgctctagctcgcccgaactgatctcccgtcgcaccgtcgccgtttccatcttctctcgccgccggatgccgccgccgcaatccgccgccgtcgaactccatccggtgaatccaagccgttggctcgctccctctcgttctccctcatcattccggtgtacaccccgtcgcccctcgtcgtcgcacggtgtcccggagaaaccgccgctgcccgccgtccattcgcagccggcgccttcgtcttcctccagccggcccgcgtggcagccacgtaggcgccacgtcggtgccacctcggcacgaccggatcggctgaccccggtcagccgcttcctccggccccgctcgcgcgcgcggtccaccgcgagccatgaggctgcgcgtgggcctgccgcatccgcgtccaccacgaaccgcgcgcatgcaccgcgcctccctccccaaaccctagcacgccccacgtgcacctcgctcacggtgagccaagttgccgacaagcgggtcccactcgggaccacgcgggatggacccgacccaccggctctctctctctctctcctccccgcccgcgcgcgcgccttgggccgccttctcgggccggccggcccattaagctcggtcgagccgcccctttctctcgggccgcgccctagccgcccgagggaagtctaattcccttccctctttcttttcttttcttttctcaaaaaggatttaaataaatcctctttctttagatcaaaaatctaataatcttagaaattcaatatctcctcaaccgtatgtccgtttgactccgttcaacttccaaaattcctcaaatcttgagatctatctaatggcacgcttagaggtcaataatagggctttattttcgctgtttgttgagttatcccgttcggcgtgtagtttcggagcctgaagacccgcagtgcgaggatttcgaggatcaagctcaagatctcgagcaaggcaagtcacctttgatcagcttgcacctataaattaaatctaagtatttctttttgcaaatattgcatgaataggattaacacaagtaattcggccgcggcttgcgagatagcccgccggcccccaaacctaaattgctgcaattaccctccgtgaattattgaacacttaaccctcctttgtcaactgttgtgcttcgatgtatgggccttcgggcacgcgcatcggaacaccttccctcaaatttaaaatatccaacgatgggtaaaacttgggttttacaaaagacttggaaaacccgacacctgggtcggtgcttgcgaactaaatgaatttttccaaaatcgcggaccagggaacgtaccgggagtacagtttcctgctcttgcacttaaggaccgtttccttggaatttcatccgaacataagacaagtgcgaccacatgggtggaatgggacacccctggctgagtaactagctaatcgggggagccatgatgccaagagacatgtggattcaatggggtggtgtcggggagaacccccaggtttcctggcacagtatggtctgggacctaatctggtgttggtctgggacccctctcgttggcatatggtgaacctgtgtctgctctcgaaatgccttgtcatgaaagcccttaggtcaccagacgtggccgttctgcatgggctggatgatccgggttagtaatgtcgtgtgggtaaagtgtactccctctgtagaggttaacaaactgttcgaacagccgtgcccacggtcatgggcggatgtgaggtgattcctagcgtagttttgtttgactactgctttgtgaaattgctgttgtggaatgggttcgatgtttggaaaatctacggctgatgggatcagccaggcccgggtggccgtttgaaagctgttggccgggtgccaaccttgatcaattcaaaagactgatacatcgcacatactccgatcggacgagacgcactgtcccatccgtgtcgtttgagaagtactcacttagttgtttcaaaaaggagtttaaataaaatcaattgtaaaaacaacagccttccccttgaagcctacattaaacacttatttcccatggcttgctgagtacccctgtactcacccttgctctatataaataattccccccccccagttgctaaagaagatgatgtggcccctgctgacgaggagttcttccaggagcaagtcggctacgatgagttttagggtttcggcctagttcccaagtcgcgtctgtcatgtttggtccaagtcttggcttccactttcccttttgtaatgcaattgtgagctcgggatctgtccgcagcccaacatgactgtactcctactctataataaagagacctctgttgctgtgatatactgtcatcctgtgataccagcactgtttcctgggactggtatcgattaacaggttaatttggagcgtcacgggctagttccgctcggggctagttcggggcgtgacacaaccctagttgaaatactataaaatctttttttctagtttaactctagtttattactccctccgttttttaatagatgacgccgttg

SEQ ID NO: 8301 - DNA, 6033 bp, Oryza sativa
ttattgtggttcacggatttaggcttgacgcaaaacttctaaacttgggtagctgaaggacaactcatagcagacaattaattccacaagtaatttctgagaccattgttgatcaaatttccactttattacagcagcagcatctagcccatagcatgatttcagcttagaataaatctggtgaagcctatattcaccctcacaatttgccaaatgcctaaagcaactattagtaacaaccccaccccacgtgtagctttaaacattttaccacaatgagaacaccgagcttccgccagcgcatcaccatcatatattggatcaaaatcatttcatatagttgatgttaatttgtgtttttagttatagatgataaacctaattatttgaattaagcatacattaaaacacatgatcgaacaaagcggtcaattaaattatatgcatcaattgcatgaataaatagcagtagaattacatgaaaaaaaaataagtaaagaaaaagaccatgtctttcggatcaaaatacttacattgtcaagtttaattgtttcctcttcaattgcttcctcaaaagatggagacggtgacatcacaatcctaatctccggagatctaacgatttatacaataggtgatttgagccgctttgttgccggagtctgttgcttttctgtcgaggctttacgtttatatcccttaaggtacttgaggagagtatctcttttgaggcacaatgggcaacatctacaacagtaaaaggaatttttgtctgccatgaaataaattgtaagcataaactctgctaataacaaaaattcaaaccagcatatagggaacacttcaccttataaaagaaaaaaagcaattggaacagtaacatctgttttggtaataagtttctgctaaattattgattcatcagcatgctatgttgagaaatggacagggtataagctatatagccaaaacagttacggttaaatttcagcatagcacattgtaatcatataggtacagcagacatgattattagtatattatcttacttcagacgttatcatgataaaaaggtaggcacgagatggaaccaaatcatgtccttcatccatcccccacatgtttgatgagaaaattccatctatagatttttttttcgcaagaatttagccactacatatccagtaagcatcatgtatgtttttttaccaagcattatgtatgtttttttaccatgatcaagtactaaattggcatgagttatttaacaaaggaaattcatatatttagtaataacaatagggggttgattctacagccataagcaaaaatcattgcatcgccaaaataaagattcaagaactcacctgcgtagaaaccaatggggatggagaagccaatctggtaggagccatagcaagcaggggtgatggaggaagtgagatgggcagcggagtgagcgtcacgacaggcaccagagtgggcgccacgaccggtgatggcgtcaccatggctggttgcggaggaggtcggccgagaggaagatgagcacggccatgagaggcatcaatggacggcgtgtcaacaacggcagtagtggctgaggactgccgttgaggaggcggctgctagggttgagccggcagcactctagatcttgtctagcgtgattcgatcccctcctcccctgcatgcgcgataagtgggttgtggcgccactgggccactgtgggcagtcgcattaactcacatatcttctattgggttgcacataagtgagttagtgggtaagtggggtgggctagcccagtgggttagtggcaggccaccccacttttagccttactctgacgcatctctctcatcatcgagtaggtcatattgctagctgcgcagcgaacaatgcgttgatgtccaccctggccaccagctcatttgctcagccactacaaaaccatcaaatccaaacaactcttcaagaagcagagcagcaagaaagtgggtgacggtaaccaacattgtcgatggtgacgatctgcatgcgatattgcgacttgaagtagaagtagacgtactcgatgtagctgagggagaagttatcgagccactcgccagagacgatgccctctaggtactcattgatagcccatgtgcaggttccccagcaccagggctgccaccacgctctgcagcacgttgagtaatgatggtagtcaactccaaccaatgaagccgccacgacactgagatccgtgttgaggccgatgtgggtgctcaagaaaagggcagaggtatcaggggcggtgtagaggcatctacaccgccggagagcggagagcaaatgcgtcgatgggtgcgcaggggagtagatcgaagcgatggcagcgtggtggaggtgacggcggagcaggaagagcaagagcagctgagtggattgggtgacagtgtgtgggggattgattggaggaaataaggtgcgatgtttgcgttggaggaagttgcggcatgcgccatgcgtgactgaggaatgatccggcgtctgcgtgatttcattgttggatcgcatctcacatcagggatttttatatctggaccattggataggatgatctaatggttagggagggcctgcataacattctatgtgcgttttcgtgggtgcatctagcaaaagagtgaactgcttcttttcatattagtatcaatgatacttgctcttagaaatagttggatatatctattccaataaatgtgcatccttcctccatttcaaatttttaagacaatagatgagactactgtcggtctctatattaacaagtggatatacacggatctattaatgctgcatatcccatcatttcaatgtgcatatctgatatctctccaacgtcactagtagtaaggtctaataaataaatatacaggctagctataaaaacagagccttcccctatagacacaaaacgatactagaaattagaaaaggaaagcagccaagtcgatcatcacatcacctgatcgttcttgtgagctcgggtgacaacgttaattaattcgtaagaaactgcggcaccggcagtagcatcaatggcacggggaagcgccgccgcgccggggctgctgctggcgctttgctgcgcggctgccgccatcgccgtcgtccacggcgaggattgggccgtcggcgacaacaagggatggtccttcggcgtcgccggctgggagaacggcaagcgaatccagcccggcgacgagcttggtgagatcgatgctcgatcgagcaacataatttatactttctcccttttgtattttgtattacaagtttgctttcacttttaagagaagtcgaacatttttaagtttgattaagtttatagaaatataatattttttaaatattatcaagatatatttaataaaactaatttagcgttgtagttggacaaacctaaatttgtcttaaaaaacaaaaacgacttaatccaatttgatcatgagtttgatatataaatacatatggatgtggatacgcagtgttcaagtatgacgcgaagattcacaacgtggtggaggtggaccgggccgggtacggcgggtgcacggtgaccgggccgtccaaggtgtacaactccggcgacgaccggatcaagctcgccggcggcgaggccttcttcatctgcagcatccgggaccactgcaccgcgggcatgaaggtcaaggtcgcggtcacggccaacgcgtaggtcgtacctagctagacttgcatgatgatagtctcgtctagattaagcagaatctattccgaccctcattgattatactctaataagtcaaaaccaaagctaaaaccaaaattgaattttcaacttaaatttgatgctgattttaacatacttttatcagtgtcctctagtgagctccaaatttaaaaactttaaaaacgaccgtaatgagcccaaaattttacttgggctgaactacgagagggaggtcgcaatgcggacatgggctgaaaattggactattatacgttggcccaactagcgcaaaattaaggaataagttcacccgaggtccctcgacttaacagcgagattttttgaggtcccttaaccacgaaaccagaaatgtgtacccctcaattatgtaaaaccgtccaaaaaaaagtccctaggcagtatagacgtccggtttcgctgacgtgacgtcctagttagcaaaaaaaataaaaaaataatatggcacccacgagtgagtgagaaggaaatagtaagggcccacttgtcagcatcatcctcttcctttctctttcttcttctcttttcccttttcttgccgcagaggggagagctgcagtagtcgccgcggcagcaaagcggccggagtggcggcggcggagagcggagtcggcggctgcgaagcaggcaggacggggcagcggcgggcgagcgtggctgcgagtgccgacggcggacaagcaggcaggtggagcgttggagagcggagcaggcgggaggcagcgacgggcgagcgcggctactagcggcgacggcgggcgagcaggcacgcggagcagcggagagcggagcctgcggcgggcggtggccgcagccacccgcatgccgtagctcgacccttccctgcccattatcccgctcgccgccgagccctctcccggcgctcccatcggtgcacgcgaccacaccgggacgctggggagcctgcagctgctgatgttgagcggcgtcggactgcgtgggcagctggagaagcacggcatcctcccgtgttggaccagcccatggacgggcagggcatggtggacaaccccatgaatccggttggctagctagctgcatgcagcgtgcaaactaattaatgggtgtttcataacgacgacgacggcgactggaggcagacggggcagctggggacggtgccgccgaaggagcggacgccggaggcgatgcgtcggctagacagacgcgcattctgtggcgggttcgggaggcaggcgaagcggcggcggagcatcgacggcctgcccatctgcctgctcgtcgtcgagccctctcccggcgctcccatcggcgcacgcgtcaccccggccgctctcctccgcatcctctgccggtgtcgcgccgaggaggtgcgcggcgccgtggaggcggcgtggctggcgatagcgagtacgccgttcgcttgctaacccgccgtggctccggatggggagaggcgcgcgccggccgccgctcccgccgtcgcgggcggtcgcgccggccgcctctctccccttctctggcgccggccgcctcctctccccctctcctgcttcttccccgcgcgccgcagcgcccgctgcgttggcaaccgcgcccgctccgctgtcggccgccatcttcccgcctgcgcgtgagagctgagaagttgagaagagaagagaaaaagaaaaaaaaagagatgtggggcccacatcattttctctcactgacatgtgggcccctacatatttattttaattatttttgctgactaggatgccacatcatcaaaaccagccatgtatactgtcttgggacccaaattagatggttttgtaaagttgaggggtgaagatttctggttttgtggttaagggaactcaaaaaatctcgctgttaagttgagggacctccggtgaacttattcccaaaattaaaaatcccgcgttgggccggctctcatgccggatcaacaggacatgacatggcttagcatatcaaggaataagtacactttgactcccttaaaagtgacccatatctaatccatgacactaaaccgcaaaatcagatatattgacctctaagctgttaaaattggtgcaatttaactctctcagtggttttggagaacggattttctgacatggcgtctacgtagcagtgttgacctagtctgctattgacgtggcgctagggtggcattacaattaaaaacatacatgtggggcccattcgtcattcacacaaaaggaaattttggggg

SEQ ID NO: 8302 - DNA, 15667 bp, Oryza sativa
aaaacgagaaaggggaggtttccatggggtccagatcccttagagttagctataacttcaccaggtggatttgaccaaatccatgacatcaattgtttcctatggctaagatgaagccacgtattaacttatattaattaactccctcaatcacatatgcttgaatgaaaattacttaccttttcttctttttatgttcctaatgagtatgtttctgccaacaacattaacaaagtttgcacgctctcttcttctccaaacaagaagctatggtcatgtatagaactatgttaaacatttagtacgtgcaaacatgcataaacaatatacacacaaacatattgctaaaacattagagccacaagcccaatatgatttttatattgtggatgaaccatgaaatttctaggttatgcaagtaaaattagtttgtatattctttagatatatagatatatagtattcattgatttgttacaaatattaggatgaagaaaaaaaaactagtgggaattagttagttcatcccaaccgttgttatacagagacgactgagatttgatcaaatatctatcgggtggagttggagtgaactccagggaatccccacccatcctccctaagctcactcgagctccagctcttttgctgctcaaaactggagcgctatctcctctaacacaaagtgtaattcacttttctttttttaacccttaacatgaaagagcaaagatattttaccttgtaaaatagaaaaagactttttgctttgttctttcttggaattgggggttcacggatcggaggaattgaggtgggggcgactgtgcagcaggtggaatcttctgtgtgagcgagcggtttatcgtgttaatggacgagacgtcaaagaagatcaagcagggaccagcagagccaatatcatcctgcgttcttgtgatgttgcattatattgcatggtgtgctttgcactttgcacagtcaccatcgcatcaactggtgagcgtcgacagtgccttttttctaggctgggtgcctgggttttaatttgctgcatttttatttggaagaaagaaatgtattactcaatcaaagcgtcctcgcatacaagttgcgagataaaattacagctttctcccaaccaaaaaaccagaaaaggaatcaactctagccttatttgctaaaaaatggctaacacaattttgactacggaaaacttattaactgcttaaatattgtattaaattgtgcttagctaatgtatgcagtataaaactaagtgcttatatggaaatcctgtaacatcttggttagttttcactctctttggggcactgcttttgtttttttaaagaaaattatcaaaaaaaaaaactactacatgcatcccaaaataatcctatctaggataagatttgacctatcctatgataacaaatttagaccaagggaaaactctgaaatggtaaaaaaaaagaagctaaataggagaaatcgtaaatacgaaattgagcaaatgaaaggaaaactcgagagaattatttagttatttctctaaggtttgtttattctagaaaaaggaaagtaaaaatacttgacaagagtgaaaaagagattataacgatctcctcttagtcctacggcctccaccatcctcatgctggtgtagtcgttacccagtgtcacccctcgccccaaaatctaaactctaggttttttttctagcggactttcatgtcattattgttggtgagttcctccccttcttccctcaatctagtgctaggttttaatgtgactgagattcttagtaattttatcatctaagatatatctagcaattcctatacacctgacaatgtcgtagcatgaatataatccattagggtaggcttaagttatgcatggctgaaattcactaatatccacatatgcaggaccttttgcttgtacacatcctggctgacaagccggccgactgaaaacggccgtgtgttgtgtttttagcggtgggtcgcttggcgtttgttgacggccatgtgacactgttaggcccaatggccgatgcaccgatatggccagctttgtgtgtgcgatgctgtgcacagtgctcttgctggggtccaaaaggtaggagacaaacggaacttcgtccatttgcaggggcattgtggtccttatatatgactcccaagttcaacgcacgcatgattttccgttcaaaagtgcatatatactctcctcgttatttgttactacaagtcagcctagctacctacatgtggatttcacgcccagcccttagaacatatcaattcaatagatattagtagccaccgcgaaatttggaaggagcgaaacacaacaaaacattgctttgacgccaagctcaatgctgggtaagaatgtaaggtcatttcacagtggcattgtttgtccacatagacagattgcatgtgtggagaagaaaagggatggggaccatgtttttgtggagtcctcgcatcctctgttggtacctgatgaggacatcctccactattacccactggcaaagacgctaaagtcgggcggcgaccgtgtgagcctctgaataatcccaccttgcttagcgagccattcttcccctattggactagtcttttagggagattgggcttgtgccaaagaactgttggggtccgagcaaccttaagttattgggcctcggccaaccccacctggaccggattgttatcagtaccgatggcctcgtcaaaaaaaaaacagtttcatcgaggaaagctatcgatggcctcgtggctaaaagcgtgtgaggtgtgtgtgagagaggggagaggatgggtgggtggggacgacctggagctgatcagcccaatctgctcatcgcccaacagcaccacacccttgcccctggccgttctcctgcagcgccagattgacaggcagcatccgacaacttcggatcgagaagagagatggaggtgacgctcgctagatccaccccatccgatggtgaggacatgagtcattgcctgagagagaggggagaggcagcagtgacgcagtctgacagagaggggagctcatcccaccgcttgatctgcgccacggagctcccgccatccctctctcccacaccgagtccacgccgtcgagctcatcggtgcactaagggtggagggtcattgatctgggttggaggagaagagggtcgtggccggcggtgacggagaggagcgggtgtcaccgctgttcgtcgtgccgtgcattgtgggaactgagagggagggaggggataagggagagagaaggtggtgagtggattttatattcttttctggattttagggtgtgcaatacgtaatttggtacttctatgtaaattagaaaaagcataagaactgaaacatgaagtattaggggtgaaatataaaattaaaatcactcctatagccaattgcactgtgaagaacccagattttgaacccatggagtctatgtggcactccgaggtcttatatatgggtgaaacgcactacgagtgccctatgatggaggaggagacactagtgtggtcatgaggaggggacaacatcacccctcccccccaccaccaccacgagtttgaccttaaagcacgaacctttacctgccccttgattccatcttgtatatagcttttgtatcacttaaactctattctgacatacaatataatcttcttttattgacaagataacatgcatatataatatgatccattcaattagaccataattaagctccacaaaagctctaaacacctatatatagttcatcatatcctgatttaggagaaacactagtggtgtgatggactgatggtagagttgtgggtgtatgaatttacacatcagttcaaattctagtttccacaagtactacgcacatataaatgggctttcaacataaatttgttaagatcaggaacgggtatcagagacgcattcaaggatgtgtgagtgtagtgttgcatctatagtgttgtgtgcgtgcgtgtgcgtctaccgtgtaatctaaaaaagaaaaaaaatcatctctctttcggcattgtctatgaaaaatataactatgcaaacatgctagtataagcctctttcgtcagtgctgataattggcccaatgtgaaagacagatgattcgtaggcagaataagtttatttttcctccctcatgtcttgctctagtcgaatcgcatccctcaagcataaaactaggtataatgtctctctcaatttcaaaaaccagtacaaatcaacttctttctatggtttgtgaaacgatttatgcttacgtgataggttgacttggtcccctgttctgacaaggtaacccattcattaaagaggttaaaaatagaagtgggatccatatctaagtgataagggtaaaatttttttaaaaaatacagtgggacctacttttcagcctactcctctctcgagccccaaacagcggcacctccatgtgttgctctggcgtcgcctctactggaggggtccgtcactgcgccagaggacgcggtcgacgggtagaagtgggcagtgatgggcctgacacatagaaggaacacctccatcgagagcgtgatctcgttgacctctggtgacgcatctggttcctcccagagagggtatcaccatcgcctgtggcgacgacacccaccgctgtagcacatgtcgccacacgctcgtccttgaaagaggtcccccattgaagtcgggtgcagatacaatgatgtgggcaatgtgggtacagccaagtaaggtgacggctggcctcctacttcacggatggcttcctcgcctgacaggatggtgcatcgtatactactcaatctaaacaaaccaactagtaaaatatggaatactactatatcttattcggcatgcaatcatcaaagcttcatcaccaaatctctgaatgcatatatatgatcaaatcaatccagcatgtacacaatgcacagcaggaactcccggtcgtagcagcacatgcatcaccacgccgatccaaacgctgcagctccccagcaactcgtacaccttcaggtgcatcacaaattcctgcacatatcaagctaaccaattcttaagcacaccacccaacgattgcaccaactattctaaataatctggcctgctcaaatgaaatcaaccgtgagccaaattatggcgtaaacattaagtccgattttacaattgagggagatggttcaatacgagcaagacatgagggaggtcaagttgacttatcagtttgtttcataagcataattcggatgggcagcgtctcgtcttgtgtccgtccaccagcagcatcccacgtaggaaaaagtacaccgaaggtctcttaacttgtcatcgagttacaaaatcgtacaaaaccggatatataaaatccctcagcttacaaaaccgtttgcttcggtggttttgagttttgaccctggttttgtcctacatggcggctgagtcagcgtaggacccgtgtgggccccacatgttagtaagccatgtcatcacctctctctctttcccctcctctctctcacttttctgaggccgacgacgggcggcgctgtggggaggaggccgccgggggagggggggagggcagaggaggaggtccggcggccggcgtcgcgccggcggaggcaacgccgccgcccgcatcctcgttgccgccgccatgccgtgcagcctgatgaagggcgcgtcggactactgcaacatctatgtggtggcgaagggcaagtcggtgaacgtgaggcttgccaagtgcggcgtagctgcgctgccgttgctgcccacccgctcgccgcttgccagtgaacgttgtagccttttcgccgctcgcctctccgacggtacgatccgtcgacgccgctgtcgggcgccgccgcgctgccggacaggacgatggccaccaccggcactccaatctgaaagaaaaacaacgcacaatctacattccgtcagtgtcgaaaaagagaaaaaagaaactcctggtgcagatcaaatcagcgaccttaaaattcccaatttgatgtacacaggctacaacgtttgcaagcactctaaaaaggagcaaaagcacgaagagaacaatgaacaacaccactggtaggagtatatgcacacattacgcccaaatcacaggctttggagtttggtctaacttaatcataagattagcacgcgaagccaaaaaaagggaaaaggaaaaatctcctgtaatcccccctcactccggcatgctcgccgatgatctccggtgccggaacgccttgagcgggctcgggaagtgccaaccccaccacgccttcgccgtcacggccgccgctttttcctccactgccgtcgcggagaccgagctcgacctcacgagccccatctcctcctcgtcgtcctcctccgctgcagcaatacctcgacgcgtccgccggcggcagcttcccccactgcgaaggctgccgccgccgccctcctctcccgcctcgccccggcggcctcctccccagccgccggccggcttgcccacagaagaggagaggagaagagaagaggagaggagaggagaggagagagagagagaggaggaggaagggagagagatgacgtagcatcctgataggtggagtctacgtggatcccacgctgacttagctgtcaggtaggataaaaccggaatcagaaccactgaaggatttattgtgaccgattgttaagtaaggatgccgcatatatgtttttgctgttgagggatgattttgtatcttgatgataagttgagggaccttttcgtgtactttttcctcccacgtagaagaacgcaatttcggctgccggccttctgggctggataaggcaacggcccacgtaaggaagacgcgtgatgggcctttcgagggaacaaagggccgtcgtagtttcaggcccaaaaagaaagtctagaggccgagagagatgctccgttttctctgcctctcctcacagaattccacgcattgcctcgttttttctgctctgctcgattaaagctgcagagaagggcagagttttcatggccatgtccatgtccatgtccagcacaacgctccaaggccggcataggtagactttttgaacggtacacctacgcctcaccgaccgctcagcctggccccgggccccggcggccggcgcggtgaaaaacgtcggccaccagccaccgtccgtgcggagaactgcgggcgccgccgcacacgcgcccgcggtgagaaatggatggacgcgacgcgagtgcgagtgcgagcgcgaccaaggacgggataggaggaggccgagatgtgtatggccaaggccatacgcataccctttgtgggggcaggggaagcggccgcgcgcgacgggacgacgaggggattttgggtggggtgggggcgcaagggggtgacatggcggcgcgacgctgcagattttggggggccgaaatccccgatagggagagacgaggatgaggcctctgctggccattggttcgccccaatcgtgtccttccaagaaaatccacctcatccccttcctctccatccccccgttgctctcaccacacgtacgcgcgcggcgcaaccctacaaactacaaactcaactcgactcgcctctccatcctcccttgattatttgttctctctttccctttccagcctcggtttagctacctccatcagcagcacacgaaccactaattaattacgccatgttctaaaccaggattcggcttggctactttctcgattttcattagcacgattttaacgattttaaagctgctaaacagcgtgtgtttttttcttctaatttttatatagaagttgttttgaaaaatccaaataaatttattgatcatttcttactaaactgattatatgccaatcacgtttctccttttgcgtgcaagttttcaacatctatttagaaagcgcccgagtttcacacacaattctcacctcaattacttgctctccaggaaatgcttatttgcaatgtcaatttttttacagcacccattaaccaacactgctatatgcaatagtagccttgactatatctaccaagaattcaaatcccaaaacaaaacatcgctgtaaccctatagtattttagtactgcttcttttgtttaaaattttcctatagtattgtgtttacatgaaacactcacacacactaggcacatcgatggcaaatctacaaccccactaaatttctattgaaaatatatatgctaaacacctttttagctgcttatcgtgttccacttataaagttgttctccatacaaaaatatacaacaaaaccagtctaatattaattacatatcagcatatggcacaccgtttgattatattattctagggcccacatgtaaatatactaccccacgaaattaaattctttgtaaattccactatatatcatactatctctgttttttaatagataaagccgttgatttttgaacacatatttaaccatttgtcttattaaaagaaaactagctaggtgccccgcgtaattgagcggctaacacccaagcaaaatcatatattttcagtatgattttgcttaaaatttattaaatagctatcttgttgtcttaagactttgaaagaccaaaccttatcatctccgtatttctaattatatagtttttaaaagtcacaccagctgctaccccttacttctgccatatccttctttatttgctcgctcaatctaccattatttctattaattatcctttaaatcttaaacaattggatcttatagtttttagagtttattgtctcgttgggtttcgtttttataatttgtaaaagtcccgtcaaacgctgccataatattcctctacggtccgtccactgtctttttctctttattgtttgggattttaaaaatcgaacataattattgttcaggttcattttttttactttttagaagtctcgccaaactgtcagcggctttgccattgtactcctttatggctcgcccgctgcctcccttctttagtgtcattgagatattaaaatcgaacataattatcattgtttttttaccttttaagaagttccgaacctttagaaattggactttgtagtttttagagtttattttcttgttgggttttattttttataatttttagaagtcccgtcaaacgataccactatactcccctacgacccatccgccgcctactctttgttttcattgggattctaaaaatcgaacataactatcgttggaatttattttttatttttaagaagtcccgccaacagttaacagctctgcaactatactcttatacaccccgcccgctgcttctcctttttactgtcattgagattttaaaaaccgaatatgattatcaacgggtttttttttactttctagaagtcccggcaaccgtcttgcctgtttgcttcatggcctgcctgtcgtccctccttttaatcgtcattaggattctatttggtgttttattaacagtttttatacgtcgtatcaaccgtcaccactctactcctttataggcttgttacttaatttacctcatcatttattttagatggtcttctctttcaatagtctttattttttctcaccaattttagttatttataaattgtattcctaactaaaatattttttctttttctaatttcagaatttatttttttttcaaattttaattaatactgtatagtgttcttttaatatttttattttttatttttgaattttagttgtttcaaaattgtattcctactttaactctcttttaatttttctaatttttgatattattttatttttattttgaattttaattaatctcgtattaggttcttatatgaattcttctttcaatattgcttatttttaattatgaatttcagttattttcaaattgtattcctacttgaactcttcttttcgttttgctaattttggattttatttttatttttattctgaatattaattaatctcgctttgggtttttatatggactcttctctcaatattccttattttaaatttcgaatttcagttatttttaaattgtattcctacttagactcttaatttttttctattttcagattttattttatttttattctgaatttcgattaatctcatattgggttcctatatggagttttctttcaatattacttatttttaattccgaattcagctatttttaaattgtatttctatttggactctccttttctttttctccgattaatgtgggaatttctagcccccacggcggcaaagtggtgccttcatttaaggctgttttaataatataatagattatgcagaagtataagatataaatcatgtttaaagtattttgagggataaaataactcacaacaaaataaattataattacgtatttttgaataagacggatggtcaaacgtgtgacagaaaattaacgacgtcatctattaaaaaagcagaggtagtattaatttagactaaaataattcaccaaacacttcaccggttcaccctttgtcctattccgttctgcagagaaaacagtgcttgaggttcagagttagtagaagctgcaactctcagctttgctagctagctagaagcagctatatatcccttatcctcttatcgcctctcaccctctagcttccctctccactgcctccctcgctcgctatctcctgcctaagcgctaagctaagcgacctgcagttctgcaatgctaaggccaacgtagagctgccgcttaatcccgtctcgcttgattggtttctgacaagaacgagattatcgagaggtttcaattcattagcttagcttagctaattagcttgagggacgccagccatggcgcccaaggcagggaaggccaagccgcacaaggccaagggagacaagaagaagaaggaagagaaaggtgcagcttaactgatggctaactgaatcttcttcacttcccatctgaattttcatcgaattcatcagctcggatgattggtttaatttaattcgttttcaagacaaaagttattttcagatgcaaggattaattaattaagctagcttgcctctttcaatatttgaaagttcatattgtttcagtattaacatgtgagtggtttttgcgtggaaatattgatatgatgctgctgcagttctgcccaccgtgctggacgtcaccgttgagacgccggactacacgcagctgacgctcaaggtgagcgccggggcgcgtattatctccgtcttctcgcatggatattttcgcgtaattaattaattaatatggaccacccagtattctgaccagtgaccactgtaactgaatatgtactgttccttctattcgatggccttaattgtgcttgcatgttaaacgacaaaattaagtaaattcttctctagctttcacttgcaacactttcatcttgtttttttttaaaaaaaagaaaaaaaaactttgtttaaagcgaaagtgcctaccacttttctcttagaaacttctatatttatttttttcaattgcacagaaaacgtgtttttcttgtgctaattagcaatggcgagcgaccgagcataagcggcaacttaacaaagctggcaaagaatgaccccactcgttgaaatgtacatgatgagaatttttattttctatacgaacattacacaaaaaagttcatgggcaatttacacatcctaattatttttgagcaagttagcaatggttgtgttagcttaagtacatagtaccattttgtgcaatggcatgtagcctactgattatagtaacctgagtagcgtcccaattcccaaggttttgagttcaaatctcctagtgaattttagattagggctgtgtttagttccacgctaaaattaaaaatttgaagaaaaaaattagaagtttatgtgtgtaggaaagttttgatgtgatggaaaagttgaaagtttgaagaaaaagttgaaaactaaacaagactgggttatttttggggttaaagttccgagtttaaatctcaaattttatattgggttatttgtgtgcctaaattatcaatttaaatatggtacttataattcgcagtggtaggtgccaactcgctgcctagctcattttgtgtttgtggtgctttgttcagggcatatcaacggacaagatcctcgacgtccggaagctcctggccgtccacgtggacacatgccacctcaccaactactccctgtcccacgaggtcggtcagaggatcccaacggctcacatccgcctcgagattcgtgcccactgacagcctgtactttctccctctctgccaccaatgcaggttcgtggggcccagctcaaggacacggtggaggtcgcctccctgaagccgtgccacgtcagcatcgtcgagggtaagtctgaacgagcaaatcccgtatttctcgaggaccaaaacgcaaaaaaataaaaaactcaccgtctcgtctcccatggcgcgcggcagagggctacacggaggagctcgccgtggcgcacgtgcggcggctgctcgacatcgtcgcctgcaccgccgcgttcgggccgaggaagagtgcgcccgagcagaagcccgcatcgccgtcgtctcccgatgcgccaccgccaccgcccccgccggcgtcgcccgacgccgccaagacccccgggtcgcccgccggcggcggcggcggcgttggcgccggaggcggtggaggagaggagccgatgtacccgccgccgaagctgggacagttctacgagttcttctccttctcccacctctccccgcccctccattgtgagtgctagtagtttcgttcttctcattcatttttgttttcttttttttttatttgagcgcattcggaacagcagaagatggtgagccggttcgggtgatatttattttttttcttccacttttgttaagtgaaaatgcgattggtttcagatattaggaggtcgacgcgcccattcgttgatgacaagacagaggacgacttcttccagatcgatgtgagtttgcttgaagaaaaatagcacaaatgtgatgtttctttttagtttaattgattcgattgcattacattagagtagctagataaggtttgccaatagttgtttcaaaatctcatgctaatttaactatatattcattagattagactgcaactcatatatatgaaaactacaattaattaatttatcatagcacgcacgtaaccatcaatatggccaatgtcataaaaaaatgcaatatgacactcatttgcacctgtataattctccaagcgttctgcaattgggtgttggtgtgcaggtaagggtttgtagtgggaagccggtgaccatcgtggcctccaaagctggattctatccagcagggaagcgagcgctcatcagccactcccttgttgggctgttgcagcagacgagccgggcgtttgatggagtacgtgtgaccttggagattttgtgatttgattattaatgaatggtatctcattgatgtggaaatatgtgtgcgattttgtaggcttacaaggctcttatgaaggcttttgttgagcataataaggtgaggtcttgctaatgcttgatttcttgattattttcagacatgcctgaatatgtgactatttaaaaattattaatttcaaagctaaactttaggttagagatcattttctaggtttattggtcaatgcatttgaagagacataccctattttccacggaaacaattgaattcgtggaattggaaataagctaatgcattttgtttcactaaactgaatagtgtgcttgttttaatgtacctatatatatattttgtttgcatgtattaacacaactttgcaattgcatttgagagatttatagttcacattttattgacatttccttgcagtttggaaatcttccttatggattccggtcaaacacttgggtggtccctcctgctgttgctgatttgccatcggtgtttccaccccttccaactgaagatgaaacatggggtagcaatggtggtggtcagggaagagatggaaaacatgaccataggccatgggcaaaagaatttgccatactggctgcaatgccttgcaaaacagctgaggagaggcaaatccgagacaggaaggctttcctactccatagtttatttgtagatgttgcagttcttaaagctgttgcagctattcagcaaatggtccctgacaagagttcacttgaaacaccgaatgacaccacaaatccagatttgcacacgcaacaaattggagatatgaaaataacagtcacaaaggacaaagcggatgcaagttctaagttagatgtcaagttagatggaagtcaagctccaggaatgctgtctgatgaacttgctaagagaaatctgttgaagggcatcactgctgacgagagtgcaacagtacatgtaagactttcttctttgatacgggctgttgcagtttacttttatccattttcctgtttattgtcgatgtaattttattagtttacaggatactgctactcttggtgtggtggttgtgaagcattgtggatacacagctgttgttcaagttccagcagatgctcaactgacaactgtttctctagcacaacatgatattgacattgaagatcagcctgaaggaggtagcaacgcactgaatgtcaataggttagtacttggaaaattgattttatatatatatatatatatatatatatatatatatatatatatatatatatatatatatatatatatatatataatcttatgctaacctgataattctaaaccatgggtttacccaaatcagtcctaagtgatttactttacctctgttcgtcttggtccatttcattctttctctcttttcttaatctatttttaccattgtattggttggataaaatctatgacaatcatgtttatctcttttcagcttaaggatgctgcttcataaaccatgtattcaaccatctggaggagttcagcggttgcaaagttctcctcaagagagtgaatatagtacaaattttgtccgtaagataatgacagatagtctgcagaagcttgaatgtgaagctccaagagaaacaagaccaataagatgggagcttggagcttgctgggtgcagcacctacagaatcagacttctgagaaggccgacactaagaaaaatgaggagaccaaggatgttcctacagtgaaaggtctggggaaacagtttggtcagctgaaggagatcaagaagaagacagatgaaaagagtggaaagggtgcatccacaaaagaaaatacttcgacaaatacaaatgatgcgcaaacagtcaactcttccagcacaaaggaggataatgaggcaattctacagagatggcttccagaagctgctttccagagactaaaggaatctgaaactggactgcatgctaaggtttttccctgatcatttctgtttggagatttctcaaatgtcgtcccaagaaattacctcatttttaccggccccttcttctccaaacaacag

SEQ ID NO: 8303 - DNA, 22099 bp, Oryza sativa
atgaacgtgcaagttaatttgatcctgtattcacaaaaaataaagcaaagaattcgtagttaaatctataaatgatagccgatcggttaggtccgatgacatatcattaacctttgagccgatgtcatatataaacggatcggcggttataaatagacagtgaggaactaaatctattcgatcggctgtagatattaaagacatatagttcttatattaatatatacttaaatcaagtgattgggatagatcggtcatcggtcaccatgccgagacagtataaatcacttagatcgaaatatatattaataacaggattatatatgtttatagcatagccgatcagatagatctagcatgtatcggctaatactccgatactactctatataaagatatcaaaacaagtataatataccaaacaaaagcttaatatacttaaatgcaataatttcttgacataaagggcggatttaacatgtcactgaagcatatagatcgaatatggttaaattagataagatcggctgaaactccgatactaccctaatcggcaaccagaggacaggctagagatcgatattctaagcacgacttaatagatcaaactcaactgatgcagcattaagtatgaaaagaagaacaatatctagacaatcaagccgttggatgtttcataaagtggtagatatcttatataatctaggacaacgtcgctatttaacctaatcggctgccttctattagcagatgttagccgattgtaggttagatgacgatattgccaaagattatgtaagatatatgataactcgatgaattatatagacaagattagagtgtcataaagatggaagcagtaatctcgagaacacaagtcatcataacaagttttacctcttgttgaagatcgaaaccgatgcagctcaacccgaaagcaagaactcgtcgaaacaaaactaaagcaaaaaggtggcgatgcgccgaaattgtattgaacgtgtgtgttaaaaattacatagggctcggggtctatttatacccgagaattacaagatatgtccataccggacacgaccactatctctaacaaacactaagataccataagtctttgcggtagacttttgcccaaacatatctctaaggaagttacataaaatatcctaattaatagatacaattgccttctcaggactctatccatgtgccgataaaatagaatgtgactctagagaaagcttgcagcagaagtttgggtggttccggcaagggtgctgcctagacggcgtcaccagggagagaagcgacgaaagaatcgccactgctgtccattgaggtctcaagaaccttgactaggctttcgcccggcagccctactagagggggcgagacggcacgacaacaccctcaggagggggaatgacgctcaagcgccatcgttgccagcccggccacagccgggctgggttttcacccccccatccaccgcctgcttatccactattgatgcaccgatgctccaccgccttctgaacctctgccagcgcatgggcaccactacaacggtgccgcccgccaggtagcctccgcatgccaccggtgatcgcaccattcgctgcgccgttgcgcgggcagctacagtaccgcaatggcacactcctctcgaaccagtgccaccgccgatcaagcctcctcacgccacggccaaccccgtcgccgctgcccgcgcctcaccgacatacacaaccactagtcgtgttgagcctccacgcctcctcacgtcgtgggaccctcaccggtcaccgcagtcgtgcctccgcctccgctggcagccacaccggctcctccagccgctgttgccgccggccagccacctgctatcgtcgctgtcgccaccgtcaccacgagctccgtgccgctgttgccgccgcgacgtgctctcccgccgcgagttcaccctgttgtcgccgacgccatcgccgcgagtttgccccacaccagatctgcctttgggggggcgcagatccgcctccggcgcggctagatccggcccgctgttgccatccccgccgccatcggtccccaccactcggcgtagctcgccatcctcatcgccgtcgccttccccaccgtcagccgccaccccgccagatccggccagagcgtagcggatctggcgatcaccaccgccgccgccctcggtggcttcctaggtcacccgagcgtggccccgctggcgagaggcgagctccgccggcgccgtccttgcggctgcattgctttgctggcggcagcaaagcggaggagggaggtggggaagagggggtggccggagctcgtaatacaaggtttgtaaatactagtacgatacacaatcacgattcaattccttatttagagccataaaaattgcaaggaggaagaacactgaccccatttgatgccttaaccatgtcattcctagagagaaccctgacgtaagtctgcaaatggggcgggttgcggtagcccgccccacgtccgcatcgcccacaagaaatctggcgggtcacctacatcctgttgctctacccaatggatttgtttggtgggttttgctgacccgccaaccaacccactagacataaaatacgtacaacacactattgcactgcacacacataacatatatacttttccattctagcgcaacatggtagtgaatgaaaattctcaacaaagttgaaatagcaaagaagattaaagttccttgaaatttacactttaacagaataaggataactgaagtgctatcaaatggcattatgacatgcaaattagaaatgactaattcacatccaactcaaaatacatatgacatgctcccatcctactaagaaattgttcaaaatacatatgacaatctcagtcaaggctaacactataaattctagcatcaaatatcatgagaacatggacactaatgacagctcccaaggtgaagaaggtctcgaaattctgcaagctgaaaacagaacaactcccaaggtgttgacggctgttaaataccaaattaacgccgtcaatacctgtataaaaccataaaagtaaaacatcccacatagtggaaggatttatttctaaccatttccatgagtgttggtgtatattcgtatgcaggtaatcaaccaccaaagttgggagagaatgagcatgaagaatgcaaatatattttgcactgatgaacccacatggttttgagctataacatataaaatgtgcaatcattttgaacgaaaatatggtgtaccataaagtggggcccacatgtcagcatcttgaagaaggatgtgggctagggaagccgcctagggttcagccgaacccctagctggcccaatccagcctaactttggcaaggcagttactaccgacctcccaatgatggttgtgcctgtttctatcgatgtaaaccgtcataaagaggacacttgtcaagaggagagtgaagattccatttagatgcttagcatctccacattcccaaggcatctctccacctataaatacccctctctccctcattctcacacacaccaaagcatgagttgaattacaagaggctattgtactttgttgtatattagattagggagagagtagagtagaggaagtcggaggaatttcggagttgtcagcaatcctcttcttatttcttttactctgttaattactctgctttaatcgaatatcattctaagtaattaagatttattccgtgagagttactcttagttagtttctaatcaacgtatgggatcattgttcactatagtccactaaaatataataattgcttattttatcaattccaccacttaatgcatcaagcccatcttgaactataagattgattatatgtgcaccatagcgaaaatgaaagagatcacctttacatggtagcatattattctcaacaaaattttgttgcaaactactcacaaaactatcgtttaccgaaacattatccaatgaaatagaaaacaacttctgttcaatatgtcaatctttaatacccttaagtattgactcaacatagttttgctgtcgtggggcgcctcaaccaaactgaacttaattatccttttattcaagtttcacttttcatctatgaaattacaagtaatgcacaaataacccagcttttgatttgatgtccatatatcagccgtgggagaaactcttgaatttaagccattcaaaacctttagtaaggctacctttcgtttcttatatttcttaacacaataagcttttattgtggttcacggatttaggcttgacgcaaaacttctaaacttgggtagctgaaggacaactcatagcagacaattaattccacaagtaatttctgagaccattgttgatcaaatttccactttattacagcagcagcatctagcccatagcatgatttcagcttagaataaatctggtgaagcctatattcaccctcacaatttgccaaatgcctaaagcaactattagtaacaaccccaccccacgtgtagctttaaacattttaccacaatgagaacaccgagcttccgccagcgcatcaccatcatatattggatcaaaatcatttcatatagttgatgttaatttgtgtttttagttatagatgataaacctaattatttgaattaagcatacattaaaacacatgatcgaacaaagcggtcaattaaattatatgcatcaattgcatgaataaatagcagtagaattacatgaaaaaaaataagtaaagaaaaagatcatgtctttcggatcaaaatacttacattgtcaagtttaattgcttcctcttcaattgcttcctcaaaagatggagacggtgacatcacaatcctaatctccggagatctaacgatttatacaataggtgatttgagccgctttgttgccggagtctgttgcttttctatcgaggctttacgtttatatcccttaaggtacttgaggagagtatctcttttgaggcacaatgggcaacatctacaacagtaaaaggaatttttgtctgccatgaaataaattgtaagcataaactctgctaataacaaaaattcaaaccagcatatagggaacacttcaccttataaaagaaaaaagcaattggaacagtaacatctgttttggtaataagtttctgctaaattattgattcatcagcatgctatgttgagaaatggacagggtataagctatatagccaaaacagttacggttaaatttcagcatagcacattgtaatcatataggtacagcagacatgattattagtatattatcttacttcagacgttatcatgataaaaaggtaggcacgagatggaaccaaatcatgtccttcatccatcccccacatgtttgatgagaaaattccatctatagatttttttttcgcaagaatttggccactacatatccagtaagcatcatgtatgtttttttaccaagcattatgtatgtttttttaccatgatcaagtactaaattggcatgagttatttaacaaaggaaattcatatatttagtaataacaatagggggttgattctacagccataagcaaaaatcattgcatcgccaaaataaagattcaagaactcacctgcgtagaaaccaatggggatggagaagccaatctggtaggagccatagcaagcaggggtgatggaggaagtgagatgggcagcggagtgagcgtcacgacaggcaccagagtgggcgccacgaccggtgatggcgtcaccatggctggttgcggaggaggtcggccgagaggaagatgagcacggccatgagaggcatcaatggacggcgtgtcaacaacggcagtagtggctgaggactgccgttgaggaggcggctgctagggttgagccggcagcactctagatcttgtctagcgtgattcgatcccctcctcccctgcatgcgcgataagtgggttgtggcgccactgggccactgtgggcagtcgcattaactcacatatcttctattgggttgcacataagtgagttagtgggtaagtggggtgggctagcccagggggttagtggcaggcccaccccacttttagccttactctgacgcatctctctcatcatcgagtaggtcagattgctagctgcgcagcgaacaatgcgttgatgtccaccctggccaccagctcatttgcttagccactacaaaaccatcaaatccaaacaactcttcaagaagcagagcagcaagaaagtgggtgacggtaaccaacattgtcgatggtgacgatctgcatgcgatattgcgacttgaagtagaagtagacgtactcgatgtagctgagggagaagttatcgagccactcgccggagacgatgccctctaggtactcattgatagcccatgtgcaggttccccagcaccagggctgccaccacgctctgcagcacgttgagtaatgatggtagtcaactccaaccaatgaagccgccacgacactgagatccgtgttgaggccgatgtgggtgctcaagaaaagggcagaggtatcaggggcggtgtagaggcatctacaccgccggagagcggagagcaaatgcgtcgatgggtgcgcaggggagtagatcgaagcgatggcagcgtggtggaggtgacggcggagcaggaagagcaagagcagctgagtggattgggtgacagtgtgtgggggattgattggaggaaataaggtgcgatgtttgcgttggaggaagttgcggcatgcgccatgcgtgactgaggaatgatccggcgtctgcgtgatttcattgttggatcgcatctcacatcagggatttttatatctggaccattggataggatgatctaatggttagggagggcctgcataacattctatgtgcgttttcgtgggtgcatctagcaaaagagtgaactgcttcttttcatattagtatcaatgatacttgctcttagaaatagttggatatatctattccaataaatgtgcatccttcctccatttcaaatttttaagacaatagatgagactactgtcggtctctatattaacaagtggatatacacggatctattaatgctgcatatcccatcatttcaatgtgcatatctgatatctctccaacgtcactagtagtaaggtctaataaataaatatacaggctagctataaaaacagagccttcccctatagacacaaaacgatactagaaattagaaaaggaaagcagccaagtcgatcatcacatcacctgatcgttcttgtgagctcgggtgacaacgttaattaattcgtaagaaactgcggcaccggcagtagcatcaatggcacggggaagcgccgccgcgccggggctgctgctggcgctttgctgcgcggctgccgccatcgccgtcgtccacggcgaggattgggccgtcggcgacaacaagggatggtccttcggcgtcgccggctgggagaacggcaagcgaatccagcccggcgacgagcttggtgagatcgatgctcgatcgagcaacataatttatactttctcccttttgtattttgtattacaagtttgctttcacttttaagagaagtcgaacatttttaagtttgattaagtttatagaaatataatattttttaaatattatcaagatatatttaataaaactaatttagcgttgtagttggacaaacctaaatttgtcttaaaaaacaaaaacgacttaatccaatttgatcatgagtttgatatataaatacatatggatgtggatacgcagtgttcaagtatgacgcgaagattcacaacgtggtggaggtggaccgggccgggtacggcgggtgcacggtgaccgggccgtccaaggtgtacaactccggcgacgaccggatcaagctcgccggcggcgaggccttcttcatctgcagcatccgggaccactgcaccgcgggcatgaaggtcaaggtcgcggtcacggccaacgcgtaggtcgtacctagctagacttgcatgatgatagtctcgtctagattaagcagaatctattccgaccctcattgattatactctaataagtcaaaaccaaagctaaaaccaaaattgaattttcaacttaaatttgatgctgattttaacatacttttatcagtgtcctctagtgagctccaaatttaaaaactttaaaaacgaccgtaatgagcccaaaattttacttgggctgaactacgagagggaggtcgcaatgcggacatgggctgaaaattggactattatacgttggcccaactagcgcaaaattaaggaataagttcacccgaggtccctcaacttaacagcgagattttttgaggtcccttaaccacgaaaccagaaatgtgtacccctcaattatgtaaaaccgtccaaaaaaaagtccctaggcagtatagacgtccggtttcgctgacgtgacgtcctagttagcaaaaaaaataaaaaaataatatggcacccacgagtgagtgagaaggaaatagtaagggcccacttgtcagcatcatcctcttcctttctctttcttcttctcttttcccttttcttgccgcagaggggagagctgcagtagtcgccgcggcagcaaagcggccggagtggcggcggcggagagcggagtcggcggctgcgaagcaggcaggacggggcagcggcgggcgagcgtggctgcgagtgccgacggcggacaagcaggcaggtggagcgttggagagcggagcaggcgggaggcagcgacgggcgagcgcggctactagcggcgacggcgggcgagcaggcacgcggagcagcggagagcggagcctgcggcgggcggtggccgcagccacccgcatgccgtagctcgacccttccctgcccattatcccgctcgccgccgagccctctcccggcgctcccatcggtgcacgcgaccacaccgggacgctggggagcctgcagctgctgatgttgagcggcgtcggactgcgtgggcagctggagaagcacggcatcctcccgtgttggaccagcccatggacgggcagggcatggtggacaaccccatgaatccggttggctagctagctgcatgcagcgtgcaaactaattaatgggtgtttcataacgacgacgacggcgactggaggcagacggggcagctggggacggtgccgccgaaggagcggacgccggaggcgatgcgtcggctagacagacgcgcattctgtggcgggttccggaggcaggcgaagcggcggcggagcatcgacggcctgcccatctgcctgctcgtcgtcgagccctctcccggcgctcccatcggcgcacgcgtccaccccggccgctctcctccgcatcctctgccggtgtcgcgccgaggaggtgcgcggcgccgtggaggcggcgtggctggcgatagcgagtacgccgttcgcttgctaacccgccgtggctccggatggggagaggcgcgcgccggccgccgctcccgccgtcgcgggcggtcgcgccggccgcctctctccccttctctggcgccggccgcctcctctccccctctcctgcttcttccccgcgcgccgcagcgcccgctgcgttggcaaccgcgcccgctccgctgtcggccgccatcttcccgcctgcgcgtgagagctgagaagttgagaagagaagagaaaaagaaaaaaaaagagatgtggggcccacatcattttctctcactgacatgtggacccctacatatttattttaattatttttgctgactagaatgccacatcatcaaaaccagccatgtatactgtcttgggacccaaattagacggttttgtaaagttgaggggtgaagatttctggttttgtggttaagggacctcaaaaaatctcgctgttaagttaagggacctccggtaaacttattcccaaaattaaaaatcccgcgttgggccggctctcatgccggatcaacaggacatgacatggcttagcatatcaaggaataagtacactttgactcccttaaaagtgacccatatctaatccatgacactaaaccgcaaaatcagatatattgacctctaagctgttaaaattggtgcaatttaactttctcagtggttttagagaacggatttgctgacgtggcgtctacgtggcagtgttgacctagtctgctattgacgtggcgctagggtggcattacaattaaaaacatacatgtggggcccattcgtcattcacacaaaaggaaattttgtggggcccactgtgggtctatcccttctccctcctctctctctaccttatctctctctccctcttcggcatccgcccgggaggggggggggagggagggggcggaggcaccggcaacgccgggagagaggagcccgagatcgagggatgttgggaatcaaagcaactcacgcgaatacaagctacactttctgaacgaggcagcgaggaagaaacacaaacacagaagcaaacacacaggatctttgcggcaccaaaacaacttgtgcccttttcactggttttttctcttaactaaatgattacaatgagcacagcacatacacacacgaagctggttgttccgcttctcgagccacacacgacgcccacgtcctgtttacttggccgcaacttcacaagtactgagtcctcgccgacgtcgttgcttgcaccaaccaactaacctgcatgcatgcaaactgaccacttcctactcctaatcttgtgcaagactcggctaatcactagcccacaattatgcatggctaactaactaagctacatacatgtgctctcatctcctggctctttattggctcactactccctgccaaccactactcactaagccatgcagcacccacgtacatatagctagctcgccaggccatgcaatacacacatgcatatagataaacatgctgaaattaagaaacaacaagattaatttctaacaagggagccgtcggcgcgcgcgacatgtgggtctgtctctcccggcatgcggcgggaaccagcggcggcagaggcgggagtggcggcgatagccgtgagcttcgttggatgcctccataaatgacgacgacgacggggtctgccggcaacttctgcgacgaggcttcacccgatgagatggccccctccggcgaggacgacgagcttgatcgcatcctcccgcccgtcggtccctcccggactccgtagcgctctgcaccgcgcgtccccagctgtggcggcggcgcccctctacgtcgcggagctcgagctcctcatccgccgcgaacattactccgcctccatacactcctttcccaccacagcatctcgggcggggtcggcgggcggcaaacggcgtcgctactctgcgctactgccggggaaggaagcggttcgaccaatccatcctcctccgcacgctccgccgccactgccgccgaggaaggaagcccgccacgcgctcggcgatgagagaccggcccctccccgccaaggttcgaccagtccatcctcctcctcctccgcagctccggcgccgccccggcccctgcccgccgccgccggcggctgggtccctactcgttgtgttcctccaaaggggaggagaaagggggtgagaaagagagggatgaggggggagagagagagggaggacgaagaatgaagacggctgacttgtggggcccacatttatatttgtgtgatacaaatgggtcctgctcatttttttaaattataatacacataagtgccacgtcaactccacgtggaataaaaaccaagtcaacacctccacgtatgcatcacgtcagcgaaaccgctctccaaaaccaccgaatgagtcaaattgcactagttttaatagttgaggggttgaaatatctgatattatggatcaggatacgaatcagattcgaccatattaattaactgcattcaacggttaactggtaattttgctcgttaggttcgttttctttttttcggttttgctaggccctatttaatccggcagtgttacgttcgtcaattcctgaatctgctttcgtaaaagctgttggcaataactaattaatcaagccatagccttagcttcaagcaactaatacatactatgcatgtgtcgaaatctagaaacaatggtcatgcagatatttggtaaatccgattggagatttttaaatagacttgaataaatgtattctctattttatattggtattattagctattgtttagttatttcctgttttttacgtgctctatattgagtgaaatatataataagtagatctaacttatttagtcgcaaaggctgagattcttttctttatcttaaaaaatagccttgcttggccggatttggattaattgaagtaaagcccagtcattaggattggtaccagcctttggctttggttaatcagttaaagtaaagtactttcattataggataagggccttccttggaccgaggctcactgtgaccgtgtcacatgcaaacacaaacctagcttagttaacttcggttagctaaacacaccttttgcaaacacgaccctcgatatctggatttgattatggtcgatctcaatattccttcgttaactgacgtcactgcatacgcaaaattgaagtccaaggggagcttgataagggcatggttggcacagctccagctccacctcttctagagttggagctcagccaaatagttttagctccaccaaaactgggagttgagctgggtggagctctcttacaaaataaactagagttatgaagctgggtttagtcagctccacaactccactccaaacccaactcctggagttaaatttaagagttggagctgtaccaaatagacccttagggtatagccaactacaccctccggattaataatacttatcgtttttaacaacggtacggtcttaaaaaataactttgaccgttattttttattataatatatatataaatgttaacaaatatataattttttgaagtattttttaagattaatatatgcatatagtcaccatatttcattgacaaatattttacaaattataaataaccaaagattttaaagtttgacatcacacttgtccaaaacgataagtattattagcccggagaaagtactataactgatttaatagccaattcatacaatagttacctataaacctatattgcactattaatacaaggtttcatatgtcatacaaacattgtgttttagtccgtgctatagctggctacaaatctgtagcccgcttctcttctctcctcttttatatactcaatatgtgtttatagcggcttacagtctgctattgtacctgctctgcacccatctatatatagactgatcgaccacccggttctttcaaactaagggggtgtttggatgggactaaaattgtttagtccatgtcacatcggatgtttgacgctaattagaagtattaaacataaattaatgacaaaacccattccataagcctggactaattcgcgagacgaatctattgagactaattaatccatgattaggctatgtgatgctacaataattcaataaacacgtgctaattatagattaattaggtttaaaaaattgtctcgtgaattagctctcatttatgtaattatttttgtaagtagtctatgtttaatactctattttatatataaacatctgatgtggtaggaactaactttagtaactgtatccaaacatccccctatgtagatgcgttttgtagagacccaagtatccaaccaaacttttgtactttagataaataaatctctagacgaggcccctgtgtgtagttattacacgttgaaaaaaaaacaaaagaatggagagtttgcatttgccagcgtttccttcacatagacgcagggatatgaaaatggtcaatcggaaaactgccaatcccatttccatttctttcatatattttattttgggaaacataagcataatggttaaggcggaaatgataatggtaccgctattgttgggatttcaaagatgaaggggatgtttagatcgagtggtgtcggatattatatatggtgtcgcatgaaatattcgaacactaataaaaaactaattacagaatccttcagtaaaccgcgaggggcactaataaaaaaactaattacaacgtttcttcagtaaaactatttttgaaatagcaagtcatgtactactacctccgtcccaaaataagtgtagccatagatatccgtgtttagcattttgaccgtccgtcttatttgaaaaatttatgaaaaaattaaaaagaattagccacacataaagtactactcatgttttatcatgtaatagcaataaaaatgctaattatatttttttttcaaataagacaaatggtcaaacgttagtgtggagattatggataccccatatctacatgacagttataatttagtcggatatacggtaccaaatatagatagaatatctctataaggactcgggttagattctaaacttgtatgtcaaagaaatacccgggatcttagtcggttacgattgtattttatctataatcctatattccgttaggatatggactgtattttgtaaagcggacctcttcccctatataaggaggggtctgtgtgcctctcggggtatgatcttttttccaatttatagaatcaataacacactcggcggaatcatccccggacaggagggtattacttcttgaataagaaggcctaaacctatataaaattccttgtctccaaacccatccactttcctagcttgatcgcctcccccttttattattgctgaaatcttgtttcgacagttggacatgaacagtgctaaaactgcacttattttgggacgaagggagtaatagagaatacgatgaatgtaggcgaagtgctgttagtgttaggatatgtcatgacctgattcctagtactgggcagtattataatacctccgttttttaatagatgacgccgttgactttttctcatatgtttgaccattcgtcttattcaaaaaatttacgtaattataatttattttgttatgagttgttttatgactcatagtactttaagtgttatttatatcttatacatttgcataaaatttttgaataagatgaatggtcaaacatgtgagaaaaagtcaacggcgtcatctattaaaaaacggagtatttccttagtcaatttctacgactttgctcttcacttcgtaatattcctcaacataataatatattactccctctagttttaaaattttaatatttaataccgttaattcttttatatatgtttgatggtttgttttattagcaaaaatacataattattattcatttgttttgtcattaaatagttttttcatatttgtaaaaataataataagataaattaatgatcaaatatatattgaaaagtcaataataccatataaaaaacctaaaaaaactcgaaagaatatacgaataattttacggacttatttaaacactactagaaaaaatgttttttttagcaacgttggccttttatttttccaggcgggtatgaccctcggagctaaatagccgcctagaaaaatgtaaatcggggtggagctcaccatccgcctgcgaaaatcattttttccaggcggaccacttaagaggtccgcctgcgaaaataaatcggaaccttatgtggtccgtctacaaaaatcacaccgccaaaaaaaaagggtcatccttatcctctcctccaccattcttatcctctcctctccaccactcatcccccctcctctctctctccttctccctcacacacttagcaaaaaaaatcctccaccggctcacctcatccctgcctccgctgccggctgccctcctccctgcctccgccgccggctccctcctcgacgacgacgacgaccgcgacgccgcctccgctcgccgtcggctcccctcggtcgtgagatgatgaccttcgcaacgccgtgaagcagcggatccaccagctcccctcccccccgcctccgtcgtcagctgccctcctccccgtctccgccgccggctccctcctcgatgagacgccgcctcagtgagccgtcggctcccctcggccgcgacgatgatgaccttcgcggcgctgtgaagcggcggatctaccggctcccctcctccccgcctccaccgccggctgccctcctcgatgacgacgacgaccgcgacgccacctccgcgagccgtcggctcgcctcggccgcgacgacgacgacgacgttcgcggcaccatgaagcggcggatccaccggctcccctcctccctgcctccgccgccggttcccctcctcgccgtcggctccatctccgccaccggctccctcctcgcccccagcttcctccctctcgacgacgacggtgccaacgacgctaagacgaccacgacgtgacaacggcgccaccagcttcatcctcaacgacgacgaccacgacgcgacgacgatgacgatgcgacgacggcagcaacccctgtggggacggcagcagatggaggaggagagccgtcgtcagctagagggagagaccgacggcggtggtggggcgtcttttttttattcgctgaaatttgctttgcaggcgagtgaatctgccacctgcgaagatgccgtccgcctgcaaaaattgattttcgcaggcggacctcagatccgcctgcgaaaattatctattttcacagtcgtttgcttataggcggaacaccggtccgcctgaaaagacggatttggcccgcctgcaaaaaccttttttctagaagtgaaatacacacacgggggctagttatcgaatattatctctcaacatatttttctatcatctattaacttattaaaggaacagaaaaatgagccttcacattcgctctcacggcctagaaattaccatattaatcggagaaaaagaaaaacatagtccatatagaaatacaatttaaaaatagttaaaattcggaattaaaaaataaggaatagtggaagaggagactagagtccatatagaaataaaattaagaaataacagaaattcggaattaaaaataaggaatattagaagtagagtatagagtccatgtagaaatacaattaagaaataatagaaaatcagaattaaaaataaggaatatgagaagtagagtatagagtccatataggaatttaaaactaattaaaattcagaataaacataataaaattaaaagtagagtttagagttagtataaaatacaatttacaaataactaaaattcgaaattgaaaaaaatgggaagaagagtataaagtcaatataggaatacaatttagaagtaactgaaattcaagattaaaaattgaatattgtaagatgaatttagagtctacatagaaatacaattagaaataataaaaattcattattaaaaataaataatattagaagaagagcctagagtctatatagaaatacattttttagaaaacaaaaattcagaataaaaaaaagaaatattgaaattcagataggaatataatttataaataactaaaatttgatattgaaaataattaataactaacacgtatataaaatacaatatgaatattacacatgagtagtttcgtaaagttagtacaaaattttaaattatgttgccattttaatatatttgaataatacatttagaaaacatatatgctattatataagagaaaatataatgattctagccgcgcaatacgcgcggaccttttcctgaattattcggatgcatatggtacaacatattctacgtgagttacaagttgccaaaatgtcaaagtgcaacgtactatcctctaacccgtctgagtgtttaacttggaactcgtttgttaaaccaatcagatagtgccacgtcaaccatacagcccatcagtgggccccccacccgcggcctacaaagcaaatgcccccgccccccgcctcctctcgtcggtcaacgccgcgctcgatctctcgccgccatggcccgcctcgccgtcgccgccgcactcctcctcgtcgccctctgccgcgtcgtccacggcgaggccgatcaggagaccgcccccgcctacgccaaccgtgaagcctacgtcgagcacaatggtggtgacgccgccggcacgtccgtcgccatcgtcccgccctacctcgacgccgccgccgccgcccgtgacgagcccgcggcggcggcggcgagccccgaggggcctgtgatcccggtcgacgacgacgcggcggaccagcagggcttcctccgcttcccctgccgctaccactgccgctaccgccaccacatgcgccacggcggccatcgccatggggagggattccatggcaaggaggagaagcagcagctggtgttcgagatgccagtcgagccggcgacccgcggcgaggagcgcagggaggaggaggagggggtggttctccccgtcgcggagccagatccggactcgcgccgccagtatgccgccgtagccgccgccgaggaggaagacgaggatgagatggcgaggctccaccacggccgccgctcccaccaccaccatcatcgccaccaccatcatcaccacgacgagaacgaggaggacgagcacgagcaggccgacgaggcttcgcccgccgtggagcggttgatcagcttccaccgccgccgccaccaccaccaccaccacgaagacgaccacgagcagcgcgaggagggtgcgcccatgaagcggttccgccaccaccacgaggaggaggaggagtccgagatgaggaccaagcgcttccaccaccaccaccacaaggacgacgacgagcgcgagctggaggagatggcgaggcggtggatcaggaaggcgctgatgagcagcaggatgcaccaccaccgcggctgccgcttccaccaccaccaccaccacctcagcttccgccaccgcgcggaggacgccgccgccgccggcgaggaggaggagaaaggcggggtgatgagttggctcaaggactttgtgaaccgcttctaggtctctcgatcgatcagcctagcttgccgctgcttcttcttctccatcgtctgcttgtgttgttgtgtcgagttcattcatgattcatatggctgctgtgtattctacttttctacggccgtatatgtatttcgtataccgtatttgtgttgtggtactctcgacttatcccgagtgttcatgttgttgtttgtgtcacggatgttaataaattgttctcctatttcaaatgcgtgcattaattaatcatgtttctatgtaacaaattaaatgttgctcgatcgctatataaaccatttcagttgtctgaaaaccgctacgatcaaaatcgcagagaggcaacaacaagattgcgtgcatgaatactcagctgaaaacagacgactgacaagctagcttgattctggcagtcaccaacaagatttcctgaaatcaggggcgttcttaacctgcttaattaaatttcatggacataactacacagcgaccggtctctggtttgcataaagcagcgatcactccgtcctatatttaaatctctttttagcttaaaaagtactatagtgcacgttttttacctctttaatcacttgtatcttttaaatcacatattatttttaagatctatttgcatcattatactccacttaaaatatatgacaaaacgagatccctgttgaataaattaaaacattttattaatttaaaagtaatttatttaaattatagaagtaacttagctatgtaatagaagtaactctatatagcattagaagtaattacgttatgagtgagttccagtaagaaacttatgtggagtaaattcaaaagtgtagagaagattttcatgtaaatacatttatgaaagtaaatttaataaagcctgaaagtaatttacataaatcataaaagtaacttagcataaaatgaaagtaagttattacagtaagttattacgatattagaagtaaatttatcgtaggaataaaaatataagtctatttagaaattaaatttaatcagcacaaattatggaattgagtaaaaaaaaataaaagtaatcaactcaaagcattatgaaattacgagaagtaatttaatcaaatctaaaagtaatttatatataagataaaagtaatttgcatatataataaaaagtaatttacaacataaatgttttttcatcataatattatcatgtaagatcttgatataaagatttaattgcaacgaatacaatggtgtaatcggattatagatcgaataagtaatttaagagaaaattttataagaagaaaaaaaaatgcacaacctaatagcataaactacttgcatgcatgtctgtaacgctactagtgcttctcacgtaattatccgtgtcgctcgttaattctaaatcgagatgcctctcgaaatagattttgtgatatttcatcttgactttgaagcgggcatatatgaactccccgcatactcttgacgatattccctatgttcaatcaccaaagcctccttttgattgaagaaaattacagacattttgggcttattcaatttgttgtcaaaatcaaccaaaccaaattttggtattgctgaattttagtaaagtaacaagctaaacaagatttttaccatcgcaactttcccaatttctaccaatattgggtaattctctacaaacttctattcacaaaactatataccaaaatttgataaggtgttaaattaaacaccaaaatttggtaattctctacaaacttctattcacaaaactatataccaaaatttgataaggtgttaaattaaacaccaaattttggctttaccaataaatgataagttgtcttttaacattgaactaaacaagcccttcattataattgaattcattcataaagtgctgattaaattagttgctgaatagcaaacccctctctcgtattctttctcttcggcagtagtgttagcctccatctttaggaggtccctttcgggtttgctctttgataacatcttcgttagcttataatgcttttttttcggttttaccatccttcatgggcttatgcgtaaattaactgtcatctcagcaaacattatcacacacacacaaaatttgaggtattatatagtctcactttatgcttttaaaaagaatgagttcatgtaaaattactgttaacttccgcgtttaaatggagcaccgacagcagaaggcgcgagcagtgattgtatcatccgtgatttcactggtggagaaaccatctttggtcggtccaccagttttcacaatagtcccggttatattaaaaaccaggactaaaaatatctttaatcccgatttaaaagctctaccaaccgggactaaagatctatttatagtcccgattggtaacaccaaccaggaaaaaagatcgatataagctttactcccagttgatgttaccaaccgggactaaagattgatctttagtcccggttggtcacgcctaccgggaataaagtcgacataagcgggatagttgcacgcggatcggatcaatacaatctcctcctctccttttttaactcatctcctcacagagtcacccttatctcttcctctccctcctcctttcctctcctcctctccctcctcctttcctctcctcctcctttcctttcctcctctccctcctcctttcctctcctcctctccctcctccccacctccctctgcaacggcggggcgcggagggccggcccgcgcgacggcgcggcgagcggagggccatccggccggcgcggcggtgcggcgcgcggagggccgggcgaggcggcgcgctggcggctggcggccggcgcggcggcgcggcgcacggagggccgagcgaggccgcgtgcgggcggctggcggcgacgggcggctcgg

SEQ ID NO: 8304 - DNA, 22170 bp, Oryza sativa
attgtcactaccgcagaaaacgttaaaggtgccggttgttaaaccacctttatgtcagttttcccaaccggcgttttcccaaccggcaccatggaagcggcacagatgacagagccggcaccgatcgcatttttaaaaccggcacctttgataggttcatgagccaaaaaaaaattagctcgatgcaccggcttgaatcgagccgatacattgagccgatctcatctaacatagaaatcccaaatcaatcccaatccccaatcaaacaacatcacagaataacaaacatgaaaaacatcactaaaaatctttcactaacattgaatctttcacaaaaatcattcacaaacaacgtaaaaaatggatcgatgcggcagcttcaatcttttactaacaacaaaaatcaggaaaaaccagaggaaagtgccaccaccgccggtcaccaccacctcttgccgccggtccgccgccgcaagtcccccctccagatccgacggagggacggcaccaccactgccggtcaccaccacctcttgccgccaggccgccaccgcatgcccccctccagatccgacggagggagggcgccgccgcctctcgtcccgccgccggatctggcggacgggagggcgtcgcgcccagcccgccgcccctcccacctctgccgggccacagccgcctccacgcctccggatctggcggaggcgaggactggcccaccgcctccacgccgtccaccgccaccgccgccgcacctcccgtccacgcccatcctgccgccgcagagagagagaggagaagaaggatggagagaagggaagtagagagagggagagaaaaagccgagaagacgcagctcgaccgctcgaccttatctccccgtgggtgtgggccccaccgtgggaaaatatctacccgctggctcgactcgatcctgtgggtgtcgattttttaaaaaaaaaccggcacctacaatatattataggtgccggttcttataataagaaccggcacctataattgcttaaaggtgccggttttttgcgatttcaacccgtgggaagtgggaaaaggcatataggtgccggttttagcacttccggcacctataatgccgacacctatttgatgttttgtagtagtgtgtggagtgtagggcggttgattgatttaaaaataatttgaataatttaaaccgtcttgagctctagccttgatcgatctccacagggggttgaaaatttgagatgtctaggaaaaggaatacctgcggtcttgcgaaaattatttctgtatagtagggagttgttcttgtttttggaaccacgttagagactacagagaatgaaatggttaacaaagtactttctcggatggtagatgggcttgcatacttgaagtaagtttggaacatatcttcatgtaattgaccaattgaccacacttgtgcaaataatattgtacgactaatcgcatgacttgtgatcaaattaggacacctctggtgaggagctttaattaattattttcaatgtattttgttttgtttggagagtgcatgcatatatcattgaggtgcctatgcgtatatatgcatagtagtgagtatatgtatgtatttagacatgcatatatacgtatttacacgtatatacaggggccgatttgctatgcgtctgggtcacacatgttcagattcacgtagaatttgatgggtggacagatggacggatggatggatggcaagtggtagggagtgtatagatttgtaggagaatgttccacaatggcatttaatcgccgtggcatcatcaatcagctgtcttaatgcatgcaggttgtggagtatagttggcacataaagccaaacttgaattgaattgcattggatctcctttcatttataattaaaccacacgccatcaatcgaaaacggccacagcattgatgtatgcctcagaaatgcacttcattggcctgtgcagatgctccagaaattcaattatttcgacacgctcgggatgttttgatttgatcgatatgattggcgtgcgaattttgtaacagtccaagattttttttaaaaaaaaaactgcccattttaagaaaacttgaaatatgaacaacaaaaacagaagaagctagcagttttttcgatttatgaacacaattatataggaaatagttctccataatcaagaaggtactagcaagcaggggatgcagggatttggattaatgaaataaattggagccgtttctctgacagtatgcaaaacaatactccattgttgagtggcaaaagcaagcaaaggatggcccatgcaagcttgcagctgcgatgatatatgatggatgcatgcacaaatgcacatataattgttttggctgcctgcaattctgtttggtggtcacccggcgaaaacacaggagactcccttgtcgtctaattgttgttcgcttcttcccctgacggatctttcctctcttttcccctcccgacgacgtcagaatctctctctctctctgctcctgcctcctctgctatggcctctgcctctgtctctctgcgactctgccctccctctacgtagttacgtacgtacatgcaatcacaatgcctgcctgcctcatactatcatatacatactatactacgtacactccatccgttctgatcaaatactacccccgttctaaaatataacaagctagtattgaatagaacatattctagcaatacggatctgaacatacatatccccattacagatttttagtactaagaaaagtctcatatggtattatattgctatattttacaatggatgtagtataaatattttttggattcaaattttgtatataatataagcatttgcataacactaatttaaatatggaggaatctgtgcatttttagccgatcaggttttaggcgggcaatccaagtaattgaaaaacacgactgatcaagtgagactgaaaaggaatttttttccttttatctttaaaatttttgctaaataatctagaaataattatattttagaacagagtgagaatggtgcaacggagctattgaagctagtgactctgcatggcttggtaccacacctactactacaccaacagtggcatactacatgtattcatggggctggagctagcctagggtatatgttaccactgcaactacagtttcttcaagagggtcaggcaggaaggcaggcagctgctaggagagctctgctggaatagagataggaagagagagagagagaggtgtatagtaggtggttgaatgggattaaattgggggggaagaagaagtaaatgccccaatagcaggggatgagaaagcattgcatggctgatgctactatatgcatgatcctcttaatagggcctgcagcggcttatttatgtgttacttaactatgccatgacttctccgtgtcttgtatcattcaatccctcctctcatcaataaatcaaagctagctagcttgctcttcagcttgtagaaaagagagatactctacaaactcctcctactctctggccatagaagggggacagagtgagctaatgagcaagtggcaaaactatcagacaactaagccatcaaaaacattataacttcttttcctacttctcaagttagaatagtatacatgcatgattgcgtacctttgaatcatttcaggtgaccaaatatgaaagaacaaaataaagaacatgagatatatgtatgtatgcatgtgacatctatatatgtatactgtacatgagtacacatatctgaatgtactaaccatttagtagtactttgctgtgtgtaggtgcaatatatctcatatctgtacaatgcatgcaatggtgatgagagccggccggccggccaagatcagctgatgatcaaagctatgaacattatgcatccatcagcatgcagccggcatcctgtgcgtttccgtcagtatgtgcatgcatgcatatattatttgcacatgcatttctgtgccacacagcttgtccgcatgcgtttgtttgcgtccgagatggcatgtatacgtactgacatattgcttatggctacctatctgccatgcattattcccctttaattttctttaattatatatgcagttaataattatatacacgcgcatatacaccattactccgcggtacacgccgacgatcgactgtgttccataaacgcatattcaaataggtacactagttgtttttttttcctaccattttgaatgagctttttctagacgtttaattaatttcctctgtaattacaattaattatttaaaatttggtcaatatataacaacacatgtatatatattctaatttcacaatatatacctcgaagaattaaccaacggcggtttgtcaattttattttgatttttttattgtctctctcttctaaataactccctccgtcaaaaaaaacaaacctcattatttgtctttttttttacggagggggtattaattattgtatcggcaagtgttccacatttaattaattagcaccaaaactagatataaccaatactcctatacgtatacgttatatatgtatactacactcaaataccaacatcaacattatttagtaaacccactactatttatcaccaggccaacctgtcatgcattgtctccctgctctccctaacttcttagtcaatgcaatacttttaccctatcataccgtacaaaaacactgtgtagtgtgtacgatgcatatatgcttgagattttgaaactgatcctcctacctagataaatcctaagtacctctcgtttgttttttaatgtatgacatcattaatttttttatcaacgtttgatcattcgtcttattctcaatttttgtgcaaatataaaaatatttaaatcatgcttatcagaacatttgatgataaattaagtcacaataaaataaataataattacataattttttaataagacgaatggtgaaacaacgtatctaaaaaatcaactgtgtcatagattaaaaaatggatggagtttatatagagagagtatcagaatatacgcgcacactactctgatcaatgcattcaaaattaaacaagggattgcatggacgcctcctttacctatttaagcccctttggtttgtttctctcttgtcgcttccttttgtcaagtttgtagttaatatatcacataaatacattaaggaatgagataattaagttcaggtgaattctaatctaggcaactttcaattagctgcaaattcaattctcattcagctctgggcaggatcctctccttaacatatcacgccattgtacacccaaattattgcactgattagcagcttcaatgcatatagtggtccaaaagaactaactgatatgagacatacacaacaagacacacagcaatttagacaagcactttacgtacacccacttgtttacaagagacatacacatgaagacatataagtgaagctggataaacactttataaccacacatggcatgcttaatgactacaagagacacacacaaagagacacacatgtggaaaggagataggcttacactttgtccatttattcttccctttttcatggatctgtgttttacttcttggactcatcttgttagccaatagcagtttattgcattagccagcagctttatccatgggcaaatagaatgttagaaagaaaggcgataatataggcgtcgttttacatatttatgcaagctaacgacttgactcttagcagccttttgtggcagggcaatagaatgttcatgatcacatgcgatcgatcaagtacactgacacttacaagctagaccaattccactttaattaattcatgaccttaaaaataattttaaattaagaactaaacttaccgtacactatatagctggaatattagcagccataatgttacaagaagtgtacgtggacgatttggagggcatgaatccaagtattccttgcagcggccggcgtgccctgcagtttaattattcccatttattgtgacagtagtgatatttaatttataagtacctctcctccatcttttaaatttatttcatgtataccggcactatattaattgattatatttgaaactaattttctagtagttccaaagtaagccacagaactgaaatatgtgaacttagtttttttctttaatcatcgcaatcacacgcgccttatgttgcatgatggttcaagaacctaatacgtaccctctctgcagattgcttgttctctaatggtacgcttgatctgatgttactacggagatatatcagctacaattatctggatcatatattatacaagatatttttactaaaaaaagttttttcacgcaatgggcatctgtgtataatttttttttaaaaaaaaacatgcatcagggagtatacagtgttatggtacattcttctcccttcctttttctctttatttacttcagagttcagatttttcatcaaccatgcgtgcaagctctggccgtacgtgcccttcaatttggatttaatttatagctagcagaaacttcaatctgcctatacaaatacagtatagtactaacttagcagatcctagttcttctaatcatgtgctgcatgcttgctagctgcagtctacacaagactatatttcagatcgaaagttccatacttatatatattcatctaaacatactttttttaaggaagttaaatgcattctatacggtggtatgtctagctagccagctactaagtgaaacagtactatatggaagcttagatatagatatgggtcatatacatataaaaaaaaataaactgtgcacacatgagtgaccacgctaaataatctagattcacataaatagcattctgatcttgcatgatccctctcctacgatcgattacacccctaaaaagcttcaaacttttgcctgctgcaggccgtgtcttcttccagatgcagccttccagtacatacagtacatgctacgtacacactcagattaactgcatctgcatcgtatctaataaggggtgtcactagctagcatgcaaatgtagatacaatacttgaacataaatgccatggcaatatgtgctgcagctagctactatagcaatatatgatttgaatttgggtgtggctctatacttatttctctgcaaaaagctggggtatccatatatgtgtgtgtgcatgcaggccgttgggtacacgtatatatactgctatactgtgggtgcagtgtaactactacatgccgtccttcatctgttttcaaacaggagtaattttattttttttccaaacaaaaattttcaaataggactagctagatgattgtttacattgtatgaagtcattttcaaaatcttaaatcactagcttatacaaaattaaactatcaagatatatttcagatgcgacaaatgatatttatattataaataatattttattcatttatttatattattaaaatagactacctccgttcacaaatatcatggatccaggctatatatgcaccgggacatattctggatgaaggtagtgttattaaacatatatactaaaataacacgatagaagttgagttgatatccgaaacaacgtgcagtaataatagaaggggattgctaggcttatgctcactggaattcctcacaattttacttacgcaatattcaacctcaatcttgactgatatatgcaggaagagaggagaggaaggaagacggcgactcaccggacatggtgacagcgatacccaaccctaataaagaatctatgcattaagatcttgagaggttggaggggaggggaggtatagaggagcggtgaggacggctttagagggataccgtggtggcgcaaaaagtgacagtggcatcggagccggccactaggatggatggtggggcagagtcaacagtggggggggggggaatatactgtgtggttaggtagcaatgcagatccggcagcacgagccaccagacatgaaggaggtggtactgggcctcgccggtgcaacgattgcaaagtagagggatatgcacagggagagtgagacatagtcgatcggggatctagctagctagcagcggtggaatggaccaggaagggcgagggcgaagggagaggattagtttttgcccgaatcactacgccaaatcggcccatctgtgacggcctattagtgacagaccaaagtgcctcgtcagagataacctcatctgtgacgggttacaataaatcacgtcatagatagggctcaagaaaataacccgtcacaggtaagtactcatctgtgacggatctatataaggaactcgacacacaacatctttaacgtgtctacatatagatccgtcactgatgacctcttacctgtgacgggttttaagtttgtaacccgtcacaggtgagatacctcacctcaaacgtgttggatttttttacccgtcactgatgacttaaaaaaaagaaacccctaccacccacccagggggcccaccacccacccaccttccggccttatctcctcttctctcttccttctccccaccactctctcctcttcctcaactctctccctcacttcctcccgacctcccgcctccacctctctcttattcctcctgacctcccacgtcccgccgccagccgccttcacctcccgaccgccgcctgcctccacctcccacgcctcgccggcccctcggccatcggacgccggatccggccgccaacgcctcccccatcgactgccagactcctcccctgcctcccccaccggatccagcctccacgaggtcggggaatgtggatccgtgtcccgcccgcctcccggccgccagcgcctcccacaccgactgccagactcctcccccgcctcccctaccggatccggcctccacgagatcaagggacgtggatccgcgtcccagccaccagacgcggccgcctcttgaccgtcggacgccggatctggcctccgggaagccggatccggccgccagtgcctctcccaccggatctcgcctccacaaggttgggggacgtggatccgcgtcccagccgccggacgcgggcgcctcccgaccatcggacgccggctctgcttccccttcactccggcggccggatgcgcctcccaccagagggcgctgccgcctccacctcccgatcatccctcgccatggccgccatcctctcgttttgcattgatattatattgttgtatgtggattgagaaattcttgccatcccctttctttgaatgtgtgctatatgacatctatgaatgtgtgctatatgagatctatcggtttgaatttcttgtgtgagcaaagcaattgtgtcaacgagcaccaccatggcagcgtgcgccattttttttgttgctaggtctttcacaccagtgacgggttgcacgctatgtctttcaatttttttttgttgggttaaagacatcactgacgggtcacaaactaataggtcgtttgagataatagtcacctgtgacgggttttatatatggtccgtcacaggtgttggtcaccactaacggaccttcacccatcaaaggtgaggacagtcatcagtgaccacttatctctgaccagggctaaatccgtcagaggtgacagtttgagcccgtcacaggtagccttgtccggtgtagtgaatcttgatgcgatctgagccatccaaaagtaactaaaatttgtggttatttatttaactaggaaggtagcccgtgcacatgcacgggcaccttgtttaatgctgatttagtttttcgaatgtttaatttttttagatatactgattttattagtcttgctaaaatgtttaaatgtttctatttagaattaataatttttggttcaattttcatttcctttcatctcttttttttgggagaattccattctatgaaacatccttgaaatgctttgatccctgtaattcgggatgaaaatatgtgggttgatcctataacccggcatggggtaaaggtatccattctaaattatctctctccaattaagtaagaaaattttaaataaaggtcatagtttttttagcaaattaccactaaactggagtgtcatataaaaatacacgcttctagaatgttctatgctaaatgtcaggaattcatgatgtaccgtatcaagtttaaatggacatttttcttattcctatatggaattagcttatatattgctaaggcgacgtcatggttatttcaatgttaagattccttagtgcaaccaacgtgctctgtacgatcaatatgatattcaactggttacgcgacttcatatatcacatatataatttagatgctatgatcatcttaagattatttatttatctcttaaaaagatcatttattgataaaagatcaatataggaatgtatgggtaaatagctcttatatacatgctgagggaaaaatataattaagtagatagaaagtcattagatgtctaatggaatataagtaatgggtctaccagttttatgaaaaattaaggtgggatattttgatttttagtgagaaattttagaattttcttttatttagtggaggcctcaatatggatgtgggtctagaatgtaaatttttgttagcaaaatatagtccatatgggtattaaattattgatttcacataaataatatggtaattcaaacagatcataaggggcatagggatagctggctggacctaatatatggaggttaaattgtggtcttttctttgcccataaagataattttaattttaattgttatagagatggaataaatagagaaaagtaatgccgcaggaatagggatggagggagggttgggatgtttcttttctttaaaaaaatatttatttaatgatatgaaataatgtgttgatgtttaagtcaaaaccgatggccggatgttttttttttctcagatttattaggactttctgtaatttaagcgagattagtagcagcttactaaagcatttacgtactttaatgtcctaattgtttgggattttttttaaaaaaaatctaataacaacgtaaaataatgtgtccatcgatttaagtgaaaacgaatagttgaatgtttctataatttaaaagtgccacacaactgttagagagatttatagtatgtttagtggacatatgatgtatttttgtgggtcttttttttttccataaagataattttaattttaattgtgattacgatgaaaaaaaaagaaagcaatacttgtgtgctgcacggaggcgcggcgttgagaggttttggtttttaagatacatctaacattctaaaataatcggtccactgatttaaataaaaataaaaatggatggtcagttttctctattttattaaaataccatgtggtggcttgggagtatttttagggtgtcacatgacggcttaggagcgtttataaaaagtttaataaacttttaatatgttatagatagatatgaagataaaattagggtgcgtaaaaaacaattaggatatgattatttgattttaattattacaaacttgacaaatgaatctatttgactttttaaaacaattggcaccttatataaattgtcaaaatttttgtggcgttaggatttgaaatattttgaatttgtccattgatgaaagaatatgaattttaattgtaaattcaaattttatctttgagctacgtaggatatataatttattgacagcgtcctgtatataggagatataatttgctagtcccgtaggagtaactaatctggcttgcctttgcttagagatagatttggtatcttatatggaagaagcatcaaactaatctacataagatggatgcatcgtgcgggaatgcacatgtgggccctcgctttctatacacacagatacacgatacattgagtggggctgcaaatgtgggtccctatatatatcttgttgtgccatgtggcagcttgagatcgttttgaggatgtcacatgtcagcttgagagtgtttataggaaatttaatggacttttagtatataatagatagatagaagatagatagatagatttgttggaactgaaaaaactagacaaaaaaaattgcagaaaggaaataatgtgaggcaatcaataattaagtaatcatgcgtataccgtggtatgcgggcggccagtacagtactactgcatgcatggcacgtacatgtccattaactaatatcgctatcacgtactagctatacgtacgtaatacgtacactacgcagcataagaggatggcagagagaggacagcgatagcatacatatgcatgcaaatcgaccggccggccatcagatctgatgagaccggctgatgagagcagaaagtttaaattgcattggtcggaaaatgtattattgcatatgcatgcatgcatggaccgttaaaattaaagtttggtagatttgtagtactaagtttctaaaaaaaaagatagatatatgtactactactaccttaattataatgtgagacgacgacgctatagcttaatgcatgaggtgtgactataggagtagttgtgatcagtgtaagttaaggctgtcgatttgcaggcagcaggccggccaggggcgcccctgttttgttggtaagttaattaagccgctccctgtgccttttggatacatgtagtaatacgtcatagtgtaatttgtacctgatctgatgcatcgatcagtaacaaagttaacatgctgcatacatgcaggacatatgaaaagtgagaaaaatataccgagcctacttgtagaaaaaaataatttatacaagcggctaatgaaattcattttcaaattaagacaggtgtaggtcgcttggtggaaatggagcaatttccacatatattgccgaacctgttgctgtatctctcaaagaaaatagtcgtagtagttaattcagagcatgcacaagctagcctggtcgatcagtgtgtgaatgaactctgaacttgaatatattaattaattatcccctccacgtacgcgtatgtatacatacgctgtacggtggtggtgtagactatacgcgtacgtatacttgagaatacacaatggactagtactactctagcagcgcagctagctagagcgaggtcaactggcggatcaatgtgttccacatgtaacgagacgacgatacgatgcgaaaggtatgtaggaaatccgtactcctagctatacccctaggtgtctgcatgctagaacgaagtcgatcagtacgcgataacgaacatgcgaaagataacctctgttttaaaatataacaaccgaaaataatgtacgacatgtaataatagttcaaacaaatctggatatatgaaatgtctcattttatttctaggttgttactccctccgtttcacaatataagtcattctaatatttttcacatttatattaactagaaaggtagcccgcgtattcgcgcgggcatgtatcataggttgtgttcaaacactataacgacgtaatataaattggagaacatttccataatatatttaccataaaatagacgatagattttaatatactactaatgtgataagaatgtccctcgaatttaaataaaaattcctttgtcctggtcatatataaactggttgtttctcatcattacttactatcattgttttaagagttaggtgcacttttaataaatgaaactatattagtaccactaaaataaatgatacattattgttacattataaaaattcatcacttattttcacatctatgtataaatagtctaaatataacatatctaccgaataatacgataacatctttaaaaataaacatgaatacctctctaacggatgaagtcaaatgtatctgccaaccaaggctttcatatgtaatgccttgaaacatataggttccgcatcgatgtagccatgccctaaaaaaacatcatagagtactattttaacacttagtttactattggtacactcacaaatgattatattgataagtctatcactttagttacattgtctatggtgaccttaactcaacaatgtgcatgcccatacaatatttacgatagcatagcaagtactgcactttgcattaaaggacaaaaagggacagaaagaagaaggaggtgattgaaacaatttttttttaaagtttcgagtcgatttgtggtagagaatagacaatgtgtatatgaagttagtaataagtgcttctcaaattttaatgcaatacaaacagtattatgtttttcaaatgagtggggttaatcattcggcactacttagaaaaaaaagctatagctaaagagacgtaccaccatgaaaatctacaaaacaccatatcattatttatattttgataaagattcatcctttagtgctagattttttttaacatatattgtttataactaaatgagactcatttactaattgtaataatgtacttattttcacaaacttatttacactatctaattcgctagagtgcacttattgctgagtttcagtggtgtatgacattcatccatcaattatacccgctatattagaatttctatcaattaaaaaatataatataagtagttttatgcatgttttattggattattcattttttccaatactatttggcaaagaacatacataattctcgtgatgaattacgggttgtattgtagcaaaataactgtctaaaatcttatttatttattttttcatatctatccatcttgtatgcttctcactcctcaaatagcaatcaaaaaggtttgaaaaactttcagatacttttagaatctcaatctcacccaaaataaacctaaaaaggtctacttaaaaaccaaagctaaattatattttttttattatcactggctaaaatttaatttaatttttctcatctatctattatttgtgcttctcacacctcaagtaagaaaatttttgaaaacttccaaatactttgagaatctcaatctctcctaaaattaaataaacctaaacagatgtacttaaaaaacaatgataggttttgtttttttaatttttacacatgtagattaaaattaacgttgtatatttttgtcaagtgatatttgacactgtaaaatatgatatgaaattatttgaaacattattatcgtattaactattacatgttagcgtcatttttcatgatatatttatcactataataagtttatattaagtttaattgtgcatatatgtgtagtattatttttaataaaatcgtagattaaaggctgttgacaacaaatcagtgccgacactgatgatttttccttattagtatatatttccgattttactatgtacctatgcatgttttcttgttcttttttggctttattttttttttatagtatatgatgtaggtatttaagttttgttttttttccgggagggagacgatcgtatgacgtaagcgcattatgttttttccgggatagagattagcatcatggtatttttaagagctctaatccattgtttaaaataacgggtccactaatttgagtgaaaactgaaggttggatgcttttctttttttattctgaatttctaggatttctgtaattttattaaagcgccacgtgacaatgtagaagcatttgcagtacgtttaatagacttttaagtatataatagatttctaggatttctctaatttatttgagagccacgtagcagagtaaaagagtttgtacaaagtttaatgtaattttagtatataatagatagatttagaagatggtttaaagaacattgattggatatttattatagatcttaatttaactaaatatatttatacatgtgaagtaatatattttatctttatattgtagaaaatcatattttaaaaacggttgatttttatggatgtatgttgtttgtgacttttttatgtacaagtgtatggtttttttttcttccagcgaaggttaagaaagcttgatcattttattttcaatcatgtacgtttgtatgttacggaaagaacatcagtaacgtttgtatcgtacaatctcatacatacggacagtagcagctagcgtttgtatgttataaacatgtggaagttattatttttttaataatagatctaatctaatggtgtaaaataacgggtccaccaatttaagtgaaaatcaacggtaagattagatagtgccatgtggcgacttaggagtgtttgtaggagtgccacgtggcggctttaaagcgtttgtatgaagtttaatggacttttagtacataataatagatgttaatgaatttggatagatatatatgtctagattcattaacataaatatgaatgtgggaaatactagaatgacttacattgtgaaatggaggaagtatatatattattggacagagggagtatattttagaacggattgcattcatacgcacatatatatacttcctccgtccaaaaaaaaagtaactcaacctaagaatggagattcattgtattaccaaggatcacatctacttctaaattgagttctctttttactactcgatcgatgctccttgttgtgggggattcctatttcgcgcgcgctggctacggaagtagcgcgctgccacgcccccctcaacaccttgcgctgttagcaccgtaattagcggtaatgatgatagttagtgctaattatggtaattagcaatattttcctttttttggaaggtttttttactaatagattgatacgaaatctatacgtgaagtcaaattttgaaaaatttcaactcgaaatttgaaactttcaacccaagtttgaaaactttcgattcggattgaaaaactttcaagtcaagatttgaattttcaaatctttatttaaaagttttcaaattaaaatttaaaaactttgaactcaaaaaattgaaaacacatgctttgaagatttaaaaaatagtcagaaaaaacgcgaaaagaaaacgctagaaataggagaaaatcgaaaaagaaaaaataaaatcgcaaaaagaaaaaaaaagaaagaaaaagcttggcgcgcgcgctgtgctggatcgatcgtaccacgcctgcatgcacagagaggagggagagggagagagagagaggcgtgcagtgcagctaagctagcaaattcctcgtgttttgtgatagatagtactccctccgttcttaaaaaaagataaaccctgggtttacgtgtctaactttgactgtttgtcttatataaaatttttttataattcgtattttcattgttgttagatgataaaacataattaatattttatgcgtgacttgtctttttaatttttttataattttttcaaataagacggacggtcaaacgttggacggggaaactaggatttgtctttttttttttgatggagggagtatgctggagtagatgctggtgctgctgctgttggtatttcgggatgaacgacgacgtacgcgcggtcgccggcccggccggccagcctccagccggcgtacgcacggcgtagcatgcaggtaggtagctgcagtgccatgcattgtgcgcgcgcggccatgtggtgggtgtacgatacgaccgacgtcggcggggcaggcggggggtgtggagccctcgatcggcgtgacgacttgacgctacatgtgttggaaggatccatcaactgccaaaccaacatctcagttatttgctccccgtgtctcagaatacagtaaggcagaattagattagacaccatctaataatattatgaatttcagtaacgctatatctagattcgtaataattaatgtactagatgatatctaatttgatcctatgtttattatattttaaaacggaaagagagaaggagtagctagctagctagggttaattacctgatgtaataaggttatcaccagtgatagaaaattaaggaaatgcatggagtggaaactgactgaaaggtttaatacaaatgaatctcgctagagacgctagtgttagacattactgtaataccctgtatattaaaagatatttagtatttttaagtttgggttgacttgttaaaataaagatgttaacagaaataaataaaagaaaaaatatctttagaagtgggccaacatgagaaggcccataaacccagcccattagttctcccctaaaacctagatagaggggaaccgaatcccacttcccctcatagtgccgccacccctctccctggccggcgcctccttcctcccctcctcctgtgttcgcatctctcccatctacagcaaattgctctccctagatctccaccttcatagcttggatcaagaagcgaagtagaaaaacggaacgaggaggaggagaggagtagaaggaggggttagaccggagtctcccctattgtctcctcacaagttctctaaaaaaaccgtaggtgaggcttatccccttgttgtattagttattctagtatggctttagtgcattaattcgtggttagtgaaggctagagaaggagtttgggtagttgcggttcggtttgttgcagttctgcatgtgggcagatttgcagtgcttcagtttttcgatatttcggggctctaaatgttattttctgcaaaagtgtataactaggaagttgtagataatgtttggatatatcttctgactaaagggcacgattttatcttaagtggtttaggagatataatttttttagtatgattgttgtttttttgtcataatctggatagtagtagactgaactgtttttgaatgggttaaacagtataatcagccaggccgcctatagaaaacattgtagaggtttttcttagcttaccttattggtaaagtacaccctgattgggcgagtagaactccagttaaggttgttttagtgtagacagtctgaaattctggacagattctaaagcctgcattcaagcgcaaattagaccatttaaatggcagaataaaaatatgttttctacatgaaagttgtaggtatttttttgtagattttcaaaatgtatacattttcagtcatagccttttcatatttcaagatataaaggtttgaagcaacagtcttgtgtatagtccaagcgacgttccttgttattgagttttgataggatggggcagtaggtttacctttttcattgttttatacgcatgtttgaatgtgtttgctaatgttttgtttgtgattaggtggtggtccatcagatcgtacatgataccaatccttcgttggaggtaagtgcatgacgaactaattgtgtgattcatcgattgtttactctatctatttatttctgatatatttcaacgtgataagtaactgcttatgttcatattattgttcacgccatttagatttcaagttgatcttttgtgtacgatgttattcttgttttaatattctggattctggttctgcttaaataagtcaagttctctgcttgccatggatgtgtttcaatttggttctttaattctggtttcaattattcaagtaccatgcgtagtcataggagtgcaatttggttctttattcaagttcctgtgggtaagcactgatcacgcttacttggctttgccggcaaatgctaggatgtattcactattgtccgggatggaaactactatttcaattcatacctgcccgggatgggaactactatcttctttgatttggtgtttgaaaatgcgtttcctatcaaagaaagaaagccttctgttcatgctttattgccaatgttgtgtatatgtgttttctagttccatattgtacttgctgagtatttttatactcactcttgtattttatttggttttaggtacgcattgagaccgacatgcacgagcgggaagtagcacccttatatacacattacttgcacactatcaaactatattgcttaggtccataatgacacttaaattatatcctggtttggtcttgtaataatcttttagatttctaatagtttcttccccatggattataaggatggatcgtattgtgggaatgatattgttattagtttaacttataattgcctgtcgtggatgtccgtatttatatgggagactctgccaaaatttctaatatttttgggagttagtggttttgagtgtattttagtgtggcactccaggtacgtggctacctggggcattacaattactccctccgattatgcaaaagttattgatattttggtctggaaagaagataggccatgtttggataatgggtttgggatatgatttcccacccctcaaagggtaaatttcaatcctagccatccattcttctcattccatttcatcctatccctccattcatttccatttcccagtcccacctctcctaacccattatacaaacaaacccgtaatgttatattcgttgcaaaacaaaaactaatgcgatggctccctctgatcgagttggcacagtggatagatgtcaatgtatccacaagcaaacagttgagacatctagggcccatcaatcgattgaagctgcagctatactatagctagctagcatgcatgcatgcatggccatggatcgatgatcatcatccatcaagcatgatatctcaaacacacctcgagccgtcttttccctccacatttattgtacttgcgtcccccaaacatggccactgtgctacacatggacaacggtctactctctctctctctctagattcctcattttcgcaaacattcccctctcttcctccctcctctgcgatcccaacctacccatatttagacaccacaagagaagaagaaagaaagaattgaagctgtgtctagctaggttagcttagcttaggttgtttgcggagatcaatcgatggcggacggcggcggcggcggcctgtgcgagctcttctccgacgaccaccgcgacatccgccacgtcgcggacgccgacctgttccgcatcctcgagacgtgggaggagtgcatcaatggcggcgccggcggcggaggcggtggggtttctttagctggtgtggctgatcagggagccgctgcggccagcaccggcgccggcggtggtgcaaggacgacgacgacgacgaccgccgcgaacggtcggcggcgggagggccgcgacgaggagaaaggcggcggcggtggcggtggtcctccggcacagaagaagcaaaaggggtcgtcgtcgtcgtcgtcgtctccgccggcgttggcggcggcggtgggggacggcgatggtgcggcgaagatgtcgcacatcacggtggagcgcaaccggaggaagcagatgaacgagcacctcgccgtcctgcgctcgctcatgccatgcttctacgtcaagagggtaattaatccattcattctaattactagcttagcttagctcgcactaagcatagtttagtgtcactgtgtgtgttgcactactagctaatgaagctagaatggctcatgggattttgatactatgtatctatagctgtagcatctagagtaacttttttttccctgatcgtgtacgtgctgctgcaacagttgcatgattgtgtcccatgtacatggtacaggaccagcaatcaaccgttgatgctgctggtgctgcatgcttgaactgccctagcttagctagctaccaccagcctaccaataattagtagtacaactactcttgcatcattagagaatctatctagtacacacagctaccaatccatacgagagagagagagagatgaagacacagtggcttgcatcaattatctcagagaatgtatagtacagtgaatcattggttgaacaaattaatggagattaatcacttgaatagatcagtgcaattaatttaaatctgatttgtgtgtattattaattgtgggtgcagggagatcaggcgtcaatcataggaggggtggtggattacatcaaggagcttcagcaagtgcttcgctcgctggaggccaagaagaatcggaaggcctatgccgaccaggtgctcagcccgcggacgtcgcc

SEQ ID NO: 8305 - DNA, 12325 bp, Oryza sativa
aagccatctgcctcatccccgttgtcctcatcgttgatggctgcattatcactgtcgtgtctttgtcattgttgcccgcgctcgccctccccggtctaattaagctcggaaactgtgacttttttagtgattgtgagtgtgacttagcaaattgtttttggttgattttgattcctaaatatgtttgaatggtgaatctttctcttaatgattgtgatttagtgaacttttgatggatatagtgatgtgaatccgctctgcagtgcttgctcagctcggtttgattccagtcgagccgagcgtttttttttttggactcgttcgcccctaaaggtgctagttcttggctaaaactggcaagtatatattattatatatatcgattctacaggcagcaccgatgaccgaagtgatcagtgccgcctgctgggtaccggttggaaaatttgacacctatgactggttcccaatcggcacaaaagacttttttgcactagtgttttgattctttagttttattcaaataaataattaggatttgtgcatctgcagaggtcggaaatgtaagtttttccattatctgaaaaaaccttctctctctctgcacacgctatgcgcgttttaattttacattctaaattgcattttttttctttgttgaattattagaacgtgggaatactcatcagcatggttgatcaatgacatactagtatattttttcattaagtaacataaacctgttgcaggtaagtggtataataataagtacttcctccgtttcacaatgtaagtccttctagcattttccatattcatattaatgttaatgaatctagatgaatatatatgaatgtggaaaatgatagaatgacttacattatgaaacggagggagtaaatatgaggtagaaaatgacttgtagccagaagatttgactgcacgtgctttacacaattacacattatatagattctataatgctagaaattaatatcaaagatgataagagaagaaaggagaaatgagagaatatatatatatatatcaatgatcacaaagctaaaaataatatagaggcggtgtgcaaaattgctagatgagatgatatgatgtgtataaccttatgacagaagagaaacaacgtgcactatagataaattaatactgaaagactaaaaataattaagatgtgtggttttttaatagaaaagagaattagtattaactactgctatcaagtgcaacagttgattgaaactgatcgaggtgctaaatgttttggccatatgcatgaatccgtattgttagaaagaaggatataagattagctcggtaacttctaataattgagacagctgtatgcagagttcatttatcataatatatataaatgtaatagatactactgtttcttttcaggttcactacgtttcacgtatagtttcgtagatcattttttaattattgtttgtgacgctctgaattctaattactgtggacctgaacataatgcatgcatggtagcagatcggctagactaatctaatgttagtttcaaaaatccaatgcgactggacacctaaaaacttccaacgcaaaatgctttaggcctcatttcgatgggccacaaatcgtgtccaggccagaattttgttatttctggtccatgggcaggaaacatggccatcgaatatatgggctgtcatttaagtatttttctagcccatacacttggatgggctagagttgtggcccatccgtataggcccaattaggctgtgttgatcactgcgtggccctggtgtttaggcccattgaaagagatgcaccagagtcccgatagcatgaaaagttaaggtacacgtcagcgttataaaaaaattgccagaaaagatgatacaactttgtattgaaaattttgaaatccttgaaaaacatacttttgcttcacaactggactctatccagatcatgttttgtcatccatttgagctgatgatttacacgtcaagcatgtcaagtatagtacaggacatgaactctttttagtgctagtgatcccacatttacaggtgcaaaaagatgaaaaacaaaacgaaaaatcagaacgcatcaactggatacaccatacccaaagatgtacttaaaaaaaacttgccccccaatgagataatataaggatcggactaaatattgatacaacaaaacactcttccttttgatatcatataaacagctcgattccatctcctctaggcctggtaatatatatcttgtacagatatgccgtcgagatcaacgatgaactcggtcttcagcaacttatgcctatggtgccgatggtgaaggcgacgatggtggtttgaggtctggatactgcattgcaaattcacaaatgtaggtttgatgacaatggcattgattgcagcttatgttcatatggcaatggagcttgagaagctgtagctagcttacattcgggtaaggcgaaagaggtctcggagctgcaggtggcgccgcctctggggcggcttctgctactggtgctgagttaactgcaggtgcagattcggtcgctgcgctctcggattccgactcatttttagtcgcctcagccggtgccagtggcgaaggggaggatggtggtttgagatccggatactgcatagaatttgcaaattcagagtgatgaacactatgtcaaggaatgatttatcaggtgaaagagatgaatggcaatgagtatatatcaggtgtggacttacatttgtatatggtgaaagaggtgtcggctctgcaggagctgcctctgtactggtctcttctaccggtgctgccggtggtgcagcggtagctgtggcggcagctggagcagcttctgctgttgctggagcagcttctgtgattgctggttggctcttggtaccagtagaaggcagcagagcctgaccgatttcctgcagattgcaagagggtattaccattttacagaacaaaaccttgtaacgagtatttactatgtgaagaatgtgagttttctgagttcagaaaaaagggacagcagagtctggcaatgcaaactgcaaatcccatcaggaaaaccaggtaaatatattgaatgttacatccattttgcaccttatccatcttgctaatagtaccaatcacacaatactgtgaacagttggcaacagaggtcatgaggtccacataaatctgaagttctaactatgttttgattggtttgacaaaaatgcaaattcaaagaacttgatgtttagtacatttttggtcttgatgtttctacttacaagacttattagcggtgtacctgctaggaatgctactaaactaaatacaataggttcatgcatgcctaaactctccaggaatgaacttgatcctattaagaaatattagtcagtgagaaacaagaaactgaatattcagtaagatagatggctacctttatttcatcaacaagctcctttggagcaacctttttgttgaagaaatcatcgatctgtttaagggttctctttcggtcctgtaagcagcacaacagtaagagcttgtcatcgaaaaggaacgttgttcatatctctgaagttcattcagaagagtaggcacctcagcatatatgagtttgcttgcaactagctggacaatggcagctgaccccaaaaactgaagcacagtctctatctacagcatagatattacatgatcggtaagaacacagaagcaactccacaaaacataaaaaaaaaaaacttccaagctgatcaacctctgtgtaggcaagtattcccaaaccagtagctgcagcaagcccaagtgtgacaggcaaaccatctgtgccatcctggtatttttgcacgtcataatcagaattcgacaacatatatacaaattcgaatcgacaagagagttgcatcgagaccttagaatacaaagaaattaaatcaaacatagttgacacatcctcaaaaggtcatattgataatgataactcaccccgattagatcgctcaagctgaatcccttcttgggagctgtccagggaagactactgctctgcagttgaacactagccaatggtgacatttttgttgagcgaatgtaaatgtcagctcacagcgagaaaccgagaacaaagctgtgcaaagagttaaataccagccatcctcggcgtccctctgcaccatccttcactgcaaaagcagctttgtaaccattcgctgttacaagctcagcaaccagctcggagttcccatcaaacctggtttgcataatatccaagctaaataaatgttcaggaggagaaaataaacaaattgaatcatgtacacttgatggtataattatttgaagtctgacagttgttcacagatttcttgtgatattgttcaatcttcttcttcagaaagaaaaaaatgtagccaactctgaacattgctattgtgttccatttgcagcaaaaataaaagaaaatttttgtttctttttccctgaaatgaactcggaccatacagaattgatgaacaagagagattattaagaatataaccacattgcaattagcagcaaagatttgaggtgcccacttgtcaaggatgaccaatgtggtgttctcggggtccttgaacctcagcgacagcttcttgaggaatccgttcttgtcctccccgtcgtagggcacggcggccgccttcttcttggcctcgcggaggtcgggcgcgccgctctgccgggcgtcgccgggcggcctgatgtccaccagctgcgcgccgggctcctccaccagcgcccggtacgcggcggccgccgacaccacgccgtacggcttcgacgccccgcccagcacctgcgcgagcaccagcggcagcgccaccgcggcgacccccgccgccgccgccagcgggttctgcgccacgaagtcgagcaccccgccgaggccgaggtccgggagcgcgaactccccgcctccgcctccgcctccgccgccgccggagtccgtcgagagacgcagcgtctcctcgtaggacagcggcgcggcgagcgcggcgctggcgccgccattggcgaggccgagcgcggcgccgaggatgtcacgggctcttagccgccgcctccggccgccgggagcgcgcgcgcgggcgcgaggcggggcggtcagcggcgtgggcgcggcggaggagaggatggtggtggtggcggccatggcataacggtgcggccaccgacggcgagcggtgtcgcgaggagaaggtggcggcaaagcttgtggcgcgggaagccggtggtggggcggcggagatgaggaaggggggtgagctgggaggtggcagcgaatcggaggccgccacgtggacaaggagatcagacgtcgcaagcgaacggctgaaattctacggctttttttgttttcttctcttttccgcggtacaaactgtgtagtgtagtgtagtacgcgatggcaacggcgcggcgcgtacgtcgtcagtacggcggcgcgccggcgtgtagtacgtgtacttccgccgccggtggtgcgccgccgcccgccggcaatgcggccacgtacggcatttgctgggctgagccagtatttctaggcctcattcgggaggaataagttcactttaggtccctctatttgttggttagtctgataaaattacttacgtggcaattttatcagaaaaaataataaaaatcatgggacccatatatcagctacacaaaaaataattaaaaaaaagtgtggcccatgtgatctcacatgtcagcctccctcttatctctgtctccctttctcttccctttcatctgcgctcctaccatgccgtcactcacatccaccatcgatattgacttcgcccagcgtactgccaccttttgtctactgcgcctaccacgccgttgtccactacctctgtgtcatccccaatgcgcccgggttgtcgtatttccgtgccagccctttggtggctacgagctaggccctagcgaagctggttgtttctgttgccgtctggtgagagaggggaaagagagaggaggagagggggaggtgatgaagaagatgatatcagaacaacatatgggtcccatctactgactcaactagtcaaccgcggtcaatatatcacgttaaaaaccacacaaaagtttatttgtacaatatttagagatgggggatgttatatactccctcattccctaaatgtttgacaccgttggcttttttaaacatgtttgaccgtttattttattcaaaaacttttgtgatatgtgtaaaactatatgtatacataaaagtatatttaacaataaatcaaatgatagaaaaagaattaacaattacttaaatttttttgaataaaacgaacggtcaaacatttttaaaaaagttaacggcgtcaaacattttgggatggaggtaaagtagacttatttcatgctacggtgatttaatcttgagcgaggtaaagtagacttatttcaccaaattcaaatcgtttcgaaatttgcgactccgatgaaatattcgaaagcgaagccacgtggtttgaccggcgtcgcgaagcccagccacgccacgccacagtctttccagaagagctcacagctcacccagtctcgcagagtcgcagtgtcctcctctctacgtgccgacgcatgcacgccgccacgtcgcgcgccatggccacccctgctctccgacctgaacctacccgtttcgtcggcgagcacgcgcgccgcgctcttcttcttccccgctctcgcctcctccatcccatcgcgccacgcgagctcgatcgatcgaggtgtgtacacaaggtgttcgacaatggtgaagctggcgacggcgagggagtgccgggcgtacggcttgggcggcggggggcgggcggcgcgggggaggtgggagtacatcaacgccggggcgtacgtcttcgcggcggtgctcctagccggcggcttcgggtggcacctctccgcgtggtccgccaccaccaggtccggcctcgccgcggcggcgctcgggctcctcctcctcctcgcggtgaacgcgcacgacctcctggcgcacgccgccggcgtcgactacagcctcgcactcgccgccgggctcgacagccagttcgctctcgtcgaggtcgccgtccccgccgtccacttcgctggcaccgtgctcaccctcattgcgctcatcttcttcgagattcaggtttcgattaattactttacttcccctctgctttttatttttaagagtgttgctaatagtatagtgctttattcagtagtgatgataaacgttttctggttttcaaagggcaaagttgtggtgaaaacatctcaaaaaaataaatctgtagtgaaaacatttaaaaaacaaaatagtagtgacagagtgtactaactagaagcagcaatacaaatttctcctgtcccataaggtctgtattaattagtctctctgattttaattaagagtgctgctaactagctataacagtctagtgctttattacgtagtggtgacaacatttctaatttcataaggcaaagttgtagtgaaaacatttcaaaaatataatctatactaaaaatattaaaaaaacaaaatggcagtaacaaagtatactaactataagtactccctccgtttcacaatgtaacttattctagcattttccacattcatattgatgttaatgaatctacacatatatatttatttagattcattaatatcaatatgaatgtaagaaatgatagaatgacttacattgtgaaacggaggaagtagcgcacatatttctcctgtcacagcacgaactttggagaaaatgaactaagtcgtgaatcttatagacctgtttgtaaaagaggattttttttttaaagatttctccgcgtgttgatttgtttttctttttgataagtaaatgagtaccgactagtgagaccagatggatatgcaaattaattcctatttacttccgttaaaatgtcaggaactagccagctagctagcataaacgttccaaaattcagtatcgctggtacgattttgagtgtcagttaattccacttatcttaaattgaaaagtttactagtgtaaagtccagaacaataaagatcaattcagaaattcttgctaccatcatattttgtcaagagttcagtaacttagaacacagaagaccaatgatggcacaagtgtcacttaactagcacaactcaattttccattacagatggcaagagggtacaggcacagcctagagaagcacggcctgaacatgctcatcgccgggccggcgctgtggttactcggatccatacaaaacatctgccaggtatacgaacgcgccaacgggcatgtccagatcctccagaaatgtgtccaaacgccgctgctgctagggagcacgctgttcttgatcggcggcatcatcaaccgccacgacatccacagccaatcgacatcccgttcagagctactggtaatttgcacaaacctctgaatgtctgaaagttgcaatgagaacacgacatatgcatgaagccgatcagtgtggatatatatgctactgtacctactcttgagtaataattgtcactctgctctgggatgcaggggaggagctggggatggttctgcgtctccggcagcctgctgttcgtcgcggcggggctgctgaacctcctcaaggtgttcaagatgcagcagatggacgggcggggactggagaagctgcgcggcggcgcgcaggagcggctgaacagggagagggagggcaaggtgcccctcattcttgaggaaggccagaggaggaccccggctccggtgtcgggccaggtcccgccgcctccggctgggtcctacaaggaggccgtcgtcagcggcgcgccggctggctagctagctagcttagcagctgcactgcactgcacacagtgtaacgatgagaataagggaggtgacaaaacaaggtgccatgcattactgccattgccacactgtaatttcgtatttgcagctgtcacgtactgtagactgtctgaaacttagatgtgtgcctgtgaatttatggtcgatatattacatggtgtaataagctttttgctctcctgcatatatttgccaaataaaatcagcatcatcagcctatatatgcaatgaaggttttcactgtctgttgtgttcttgcaaaatggatggagtaagttgtgaaaaccaaaccagccgaacataacaattctggtcaggtctgtcacgtaaatttctgaatccatccacctgtcaaggttcaaattaatcaaatatttgtgtgttctcattggactagaggactacttaatttcattgcctgaattgcaaaattctgaatccaggttctgaccagaaactctgcaggtcttgtgtagaatctcagaatggttctaatgtagcctatcatttttccagaccattgctacggaaaaatcagaagaaggaactatgccatttctttgttataaaaaaaagttcatttttcttcccaacaatttatcagagcacttacccgtcgttttacaccccgaactcggttcaccttactccctaagatatttctctcttttttatgtatcagtcgtattttggactgaagtttgatagaatcaatagctgtatcataacataccttgatatttttaaaatgtttatcactgtttatataaattaaaatcactaagactgatttaaaaaatcaaggttttaaatttaaataaatagttacgaaaataatttggaactttcatagtgatgtcatccatggctttaacaattttcaacttaaaatacgatttatataaagagaaacaaaatattattaagtattaaagtgaacgtctttaatattattttggaaaggtaaaatgaccatcatctcctatttaattggtggtttattgtcggatcgactcaattaaaggtatgtagtatgtacaaaaataaaatctaatatgggctctatgtattaatacatgtcactatactattatatcctattatatcctataatagtagaaattatatcctataatagtactataatagtagaaataacgggatcttttaattattagtgctctatttttttctattatcattctttcgttttctccactatcgtgcaacaaaaaattccgttaataagtgataagaatcgactataagccattgccatacgcaacaacaatgttaatttctgttttatttcctttctctcgtcaccaaatttacttgatgaaaactcgttattgaacaccattttgctcaattgtcatctgcatactatttttgaaactgaccaatcaggcaatatctttgtgattgagatgaagggatatgctaagatgtccaggggaattgtccaaatgctaagattgaggcaaaaggttacatttgggatgtctttatctcatccaattaatccacggataccatgaaattaaatgcttggaattaacgccttctatatatttcagtgaacaaatcttcagatatagaactcccattttgccgaacattaattaccaaggtacaaaaccgaatcgcccctataaattaagagggatcagtcgcacctcgccgagccaacattcagatcatcaaccacaagttcagaaaataaatcagtcagtagctcatccggttgccattgccaatatagttcttgcgagtaatcagttcagtttaagccgctactagtacaaaacaatggcacgggcaggaagcgtctgcgtcgccgttctgctggccgtctgctgcgccgagacgatcctcgtcgccggcgcgacggagtggcacgtcggcgacgacaagggctggaccttcggcgtcgccggctgggagaacggcaaggccttcaaggtcggcgatgtgctcggtgagtagcaatatgtgtatcaacttttacagtacaaattaaaccacagtaataattaactaattacgttgtgatgatcgatgagaagtgttcaagtacagcccgatgatgcacaacgtgctgcaggtggaccatgccgggtacgacggctgcaaggtcggcgccggcgacaagaagtacgcctccggcaacgacaggatcaccctcgccgccggcaaggtcttcttcatctgcggcttccccgggcactgcgccaacggcatgaagatcgccgtggccaccaaatagatgttgtttgttgtgttgatccatttatcaatgcatgtgatcaaaataatgtgctccccgtttgtcttttatttagtttttgggataaaaaactaatatttatactcgtagagcatttgaattgtttgttcacgcacaaaaaaaattcagtttcatcgtcctgttatcgataataatttcacatcaacaattgatgcatttgtaattggttttgacgattgtctctagatatgtcaattggatcccaatttttcattgggctttctcctattagagaacagggatggttagaattgatttcccacatgggatcgatgggaggaatcctgttcctgtcgggttttgcagggaggggagagattccttgtgagacccgaatatatatgggtctaaatttaaagtttttgtgctcgtgacatttgattatgtactacaatgttatgtttttatcatatgaattaatggcatctattatatacttaaaaatctatatctataactaatataaatattcatatttttccggtcgtcacatctaattttcggcctttttcgttcgtacacaatctgatttggttagcaatagggatagaaaaaaatgcaaaaaaaaaaggaaaaaaaatatcgacggccggcgacgccaccaccgccgaccaccgccgccggagggagaagagaggcggcggctcccagcggcggcggcgaccgcgggcggatccggcagcagcggctctacccgcggacgccgtagacgccgtcgtcgccgtcgacgctgccgtagggacggccgtcgccgagggagcacggaccccgatgatgtcgccgccgctcccgccgtcgcccgcgccgtgccggtgagacgggagggagaggggagagggagcggtgggaagcggcaccggtggggagaggcggagggggagaggcggcgtctggggtgggggaggcggccggctcggctaggggggagggtgccgccggaggggagcgggaaaggcggcgtcgggggcgggggaggcggccggctcggctgtgggggaggggaagcggccccggagggagagggggagggggagaggct

SEQ ID NO: 8306 - DNA, 23738 bp, Oryza sativa
ctgcagactatctgtcattatcttacggacaaaatttgtactatattcactctcttgaggagaactttgcaaccgctgaactcctccagatggttgaatacatggtttatgaagcagcatccttaagctgaaaagagataaacatgattgtcatagattttatccaaccaatacaatggtaaaaatagattaagaaaagagagaaagaatgaaatggaccaagacgaacagaggtaaagtaaatcacttaggactgatttgggtaaacccatggtttagaattatcaggttagcataagattatatatatatatatatatatatatatatatatatatatatatatatatatatatataaaatcaattttccaagtactaacctattgacattcagtgcgttgctacctccttcaggctgatcttcaatgtcaatatcatgttgtgctagagaaacagttgtcagttgagcatctgctggaacttgaacaacagctgtgtatccacaatgcttcacaaccaccacaccaagagtagcagtatcctgtaaactaataaaattacatcgacaataaacaggaaaatggataaaagtaaactgcaacagcccgtatcaaagaagaaagtcttacatgtactgttgcactctcgtcagcagtgatgcccttcaacagatttctcttagcaagttcatcagacagcattcctggagcttgacttccatctaacttgacatctaacttagaacttgcatccgctttgtcctttgtgactgttattttcatatctccaatttgttgcgtgtgcaaatctggatttgtggtgtcattcggtgtttcaagtgaactcttgtcagggaccatttgctgaatagctgcaacagctttaagaactgcaacatctacaaataaactatggagtaggaaagccttcctgtctcggatttgcctctcctcagctgttttgcaaggcattgcagccagtatggcaaattcttttgcccatggcctatggtcatgttttccatctcttccctgaccaccaccattgctaccccatgtttcatcttcagttggaaggggtggaaacaccgatggcaaatcagcaacagcaggagggaccacccaagtgtttgaccggaatccataaggaagatttccaaactgcaaggaaatgtcaataaaatgtgaactataaatctctcaaatgcaattgcaaagttgtgttaatacatgcaaacaaaatatatatataggtacattaaaacaagcacactattcagtttagtgaaacaaaatgcattagcttatttccaattccacgaattcaattgtttccgtggaaaatagggtatgtctcttcaaatgcattgaccaataaacctagaaaatgatctctaacctaaagtttagctttgaaattaataatttttaaatagtcacatattcaggcatgtctgaaaataatcaagaaatcaagcattagcaagacctcaccttattatgctcaacaaaagccttcataagagccttgtaagcctacaaaatcgcacacatatttccacatcaatgagataccattcattaataatcaaatcacaaaatctccaaggtcacacgtactccatcaaacgcccggctcgtctgctgcaacagcccaacaagggagtggctgatgagcgctcgcttccctgctggatagaatccagctttggaggccacgatggtcaccggcttcccactacaaacccttacctgcacaccaacacccaattgcagaacgcttggagaattatacaggtgcaaatgagtgtcatattgcatttttttatgacattggccatattgatggttacgtgcgtgctatgataaattaattaattgtagttttcatatatatgagttgcagtctaatctaatgaatatatagttaaattagcatgagattttgaaacaactattggcaaaccttatctagctactctaatgtaatgcaatcgaatcaattaaactaaaaagaaacatcacatttgtgctatttttcttcaagcaaactcacatcgatctggaagaagtcgtcctctgtcttgtcatcaacgaatgggcgcgtcgacctcctaatatctgaaaccaatcgcattttcacttaaacaaaagtggaagaaaaaaaataaatatcacccgaaccggctcaccatcttctgctgttccgaatgcgctcaaataaaaaaaaaagaaaacaaaaatgaatgagaagaacgaaactactagcactcacaatggaggggcggggagaggtgggagaaggagaagaactcgtagaactgtcccagcttcggcggcgggtacatcggctcctctcctccaccgcctccggcgccaacgccgccgccgccgccggcgggcgacccgggggtcttggcggcgtcgggcgaccccggcgggggcggtggcggtggcgcatcgggagacgacggcgatgcgggcttctgctcgggcgcactcttcctcggcccgaacgcggcggtgcaggcgacgatgtcgagcagccgccgcacgtgcgccacggcgagctcctccgtgtagccctctgccgcgcgccatgggagacgagacggtgagttttttatttttttgcgttttggtcctcgagaaatacgggatttgctcgttcagacttaccctcgacgatgctgacgtggcacggcttcagggaggcgacctccaccgtgtccttgagctgggccccacgaacctgcattggtggcagagagggagaaagtacaggctgtcagtgggcacgaatctcgaggcggatgtgagccgttgggatcctctgaccgacctcgtgggacagggagtagttggtgaggtggcatgtgtccacgtggacggccaggagcttccggacgtcgaggatcttgtccgttgatatgccctgaacaaagcaccacaaacacaaaatgagctaggcagcgagttggcacctaccactgcgaattataagtaccatatttaaattgataatttagccacacaaacaacccaatatgaaatttgagatttaaactcggaactttaaccccaaaaataacccagtcttgtttagttttcaactttttcttcaaactttcaacttttccatcacatcaaaactttcctacacacataaacttctaacttttttcttcaaattttcaattttagcgtggaactaaacacagccctaatctaaaattcactaggagatttgaactcaaaaccttgggaattgggacgctactgaggttactataatcagtaggctacatgccattgcacaaaatggtactatgtacttaagctaacacaaccattgctaacttgctcaaaaataattaggatgtgtaaattgcccatgaacttttttgtgtaatgttcgtatagaaaataaaaattctcatcatgtacatttcaacgagtggggtcattctttgccagctttgttaagttgccgcttatgctcggtcgctcgccattgctaattagcacaagaaaaacacgttttctgtgcaattgaaaaaaataaatatagaagtttctaagagaaaagtggtaggcactttcgctttaaacaaagtttttttttctttttttttaaaaaaaacaagatgaaagtgttgcaagtgaaagctagagaagaatttacttaattttgtcgtttaacatgcaagcacaattaaggccatcgaatagaaggaacagtacatattcagttacagtggtcactggtcagaatactgggtggtccatattaattaattaattacgcgaaaatatccatgcgagaagacggagataatacgcgccccggcgctcaccttgagcgtcagctgcgtgtagtccggcgtctcaacggtgacgtccagcacggtgggcagaactgcagcagcatcatatcaatatttccacgcaaaaaccactcacatgttaatactgaaacaatatgaactttcaaatattgaaagaggcaagctagcttaattaattaatccttgcatctgaaaataacttttgtcttgaaaacgaattaaattaaaccaatcatccgagctgatgaattcgatgaaaattcagatgggaagtgaagaagattcagttagccatcagttaagctgcacctttctcttccttcttcttcttgtctcccttggccttgtgcggcttggccttccctgccttgggcgccatggctggcgtccctcaagctaattagctaagctaagctaatgaattgaaacctctcgataatctcgttcttgtcagaaaccaatcaagcgagacgggattaagcggcagctctacgttggccttagcattgcagaactgcaggtcgcttagcttagcgcttaggcaggagatagcgagcgagggaggcagtggagagggaagctagagggtgagaggcgataagaggataagggatatatagctgcttctagctagctagcaaagctgagagttgcagcttctactaactctgaacctcaagcactgttttctctgcagaacggaataggacaaagggtgaaccggtgaagtgtttggtgaattattttagtctaaattaatactacctctgcttttttaatagatgacgtcgttaattttctgccacacgtttgaccatccgtcttattcaaaaatacgtaattataatttattttgttgtgagttattttatccctcaaaatactttaaacatgatttatatcttatacttctgcataatctattatattattaaaacagccttaaatgaaggcaccactttgccgccgtgggggctagaaattcccacattaatcggagaaaaagaaaaggagagtccaaatagaaatacaatttaaaaatagctgaattcggaattaaaaataagtaatattgaaagaaaactccatataggaacccaatatgagattaatcgaaattcagaataaaaataaaataaaatctgaaaatagaaaaaaattaagagtctaagtaggaatacaatttaaaaataattgaaattcgaaatttaaaataaggaatattgagagaagagtccatataaaaacccaaagcgagattaattaatattcagaataaaaataaaaataaaatccaaaattagcaaaacgaaaagaagagttcaagtaggaatacaatttgaaaataactgaaattcataattaaaaataagcaatattgaaagaagaattcatataagaacctaatacgagattaattaaaattcaaaataaaaataaaataatatcaaaaattagaaaaattaaaagagagttaaagtaggaatacaattttgaaacaactaaaattcaaaaataaaaaataaaaatattaaaagaacactatacagtattaattaaaatttgaaaaaaaaataaattctgaaattagaaaaagaaaaaatattttagttaggaatacaatttataaataactaaaattggtgagaaaaaataaagactattgaaagagaagaccatctaaaataaatgacgaggtaaattaagtaacaagcctataaaggagtagagtggtgacggttgatacgacgtataaaaactgttaataaaacaccaaatagaatcctaatgacgattaaaaggagggacgacaggcaggccatgaagcaaacaggcaagacggttgccgggacttctagaaagtaaaaaaaaacccgttgataatcatattcggtttttaaaatctcaatgacagtaaaaaggagaagcagcgggcggggtgtataagagtatagttgcagagctgttaactgttggcgggacttcttaaaaataaaaaataaattccaacgatagttatgttcgatttttagaatcccaatgaaaacaaagagtaggcggcggatgggtcgtaggggagtatagtggtatcgtttgacgggacttctaaaaattataaaaaataaaacccaacaagaaaataaactctaaaaactacaaagtccaatttctaaaggttcggaacttcttaaaaggtaaaaaaacaatgataattatgttcgattttaatatctcaatgacactaaagaagggagccagcgggcgagccataaaggagtacaatggcaaagccgctgacagtttggcgagacttctaaaaagtaaaaaaatgaacctgaacaataattatgttcgatttttaaaatcccaaacaataaagagaaaaagacagtggacggaccgtagaggaatattatggcagcgtttgacgggacttttacaaattataaaaacgaaacccaacgagacaataaactctaaaaactataagatccaattgtttaagatttaaaggataattaatagaaataatggtagattgagcgagcaaataaagaaggatatggcagaagtaaggggtagcagctggtgtgacttttaaaaactatataattagaaatacggagatgataaggtttggtctttcaaagtcttaagacaacaagatagctatttaataaattttaagcaaaatcatactgaaaatatatgattttgcttgggtgttagccgctcaattacgcggggcacctagctagttttcttttaataagacaaatggttaaatatgtgttcaaaaatcaacggctttatctattaaaaaacagagatagtatgatatatagtggaatttacaaagaatttaatttcgtggggtagtatatttacatgtgggccctagaataatataatcaaacggtgtgccatatgctgatatgtaattaatattagactggttttgttgtatatttttgtatggagaacaactttataagtggaacacgataagcagctaaaaaggtgtttagcatatatattttcaatagaaatttagtggggttgtagatttgccatcgatgtgcctagtgtgtgtgagtgtttcatgtaaacacaatactataggaaaattttaaacaaaagaagcagtactaaaatactatagggttacagcgatgttttgttttgggatttgaattcttggtagatatagtcaaggctactattgcatatagcagtgttggttaatgggtgctgtaaaaaaattgacattgcaaataagcatttcctggagagcaagtaattgaggtgagaattgtgtgtgaaactcgggcgctttctaaatagatgttgaaaacttgcacgcaaaaggagaaacgtgattggcatataatcagtttagtaagaaatgatcaataaatttatttggatttttcaaaacaacttctatataaaaattagaagaaaaaaacacacactgtttagcagctttaaaatcgtgctaatgaaaatcgagaaagtagccaagccgaatcctggtttagaacatggcgtaattaattagtggttcgtgtgctgctgatggaggtagctaaaccgaggctggaaagggaaagagagaacaaataatcaagggaggatggagaggcgagtcgagttgagtttgtagtttgtagggttgcgccgcgcgcgtacgtgtggtgagagcaacggggggatggagaggaaggggatgaggtggattttcttggaaggacacgattggggcgaaccaatggccagcagaggcctcatcctcgtctctccctatcggggatttcggccccccaaaatctgcagcgtcgcgccgccatgtcacccccttgcgcccccaccccacccaaaatcccctcgtcgtcccgtcgcgcgcggccgcttcccctgcccccacaaagggtatgcgtatggccttggccatacacatctcggcctcctcctatcccgtccttggtcgcgctcgcactcgcactcgcgtcgcgtccatccatttctcaccgcgggcgcgtgtgcggcagcgcccgcagttctccgcacggacggtggctggtggccgacgtttttcaccgcgccggccgccggggcccggggccaggctgagcggtcggtgaggcgtaggtgtaccgttcaaaaagtctacctatgccggccttggagcgttgtgctggacatggacatggacatggccatgaaaactctgcccttctctgcagctttaatcgagcagagcagaaaaaacgaggcaatgcgtggaattctgtgaggagaggcagagaaaacggagcatctctctcggcctctagactttctttttgggcctgaaaccacgacggccctttgttccctcgaaaggcccatcacgcgtcttccttacgtgggccgttgccttatccagcccagaaggccggcagccgaaattgcgttcttctacgtgggaggaaaaagtacacgaaaaggtccctcaacttatcatcaagatacaaaatcatccctcaacagcaaaaacatatatgcggcatccttacttaacaatcggtcacaataaattcttcagtggttttgattccggttttatcctacctgacagctaagtcagcgtgggatccacgtagactccacctatcaggatgctacgtcatctctctcccttcctcctcctctctctctctctcctctcctctcctgtcctctcctcttctcttctcctctcctcttctgtgggcaagccggccggcggctggggaggaggccgccggggcgaggcgggagaggagggcggcggcggcagccttcgcagtgggggaagctgccgccggcggacgcgtcgaggtattgctgcagcggaggaggacgacgaggaggagatggggctcgtgaggtcgagctcggtctccgcgacggcagtggaggaaaaagcggcggccgtgacggcgaaggcgtggtggggttggcacttcccgagcccgctcaaggcgttccggcaccggagatcatcggcgagcatgccggagtgaggggggattacaggagatttttccttttccctttttttggcttcgcgtgctaatcttatgattaagttagaccaaactccaaagcctgtgatttgggcgtaatgtgtgcatatactcctaccagtggtgttgttcattgttctcttcgtgcttttgctcctttttagagtgcttgcaaacgttgtagcctgtgtacatcaaattgggaattttaaggtcgctgatttgatctgcaccaggagtttcttttttctctttttcgacactgacggaatgtagattgtgcgttgtttttctttcagattggagtgccggtggtggccatcgtcctgtccggcagcgcggcggcgcccgacagcggcgtcgacggatcgtaccgtcggacgacggaggcgagcggcgaaaaggctacaacgttcactggcaagcggcgagcgggtgggcagcaacggcagcgcagctacgccgcacttggcaagcctcacgttcaccgacttgcccttcgccaccacatagatgttgcagtagtccgacgcgcccttcatcaggctgcacggcatggcggcggcaacgaggatgcgggcggcggcgttgcctccgccggcgcgacgccggccgccggacctcctcctctgccctccccccctcccccggcggcctcctccccacagcgccgcccgtcgtcggcctcagaaaagtgagagagaggaggggaaagagagagaggtgatgacatggcttactaacatgtggggcccacacgggtcctacgctgactcagccgccatgtaggacaaaaccagggtcaaaactcaaaaccaccgaagcaaacggttttgtaagctgagggatttcatatatccggttttgtagttggaggacgattttgtaactcgatgacaagttaagagaccttcggtgtactttttcctacgtgggatgctgctggtggacggacacaagacgagacgctgcccatccgaattatgcttatgaaacaaactgataagtcaacttgacctccctcatgtcttgctcgtattgaaccatctacctcaattgtaaaatcggacttaatgtttacgccataatttggctcacggttgatttcatttgagcaggccagattatttagaatagttggtgcaatcgttgggtggtgtgcttaagaattggttagcttgatatgtgcaggaatttgtgatgcacctgaaggtgtacgagttgctggggagctgcagcgtttggatcggcgtggtgatgcatgtgctgctacgaccgggagttcctgctgtgcattgtgtacatgctggattgatttgatcatatatatgcattcagagatttggtgatgaagctttgatgattgcatgccgaataagatatagtagtattccatattttactagttggtttgtttagattgagtagtatacgatgcaccatcctgtcaggcgaggaagccatccgtgaagtaggaggccagccgtcaccttacttggctgtacccacattgcccacatcattgtatctgcacccgacttcaatgggggacctctttcaaggacgagcgtgtggcgacatgtgctacagcggtgggtgtcgtcgccacaggcgatggtgataccctgtggctctctccccgcctctctgggaggaaccagatgcgtcaccagaggtcaacgagatcacgctctcgatggaggtgttccttctatgtgtcaggcccatcactgcccacttctacccgtcgaccgcgtcctctggcgcagtgacggacccctccagtagaggcgacgccagagcaacacatggaggtgccgctgtttggggctcgagagaggagtaggctgaaaagtaggtcccactgtattttttaaaaaattttactcttatcacttagatatggatcccacttctatttttaacctctttaatgaatgggttaccttgttagaacaggggaccaagtcaacctatcacataagcataaatcgtttcccaaaccacagaaagaagtcgatttgtaccggtttttgaaattgagggagacattatacctagttttatgcttgagggatgcgattcgactagagcaagacatgagggaggaaaaataaacttattctgcctacgaatcatctgtctttcacattgggccaattatcagcactgacaaaagaggcttatactagcatgtttgcatagttatatttttcatagacaatgccgaaagagagatgatttttttttcttttttagattacacggtagacgcacacgcacgcacacaacactatagatgcaacactacactcacacatccttgaatgcgtctctgatacccgttcctgatcttaacaaatttatgttgaaagcccatttatatgtgcgtagtacttgtggaaactagaatttgaactgatgtgtaaattcatacacccacaactctaccatcagtccatcacaccactagtgtttctcctaaatcaggatatgatgaactatatataggtgtttagagcttttgtggagcttaattatggtctaattgaatggaccatattatatatgcatgttatttgtctttaaaagaagattatattgtatgtcagaatagagtttaagtgatacaaaagctatatacaagatggaatcaaggggcaggtaaaggttcgtgctttaaggtcaaactcgtggtggtggtgcagcggggaaagaaaagcggtgatgttgtcccctcctcatgaccacactagtgtctcctcctccatcatagggcactcgtagtgcgtttcacccatatataagacctcggagtgccacataggctccatgggttcaaaatctgggttcttcacagtgcaattggctataggagtgattttaattttatatttcacccctaatacttcatgtttcagttcttatgctttttctaatttacatagaagtaccaaattacgtattgcacaccctaaaatccagaaaagaatataaaatccactcaccaccttctctctctcccttatcccctccctccctctcagttcccacaatgcacggcacgacgaacagcggtgacacccgctcctctccgtcaccgccggccacgaccctcttctcctccaacccagatcaatgaccctccacccttagtgcaccgatgagctcgacggcgtggactcggtgtgggagagagggatggcgggagctccgtggcgcagatctagcggtgggatgagctcccctctctgtcggaccgcgtcactgctgcctctcccctctctctcaggcaatgactcatgtcctcaccatcggatggggtggatctagcgagcgtcacctccatctctcttctcgatccgaagttgtcggatgctggctgtcaatctggcgctgcaggagaacggccaggggcaagggtgtggtgctgttgggcaatgagcagattgggctgatcagctccaggtcgtccccacccacccaccctctcccctctctcacacacacctcacacgcttttggccacgaggccatcgatagctttcctcgatgaaactgttttttttttttgacgaggccatcggtactgataacaatccggcccaggtggggttggccgagacccaataacttaaggttgctcggaccccaacagttctttggcataagcccgatctccctaaaagactagtccaataggggaagagtggcttgctaagcaaggtgagattatttagaggctcacacggtcgccgcccgactttagcgtctttgccagcgggtaatagtggaggatgtcctcatcagataccaacagaggatgcgaggactccacaaaaacatggtccccatcccttttcttctccacacatgcaatctgtctatgtggacaaacaatgccactgtgaaatgaccttacattcttacccaacattgagcttggcgtcaaagcaatgttttgttgtgtttcgctccttccaaatttcgcggtggctactaatatctattgaattgatatgttctaagggctgggcgtgaaatccacatgtaggtaggctgatttgtagtaacaaataacgaggagagtatatatgcactgttgaacggaaaatcatgcgtgcgttgaacttgggagtcatatataaggaccacaatgcccctgcaaatggacgaagttccgtttgtctcctaccttttggaccccagcaagagcactgtgcacagcatcgcacacacaaagctggccatatcggtgcatcggccattgggcctaacagtgtcacatggccgtcaacaaacgccaagcgacccaccgctaaaaacacaacacacggccgttttcagtcggccggcttgtcagccaggatgtgtacaagcaaaaggtcctgcatatgtggatattagtgaatttcagccatgcataacttaagcctaccctaatggattatattcatgctacgacattgtcaggtgtataggaattgctagatatatcttagatgataaaattactaagaatctcagtcacattaaaacctagcactagattgagggaagaaggggaggaactcaccaacaataatgacatgaaagtccgctagaaaaaaaacctagagtttagattttggggcgaggggtgacactgggtaacgactacaccagcatgaggatggtggaggccgtaggactaagaggagatcgttataatctctttttcactcttgtcaagtatttttactttcctttttctagaataaacaaaccttagagaaataactaaataattctctcgagttttcctttcatttgctcaatttcgtatttacgatttctcctatttagcttctttttttttttaccatttcagagttttcccttggtctaaatttgttatcataggataggtcaaatcttatcctagataggattattttgggatgcatgtagtagttttttttttttgataattttctttaaaaaaacaaaagcagtgccccaaagagagtgaaaactaaccaagatgttacaggatttccatataagcacttagttttatactgcatacattagctaagcacaatttaatacaatatttaagcagttaataagttttccatagtcaaaattgtgttagccattttttagcaaataaggctagagttgattccttttctggttttttggttgggagaaagctgtaattttatctcgcaacttgtatgcgaggacgctttgattgagtaatacatttctttcttccaaataaaaatgcagcaaattaaaacccaggcacccagcctagaaaaaaggcactgtcgacgctcaccagttgatgcgatggtgactgtgcaaagtgcaaagcacaccatgcaatataatgcaacatcacaagaacgcaggatgatattggctctgctggtccctgcttgatcttctttgacgtctcgtccattaacacgataaaccgctcgctcacacagaagattccacctgctgcacagtcgcccccacctcaattcctccgatccgtgaacccccaattccaagaaagaacaaagcaaaaagtctttttctattttacaaggtaaaatatctttgctctttcatgttaagggttaaaaaaagaaaagtgaattacactttgtgttagaggagatagcgctccagttttgagcagcaaaagagctggagctcgagtgagcttagggaggatgggtggggattccctggagttcactccaactccacccgatagatatttgatcaaatctcagtcgtctctgtataacaacggttgggatgaactaactaattcccactagtttttttttcttcatcctaatatttgtaacaaatcaatgaatactatatatctatatatctaaagaatatacaaactaattttacttgcataacctagaaatttcatggttcatccacaatataaaaatcatattgggcttgtggctctaatgttttagcaatatgtttgtgtgtatattgtttatgcatgtttgcacgtactaaatgtttaacatagttctatacatgaccatagcttcttgtttggagaagaagagagcgtgcaaactttgttaatgttgttggcagaaacatactcattaggaacataaaaagaagaaaaggtaagtaattttcattcaagcatatgtgattgagggagttaattaatataagttaatacgtggcttcatcttagccataggaaacaattgatgtcatggatttggtcaaatccacctggtgaagttatagctaactctaagggatttggaccccatggaaacctcccctttctcgttttatttgttgccaaagagccaacttttttttaaaactaattttttttgttgccaaagagccaacttttttttgaaactattttttttatattttcaataagcatgagtaaaaacccctagacgggttacaagaaaagaaaaataaccaccagttggctgaatacacaaagcacacgccacaactcgctaacaactaaaaacactaacagagcccaacataaagtgtcgattccagacttgaccacgagcagcttaggaggttctgactttacaatcgtgtcatcgttgccaagcttgccgccaagcgacatagcaactctgacttcaagatgcaacatcgatatctagcacgctgccaatgatcaagaggcctcgacatcccacaatggactgccagaatggtcaagcgaccttgataccaaagagccaactagagcttgagcttagcctgctctgctttgctcagactttgtttggtctgagaggagagcaggaagagacctaaaagatatggataacaggttgaaatagaaacacttttgttaacttagctggttgaaagtgaaaagtgttgttaaacactagtccaagttaaaacattagtaaaaaaaagttgtccaatatgcaattcaccatattcatatatgttatgagttgtttagagtaaatcttttttttttcttgtcatgcatatgctcacacaccactacatataaacatctgagagtatgtcttttaataaattgaaagccaatacgcacatgcctaatatttgtagacatcttcttctatttaaggaaaataagccttaatggatagtcaaaccgttgtactcttgtgcttctcctattcatttcggagtaaattaaatgagcatagggaaacatcgcacttgtggaggtaaataattatatacacacgggtattgcttttcaatagaaatttgaagagtgcatgaaagattactagtgcgtgtagtggtgcatccgcacgtgtctctcctatgtaagccaaaaaaaaagtgaatgcaacttttttatttttcaataaaggcaatcgtgttatgtcacattgatcattttaaaaaatgtctattgattagtacattatattataaagagaaggtttgccattttagccaacaaagcttcattaccatgttgatcaagaaagagtaaatttcatataatgtatcacgtaactatagatttaacattaaatttatcacaaaactacaaatttaaggtggaatatcataaaactacaaatttatagtaacaaagttatcacaaaactaccgattgccaatttaatcataaaacttgaacatttataactcaaatataacattagtgctaagaatttaaacttcaaaatctatagttttgtgataaatatattactaaatccatagttttgcgatacttagccttaaaccggtagttttgtgataagtttatgttaatctgtagtttgtgatacattaccttaaatatgtagtttcgtgataatttagctcaaatatatgtagttatgtgaaatttactcttagaaaaagagagaaagatttacactatccgatcagggtgagtctaaattataataacgatatagattttctcaatatagttacataaaaaataattatatttaaatttgctttcaaaaattgttgctctaggaaaacggcgtggagaaatcagctagtgaacttaaatagtactccctccgttttttaatagatgacgccgttaactttttctcacatgtttgaccattcgtcttattcaaaaattttatgaaaatgtataagatataaatcacacttaaagtactatgagtgataaaacaactcataacaaaataaattataattacataaattttttgaataagaccaatggtcaaacatgtgagaaaaaatcaacggcgtcatctattaaaaaacggagggagtattagtacgtatgtacaatgtataacaactcagtcatcttacacctgactgaatttaaattctacaatctacatggcagaagtccatattttgcccatgtatatacgttcaaaacataataccagctggagtgcatgtagagatcttttaatttggtccatgccatgctgataaagcatgtttcttctacctttgctcacgatcccaatggctttaattatgtaccacgatgagaaagcattagatgcaatgaaacgcaagaaaaaagaagatgataaaaaagcagcaaatgaagggcccctgcctctacgccaaatctggtggtagatcaaccgcatgactgtcatgttaattaagcaagaaattccctttgcatttcatctcggtagaacacctgcctagctttcaaataaaaggaaggagattaccttactaacagcatgggagaaattttgatttttatttttaccattctgacacacctgagttgaaaattgcgaaatggagcagccattatatatgagcatgcaagatctgaataaaagcttcactgctttcactggagaccaaaactggctctctttcacaagacattctccattttctttcttctcttcactcacactcacactcacaagagagtaagtgagctagcgagtcacaggtttgctccaaagctgagccaccccatcccatcctctggactcatctgcttggctctcctcacaccacccttggattcttgcacttgggagcaagctatagctttgctttgccttcctctcttcaaccctcactctcagcattgttaagctcaggatttggccacctttctcctatagggatcacacaaacaccggtagaaaaaagctcttcttggagctctctgcttggcctctctctctttagtttagccgcaaacaatttcctctcattttttctttgatggccgcgttgcatgggcatggcttcgcggtcaccgtgctactggtggtgttgttggtgcaatgtgacgcggcggaggcgacgacgtgcgccggtgcggtgccggcgaggccacggccggagacggtgtccatcgccgagttcggcggcgtgggcgacggccggacggtgaacacgtgggcgttccacaaggcagtgtaccgcatccagcaccagcgccgccgcggcggcaccacgctgctcgtgccggccggaacgtggctcaccggcagcttcaacctcaccagccacatgaccctcttcctcgccaggggcgccgtcctcaaggccacacaggtctcactctcacctcgccaccgccatggccatgtttttcttttcctctcttcttcttggtggtgagtggtgtcgttgacatcgacgcaggagacgaggagctggccgctggcggagccgctgccgtcgtacggaagggggagggagctgccgggggcgaggtacaccagcttcatccacggcgacggcctccgcgacatcgtgattacaggtgaagaattgaagctcagcttagctcagctccggtatttctagttgttgcatggtggtagcttctctgctgctcactttctcccctgttgttttggtatactgtgttcttgtgatggtcttgattgtcaattcttaagtctcaaccaactaactttggtctcctggtcagagaatattcaaagagacatgcatacatcctgcaaaaaagaattctgcacacaccgaggaaaaaaagattatatgatagcatgggagtgagtgactaaaggaagactactttgttgcttacacgcatcagacataatagggtaataaataaaaggaaccgaaaagataatagacctagttaacgcaactttagataaatagtagtaagggatttgtccatcatggttaaaatatgtactcttccatggtggtttgtcagaggtttgttattttaaggtttaggccattactgagagatttagaatacaaacataccttggtgggtagcacggtggacgacctgttgtcggtaaagttgaatcttgctcctgttccatatctagtggatgtacatgcatgccaagaacaggaaatggaacagtgaactgatttgattctgtaccactctggtacagtttacatcacttctactattaagttggtgactggtttaagccagcattatatgctcaagcagacaacaagcagtcaggcttactctcaccaggcaactgaactaactgtgctcttatttcgtctgtagcaattttctctgactgttcctgcaaaagaactcattaaaattgatgcaagtaattaacatgtcagattttttttatattaaaaaaaaaggtgacaagggaatcatcgatggacaaggtgatgtatggtggaacatgtggaggcaaaggacacttcagcataccaggcccaaccttctggaattcatgcattccagtggcattcacatctccaacattgttctcaagaattcacccttctggaacatccatcctgtttattgcgagtaagcacacgcttgaaagttgaaatgttcatctccttcctgcaaaaatttgtcactgcttaatatttctttcagagcaatgttggaaggccgaaaaatagttgatatgtgaaaatttcaatacaatccattatggaatagttaccagaaataagaaatcttgtgacacagctacaaaattcttgagaatgttcagtttcaaatgcccatttatgctgaaatactgatccaattcattttctacacccagcaatgtggtcataaccaacatgatgatcatcgcaccacatgactcgcccaacaccgatggagttgatccaggtatgcaaattcatcttaagcttctggcacacaaacaaaccacatataaattgattaatttttctttgctacatgcctgaccatccaagagtacatggaacatgctaataatactgaatcctcccacagattctagcaccaacgtatgcatcgaggactcctacatctcaaccggcgacgatctcgtggccatcaagagcggctgggacgagtacggcatcgcctacgggcggccgagctcgggcatcaccatcaggcgcgtcaggggctcgtcccccttcagcggcatcgccatcggcagcgaggcatcgggaggcgtcagcaacgtgctggtggaggactgcagcatcttcaacagcggctacggcatccacatcaagaccaacattgggaggggcggcatcatcaggaacatcaccgttgacaacgtccgcatgaacagcgtccgcaacgggctgcgcatcgccggcgatgtcggtgaccacccagatgagcacttcagccagctcgcgctgcccaccgtggatgctgtcagcatcaagaacgtgtggggtgtcaatgtgcagcagcccgggtcgatcgaggggatcaggaactcgccgttcacgaggatatgcctcgccaacgtgaagctgtttgggtggaggaataatgcagcttggaagtgcagggacgtccatggcgcggcgctgggtgtgcagccggggccgtgtgcagagctcacgaccagcctttcttcagggttctgcagctattagtgtgatccagttgtataatgttttttgattagaaaggttgtgcttgctttttttttaggtttgactgctccctaattgtggttgggattgatcaatatgttaggcttgtgctaatcagttaaggagttttaggtgtctttttgttagagaaaggtttggcttctaagttgtcagtctgagtgcaaatatgttctaatctgaataataaatcccagcttgtgtgagattaatactccgtcagacttgtgatcaaatgagagttgaatgtgcacatttttactcctaatttatctgttggctgttccacaaacaattctagggtcatcagaggcggctcaatggatgaggaaggaggctctctgcaagaggcgattagattttttttttttgagaccaagaggcgattagattgggtctactcaatcagaacaaaggatataatccaacagctaacctacaaagataagtcagtgtgcgtatcaaaaattggaaatggataggatatggtacaagcactgatcgaaaattcctgtttcgtttgtcaggtacttctatatgattgtgatactgacataatatgtgctactaacattctcatttggacaatttctactctgataactgtactatactttaggaaatgtgttctgaaaactgtggcagcaaatcttccagttcatgatcctaataatgatagttcaatcaaagacactaacaacatctaaaatcaagatgtaaatggaaacaaaaacactctggacaggataaaacaaagaaaaaagggctgcgcttcaaaagtaatactcccgggataatgtaatccctaatcttactgctctaaattaaacccccttttccactgacgatgattaacaaaagctaatccccagatacttgttaaacctgctattagtccttgctacttatgcatcatatatataatatccagaaattttagtactctagcagatagtatgattcagcgttcgtacccatagggttagctcgcgatcagatctcgcaggcgcagcgccagcctagatcggatctcggcatccatctcgatccccctaatctctcgtcttcatcctcctcggcaagctcgtcaccggccggatcgagcccgaaacggcgcccggatccagccgatccgccgcctccggggaaccctccatcgacggcggcggtgggtggggacggcggcggggatgggtgggtgggtcccgctcgtcggaacgggacgaactgctcactagtgggccccaaaaatgcccagatgggaggagaggtcaaacgggctgttattgggccgggtccgtctggccacctcgatctgatccgatccgtttaattacggtttcttttctctcttatttctataaagctaatgcccactaaacacctaaatcttaacatgcaagcatagtatttattagcactcctaaaacctacaaacaagtatgccacatcaacctattaagcacacaaagcttaacatgcaagcctacagtaattatatctacactttattttattttattctaaaattaaacatacacatgctaaatcatcattctcaaattattttcataatatttcaatccaaatcatttcatcatttctctaatattctaatatgtatcccgcagcaaagcacgggttatcgtctagttattattactaggagtatcttagactaaacattagcttgattaagctctcaactactccataataataacattacgacgtgatgatcctttttgtttgaaactttacaacacgtacgatcttggtttggtcagtctggaatggccggtggttcccttgtcaaacccaaattgcgcacgcaatgacgtatatatatcaggaatcaaatcaaatgctcttccgaggcttaaaagattcatcgaatttttaaaagataaaaaatgtcggggggaaaagagtgaccttaccattggttaatcaagcatggcacgcatttttctactcttgtgttctccgtcaggttcgctgatcgatgtgtgtgtctgatgtaccaaattgttagtggtatactagttttttttaggggatttttttttttttgaggggaagttagtggtatagttgcaatcaaatgctgttagccggaaggataaacaatatgtgggtggatcgttgactcaaatcatcgtacatctagctgtgtgcacgctcttgtgcagagatggctcactgataaaaaaaattatgaggatttgttgtacgacaaacatatacatatggagtactccatgaagaacaacctaactgtacacaacagaatagtattaaccaaacacattcttcactttggccttgtttgaatcctctgtgctattaaatatctctacggaatcttactatttagaagtattaaacgtacattactgacaaaatccattccataacccctaggctattttgcgagacgaatctattgaggtatgttaatccatggttaatggatgatcactgtaacccactggtagagaaggagtttttactcccggttcgtaaccccctatagtcccggttttccaaccgggactatgaatccgagactaaagatcgctatctttagttccgggtgaaaaaaccgggagtaaaaatccattttttttcccggttggtgttaccaaccgggactaaagatactaacaccaaccgggactaaagaggctagatccggttgctactttattctatttttttctttattgtttttaatatattgattcactctatcccatcccaaaatcccaaatcaatcatccccgaatagtctctaaattctcaaatcaatatctctaaatacatcacaaaatcttaaaaaaattacatcacaacttctacaaaattcatgacaaatacatcacatattcacatcacacacaaatcaaatacatcacacacaaatcatttcagatccgaatcacagaa

SEQ ID NO: 8307 - DNA, 8917 bp, Oryza sativa
gcggcggaaggcggcggcgacggggatgtcgtcgcgggcgaaggacgtggtcgaggcgggagtggctccttaaccagtcgacgccggcggggcggaggagccactcggcggcggagggcgccttcccgcgcctcccacccccaccaccgccaccgccgccgccgccgccgccggaaaagtaccccctcgcgcgcaggtggaacaaatcccccggcggcgaggcccacccattggcgcccctctccaggtccacctgcctcagcgatgcgcccgacaccgcctcctccctccacccctgctgctgctgctcctccgcctgctccctcctggggctcatcgccgccggcgaggggagagccaataaaagaaaaaccaaaaaagaaaaaaaaaggaagggatttttggttgggggaggagagcaggtgggttcggtgtttttgcgcgaatggagggaggagttgggggtcgctgcttcttcttccagctctacctataaaacagtgggaaagaaaaggaaaaaggaatttttgatgcgtgattcgtagaggaaccaaaataaaggtctcgcctttgctttgaagcacctctccccctccctaatttgcacttctcttgttgattatcttgatgtttctatttttttttctcgaaacacgggacaaacgcggatgctagaatacatacgtgtacagtcatctacagattgatggatcatcgtgaggttttttcttccttccgaaacatgagacaagcatggatcgcgaatgctaagagggtgtttgggtgaaagtttagtccctctcacccagacaccccctaatatatatacgtgtacactcatttgtagattgatcgatcatcgtgaggttttttcttccttcccaaacatgagacaagcatggatgctagtatacatacgtgtacactcgtatctagatttatcatcgcaatgttttattttcgaatgcggttactcgaatatttatgtagttatgtacatactcatctccataaatataatatgagcaaaaagaaaaaaaaactcttgtctttgcatttaagcatctctcgtcctccctaatttgcccttctttcgttgaatatcatgactttttttcgaaacacaagataaaagcggatgctaatatatatacttgtacacttttctatagattgctgactatgattttttttctcaaaacacgggacaaacgtggatgctagtatacatatgtgtacagtacactcatgtagatttatcaccacgatgtttctttttcttctcagaacatgcggacgcggatgctcatatatatacgtgtacacatctctataaacataacatacgcaaaggaaaaagcccttacctttgcgtttaagcatctctcgtccttcctaaattgcacttatcatgatgtttttttcgaaacacgggacaaacacagatgtccaatgtgatatttttttccctaaacacacgacaaacgtggacgctagtataccaatgtgtaacccaccctcccctcccccactcccagtatacacatgtgtacacatctctataaaacgtaacacgcgtaaaaaaaagctctcacctctacgtttaagcatttctcctcctctctaatttgcgcttccgtgttgattaccatgatggttttttttcaaaacatgggatagacaaggatgctggtatatatacgcgtacacttatcttcataaacttaacaagtagattctattcatttgatcacctccaaaaaaaaaatggactattgacgaagtaccttggtgtgttagcattgtttttcttcaactagtaattaccaattataatgcgtgatacacgttgcactatccatgaaatttatcataatttttagataatccgtatgtaacaatttatgatgatcacaaacacggttaacgttttcgactaacaaagaccaaaaaaccccatgaaatatagaggtttcgatgcagtacaaaagcagattctatgaaattcggaatggttttcaataattcaaatttaagacagtaaaatcagccaaaatttgattaaaatttagtgaaatttaacaaaaaaaaactgtcatgtcgctatggtcgatcggaatccggcactcaatcagaagggtaaaccataatccgtgagcgtataagaaaaccggcgaggagtcgtaggaagaaacaacagacgagtaagcgatagatagttggatctcgaatttgcgttgctgccttcgtgggaacgaacggtcgccacgccttcgcctgcgtacgtgcttgtcctgtccggcgacggcgacggcggcggcggtggcgaggatccacgtacgctgacatgtggggacacacggcggcgccgtacgccggcgcgtggactcgcgacacgtgtacatgcgacggaacagttgaggggttggatctgaatcatctgatctgatcacgagatgcgatcgtgcgatgcgccaccgacaagattcgggggggtcgtagtgcctcttatcgcatcgaccgtccagtctccatccgacggtccgaaagtaggacacgtcgaacaatgcatatacatactgtacatgattacgcctacgtgtgtcagcaacagtatttttctttataattacacaatgcaacttagacactcccaacgtatgggcactcacccctatgaacacacgcacacaaaccctacccagagcatcttcgaagactgcctaccactgaaagcacaatgccgataaatccgcgaagattgcctaccactgaaagcacaacgccgataaatcctgaaaaattcgctcccatatagagtcgaacctaagatctaaggtgctactgagtttcttgtaaccattaggctataggccctttcgcgtgtcagcaacagtattatggctgaaggagccgcaagcactcaccaattgtacatgcatggccgtttgcttggcaaatacagaatcacatgatacatcaatttttcaacttgcacgagataaaaagtgactgcttaattgggcatgcaaattttcaacgcaactatgcacatcatttgtactgttgtacaatacttgcgcaatggactgacaactgatggaagtatatataatcgaaactggaagtactccttcctccatttcagaatgtaagactttctagcattatctatattcatgtagatgttaatgaatctaaacacatgtatatgcttagattcattaatattcatatgaatataagcaatgctagaaagtcttactttaagaaacggatggagtacttaagagtgcttagcaatctttaccttttcattcctgttttattaaaaaccgaccaaaaaggtaaaacccgataactttcgataaacgtcatataaaaaccgactaatatcgatcggttttcatatattgagatctaatcggtttagtgaaccctcatactatgtatagctactaataataaggtagcagttggcagttgtgagtcgtctctgctacttcttcagttagcgtcaagatgtgaggccagatcaagatggcagtttaaagcatccacagctagctaagctccatggtcgacggagtaaggctacagtacacaaacatgtggatatcggtttataataatcttgcgacgaaattagtagtatatcgagactcgtgtctgttgaatctatccattatcaaacaccagtggccggcgtgttgtgtccatgtgcaacaacagtataaattatacctcctggcactgacaatctcctcttaaactttcccattctttgacaaaatattgaaatgagagctgaccgatttatgaagaagaagcagggcctgtttggcagctcaagctccagcttcatcctttctggagctgaagctcagccaaacagttttagctccaccaaaactgagagtagagctgggtgaagttctctcacaaaataaactagagttgtggagttgggtttaggcagctctataactccactccagacccaactcctagagctaatttagaagttggagctgtaccaaacaggcccgcaatctactcctatctctgttcttgccttgatccatcctctttaaccaactttgtgaatactgaacaattcagtctgaaagttacaatacccttgaatactactccctccatcccaaaaaagacaaaccatgggtttccgtgtccaacttttgaccgtccgttttatttgaaaaaattatgaaaaaaattaaaaagacaagtcacgcataaagtattaatcatgttttatcatctaacaacaatgaaaatactaatttaaaaaaaagttcatataagacgaacagtcaaatgttggacacggaaacccaggatttgtcttcttttttttggatggagggagtactttgaacgaaatgcatgcctctgaatattattattaaagtaaatttcagaaaatcctatattttatggtcataatgcatgaagtattaagcataaatttgatcataaaacatggagtagtattaagcataacttagaaatgcctagctaacaagttgcagttggttaggctgccaaatgattggccaatcgagccaatgcaactgcaagcagcggccagaattatgcgatcgatcggcgagcacatgcacacccacttgcagtgcagctagcaaaacattggacagcgcatttatgcatgcacaccggccggcgcggttggattcaaactcaaacatggcaaaaacatctttgaataatccacggagaaacaaatgttcagtcagtctttgcattggaatgctagccatcggcagccagttgcctctttctttctatcagctacaactactcttttttatcttaaaatataataatttacaacattctaataataaaatactataacttcttctcctcgtaatcgggattgcctacacatttgtcgggtgatttttaacaagaaatcacccatattttttttacacttagatttatatccaacggactacaaaataaaataactaatacaaatttacttattcaatatttttatcaaaattatagtgcacttacatatcatatcaactaaatttacatatgtaattttagttatataggactgtaattttatattttaaatacttacatgtcatatctactgaatttacaaatgtaattttagttatataggactgtaattttatattttaaagaaaataacaaatacatatttacttacactttatttttataaaaattacagtgcacttacatgtcatatcaactgaatttacaaatgtaattttagttatataggactgtaattctatattttaaagaaaataacaaatacatatttacttacactttatttttatcaaaattacagtgcacttgcatatcatatcaactgaatttacaaatgtaattttagttatatatgtctgtaattttagttacatataagttacagtgtaattacactataattatattgtaattacatctgtcaaatttctaaaaaaaaattatcggcaaatataaaaaaattgaatagaacaggtttctagagatggtagatttgttgggcatggccgcatggtggtgtaatctagaaggtcgtcccgtccggcgatcgtctccactcctcatgcccaaagggacgagcacagtgcgaacaagatcatcccgaccggctgaccacgcatgcagcctccaccatcgtgcggtcagcaaatccgtgaaatcaccgggaaaaaatcacacgacagatttctagcgaaatcgaaagtgaaatgtacaataccccatgagaatcatgcatgttctaaaatataacttctcctcccgctagtaatatttaactattcaaactcttcacatactttctcatctcaaccaatcataacattatcataaaattttaccatttcttaaaaacattatcataacaatttaccatatttttagaaaactaaaagggaaataataccccatgagaattgggggttcaaaattacagaacaaaatcagttctatcgccccccccccctcctgatacaatattatttcgtctgagatttttttaatttggtaatatttgttcaaatttgtttgaattttgtttaaaaaaaatcaaataactgtggaccaaaataatcaaaatttcagccatattgttacccctgatacaaatggctaaaataattaaataaagatcgaaccttgaaaatcatgctagggtcagcattcgaatccaggtgggctcgacgaacaccctcgcaccacgctagagctatgctcagttgtcaacaatttactatttaattttacttattttcttaatactcttatctaattttaaaatctctttggacggaagagattagctagctttcttctttctcctgctgctgctgatgcatatactgtcatatactgtatgagcttgttttattcgctaatgcgtttgcttaagccaatcgttagacagagagacagcagccaagtggacagaaaaacagcagcagcagcacacgcatgcgtgatcacctggctgtattctctcctctctcctctgcgctggtcgcagttgttgccagcagggagttcagatgattgttttgatctgaataattcagatttcaggctggtcttaaacattttggagatgggaagtttacaggaaatctttgctgctgctctcttctggatgatttgtccacttgtcagaagtgaagcaacatctagcttgaagcataagcgcaggaaaacaaatctgaaagacctaattagctgtaattgtaaggcataataacttcgaaaaggtaaatcgtaaagagacagtaagcaatggcttaacagatacccattctatggatgtcatcttcagtttattcccaaggaacaaagtatgtgcatctcatattcttatgccattatgtgctcatctttactttctttttcaagtatatggccccatctttccgttcaagaaaaatctgaaaatgtttatggcctcgtctgctgaaacaggagttgaacaagagtggccgaaaaccgaggcagtgaggaagcacatgggcttgtacgaatgtacaaccagactatgtttcatttaggcctgattgctaagcccatttatttaaattggattatttctgggccttctggtggagcacatgggcttgtacaattgtccaacacaagtttagactagattagtaggatgcctttattcatccttcttttttttttctgtaactgtcgctcgaataaagtcatttatcaactttgctggaagagtggaagattagcagtaatcagtgtagtggagtaagttctttctgtgttgtctcgtgatctgatataacatgctgaccacttgtaaacattgtaagtttgttacacactggcacaactcaggatcgatcattacaaggcagtacttttttttaaaataataataataataatctttgagcaacacaagccactgaaatcaggacaaccaagtgttgagactataggtaaacttctggttctattgtcaagccaacctcattaattagctgcctaacttttcatctttcctaatcttggtcatagtcaaacatgcacggaaattttttttttcttatcttaatcgtaatagtcaagcatgcacggacagcctcgtaaagaagattacacaagtgcaggtataaatttaacttgaaggatcatgttgatccattcaggcagtagcagcagctaaccaaccaaacaatgctgattcactgaagagtcaaggagatgggcaatttttcctctgttaggagcaactgatcaggacgagctaaactgatatctcatcacaagctacatgcatcaaaatccacttccttatcaatcgccacaatttcatgcataatcttgtaactacttcagggctcttcaattctttcagagatcagtaccaattgattaccaaatgatagtatgagccgcaaaagtggttgggaaaacactgcacttttgcgtctctgcattgcctgaagtttagcaaagctgttgaggcatgcgtatgcattgatcaacagaaagatcacaatgctggctagtgttatgattttcacaagtcaaacagaagaagttttgtgttcagctactctgaatttgagttttgttttttctgcatctactgttgttaagatctctgaaactcacgaatggtcgagattttcagggccgatttgtctcattagccgacgaaataaagtactactcccaaatgctttgatgatcccaaatgctgtccgattcaattgaaaagcctgatgaagtagtggggggagtttccatgttcttttctgtcataccagtgacctgctaccgaagtacatgcttgtgacatttcttggactatctgtacaccgatatactatccccagtctgtttgatcattctgcattacacagatatcccatcatgtgaaaaagaactatcttaatttacaccgctagtgatttctcttgggtgtaatcatatattcatatttgagagtaagaatgtctgaattcagaatttgaaatgtcgaaaagatgaaattttgagggagaaatgggttgaaatataggtgtgtgagggctctcccttttgagttgatcagaggtgtttcagtgtttgtcactaccggtatcttattttaaatcgctaatcgtttctcttggggacaacatatttatcactgcattcgagagtaagaacgcttgaattcagaattcgaaacctccaaaagatgagattttgagggagaaatggctctaaaatgtgagcatctgaggctttcactttctcttgagttgatcagaggtgtttgtcagtaccggtggtttggatggcaaaacacggccaggaccagggctacgtccatatcgcatca

SEQ ID NO: 8308 - DNA, 1396 bp, Oryza sativa
gggcgaattcgagctcggtaccctaattcagatcagaacaattgcagttttaattcctttgtaataaagcttagttcttgagcatctgtttttcttcttttcccccatctgctcttccctccagatggtctacaccaggactggcaaccgcacgacaggcgagggcagcaacggcgaagaacgcgctgatggtgtgcaccccaacagtgattctggcaatggtccgccaccacttcccgagaatccgacccttgcccaagttatggcacatcaaactcagatgatggcagccatgatgcagcagatgcagcagcagcaccagcagatgcaccagaggatgatgcagcacgccgaacagcagcaccagcagtttggtccccctccccctcagtccaagttgccagaatttctacgcgtcaggccacccaccttctccagcaccaccaaccccatggaggcgaatgactggctccatgcaatagagaagaagctgaatctcctgcagtgcaatgatcaggagaaggtcgcttttgccacacaccagcttcagggtcctgcgtcagcttggtgggacaaccacatggccacccgcccaccgggtactgaagtcacatgggcagagttctgccgtagcttcaggaaggcacaggtgccagacggggtcgtggcacaaaagaaaagggaattccgggcgctccatcagggcaacaggactgtgacagagtacctccacgagttcaatcgcctcgcgcgatatgcaccagagaatgtccgcaccgacgccgagaagcagaaaaagttcatggcgggtttggatgatgagctgaccaaccaactgatatctggggactacgctgactttgagaggctggtcgacaaggcaatccgtcaggaggaccaacgcaacaagatggacaggaagaggaaggccgctcagttcagggcacatcagggaagtcaccagaggccgcgcttcactcccgggcagcagggtggacctaccaccatgatcgtccgccagcaccgcccgttcaaccctagcaacttccaccagggcaccagtggcagtcaaaactaccatggaagtcagcccaaccgcggtacagctccacgcccaccaatggcaccggcacagtcaggccagcccgcgcaagccaagaaggagacgggagcaaaaccagtgtcacgtcctgataaattcatcccgaaataaaaatcatcttctaaaaggaataatagaattaattaaaattcgaaaagaaattggcaaacactaaaatacgtacaagaaaaattcaaatgtgacccggagaatttttgttaaattctccttggtctaaaaggagccctcaaattttagtggaattttcagagcacaaataataattaggaagaa

SEQ ID NO: 8309 - DNA, 2227 bp, Oryza sativa
aatgcattatcgctttatttaaattcccgcgttatcactgttttatttagccatgcctatttacctttgttatgaccttattattattgttattgatattaataccttgttcaccctagaataaacaaaaccctaactagtggacattatattcatggttccactagtataaatttaggtagatgcttcgctgattaattaggcaacattaggtggttttataactttagacttcgggaattctcatatcatttggacaccatggaatggttggcttatgttggaattggacacacacctccccctcttttcaaaacccccaaaatggtttaggctgggctcgaggtgcgtggttgggttttgttagtcgtacctcgggtactataaggattaagcttgggcctctgttgcaaagcactaccgtacttccacatgtctagtgggtaaggcttagtttgtggctcagtctggttataaacaaaagtacacggattggagatggatgaagtcgggggtcgatggacattctccagggcaaatgaaggctacacgagctgcggcccggtagtcgagatgtcatggcagagggttggtgccctgctgctagggggctcagtcctgcctgcctgtcccgggtgtcccggccgtagggggattgggtcggtactcttgtttatggctaggatgggttgggaactatgtcacgtcttccgtccgtataccgtggtggtatgtggcacgtggttgcacgcgaggaagatgtgtcttgtgggtaaagatgtacacctctgatcagagtataatctattcgaatagccgcgccctcggttatgggcaagccgagcaatgtacccaagtcagtgttttaattcttaaaatttgctcaacaactaaaatgtggaatggttggcctgggttggcttgggacgagctgggacccagggtcgggttgccagttcggtctgaatcatcgtaggccttgggttaaggcaggttcgtgagggttcacggccttgtttaataatactgcgtagctctaggatcgtctttataaaatggctttgggcaactaagtaacttttaaatgctgttcactgcaaaacttaacccctatattattaccccttgtacccccccttgcattaattatgcatctgccggtgtggcttgctgagtactgtggttgtactcattcttgctcaatctttcccctcttcagtaagagaagctttgaagaagatgtcttaggtggagtcctggcttataccccagttgagcgcctgtgaagatggagccgtaggcccgctagtccgctgctgtttatttttgattgtcaggccttaagtgcctttgtaataatgtaaatattatcgatataataaagatgtgtcttttatatcatgtttgtatggtgtaccccggcttttcctgggacggggattgatacactagcgttcgggaaaaggcaattttcccggtcgcgacaccagggtcctgcttcaactgtggcgagcttggccacttcgctgacaaatgcccgaagcccaggcgtgccgggccaaggtttatccaggctcgtgtcaaccacgcatctgcggaggaggcacaaacagcaccggaggtcgtactgggtacgttccctgttaactcaatccctgcaacagtactttttgattctggtgcaacgcattctttcatttcaaagaaatttgtggggaggtatgggttaaggaaagaagagcttagcacaccaatgagggttcataccccgggaaatagttcaacctcagtcagttttagcccctcagtgctaatagaaatccaaagatcaccatttctagccaacctcattcttctcgaatccaaagacctagatgtcattcttgggatggattggctgaccaagtttaagggagtcatcgattgtgcgagtcgcacagtcaccttgaccaacgagaagggagaaacagtggtgtacaaatctctagtctcaccaaagaaaggggtctcgttgaatcagattgagacggaaatcccagtggataccgtagagaagaacttgagaaaattggaagatatacccatagtctgcgagtatccagaagtgttccccgaagacctcactaccatgccacccaagagagagattgaattccggattgacttggcaccgggaaccgctccaatctataagagaccatacagaatggcggccaacgaattagca

SEQ ID NO: 8310 - DNA, 1182 bp, Oryza sativa
aaaaaaaaaattgtattcccaagaaaagtcagatgtgttggggaacctccaaaaagtttggatggtgctaagagttgctcaggtaaccgctcaggaggaaataaggtgattatttcccagactcatcaagcagatcgagacctgctctcgaaaaaagagatactcatcactgcaactgaatatcccaacggagagatttcactggacagaaacataagtgaaaacaaaggatttttaaggtctaaaactgtaaagccagtaactcatcaaggaaaacgatgaatccagaggaaatttgcatcggctcagactacttttaaaatctgcaaggtgggtaaataacccaccgttcagacgagcgaaccatgttcttcctcatcgccggcgtccatcctcagatcaccaaaccaaaccaaaccaaacagctaaaaaaacgaaagagaacagcaaaacaaacacgaagaagcacatcgcagaccaaaccaaacgaacgccgcagatcgatctgtggtgttcgtgaaggctgacgagagtcgagaatgtggatgatagcggcggccgcaggtggaatgtggatggaaaccctagctggggtgttgcaaacttatagagcgacccttccggaaaagcccctagatgtagggtttattactgtacatgccatcctacataggcctccggcccagcccaacctcgccactctcggcccagttcgcttgcattttgcagtggaaaagttcagtttaggtccttaagtatcgagtttcagtcacatccctcaactatgaagcacattcaacctctagaacctacgttcctcggtagtttttgatgacggctgatgtggcgtgttgatccagttgtgtcctacgtggcgcctatcttgtacttacaattaggggaaaaaaatgaaaccccatgtcactgacattcccttcttcccgcgttgtgttcgctccttgaaacaacgagtcacatcctcatcgactgtgtgttcgttcgacaggtttggcaccatgtgctgtcttcacttggctggcctgacctcgctccttcccgcggttgcacgctttaggtttggtggccgacttctaggaattgcctgctgaagcatcttcgtaagggcttcgacttcctagtcctcttggtttcttggcaactatggaaggagcagaactcatt

SEQ ID NO: 8311 - DNA, 2290 bp, Oryza sativa
agtcgccacccttagctttatcgtcttcttagtctgtttgcgtgctagtttttgtgtttaggtttgttgcttgtgggttagtcggcggtcgatatcatgtgtgagtggtatgacagcctttattaggagttgtgtgcctctttttcagtgttttaatcaagattaagataatggcacttaatcttataagaaagattagtttccgagccgtctgttttcttcctttctcttatttctacctatcctcctccagatggtgaagacaaggaatgatccccgtgactccaacgacgccagtggcagcgaagagcagaccgatggagctcatgtcagtggtgcatctggcagcagatcatctccaccgcccgataacccaacagtcactcaaatgatgacaatgatgatgcaacagatgcagcaacattaccatcagatgttgcagcaggcgcaacagaaccagcagtttggtcctccaccatcacacgtgtccaaactgttagactttcttcgtatccagccacccactttctcaagcaccaccaacccaatggaggccaatgactggctccgtgctattgagaagaagctgaacctactgcaatgcaacgaccaagagaaagttgcttttgctacacaccagttgcaaggtcccgcttctgcctggtgggataactacgtggcgacccgtctagatgcaacggaggttacttgggcagagttttgtcaaagcttcaggaaggcacagattcctgaagggattatggcacaacagaagagagagttccgtgcgctccagcaaggaaccatgtcagttacagagtacctgcacgagttcaaccgccttgcgcgctacgctcctgaggacgtgcgctccgataccgagaagcaggagaagtttttgtttgggctcgatgatgaattggccaaccagctaatctccggagtctatgaggactttgagaagcttgtggacaaggctatccgccaggaagagcaacgcaacaaaatgtaccgaaaaagaaaggcagctcagatcagttttcctcaagggaacaatcagaagcctcgcttcatgacgggacagctaggtgggccttccaccctgatcgtctgtcagcaccgtccctattacccgagtaacttcgacaacgactacaacggtggcagtcacaacaacagtaagcagcacaaccacaactcgactccacccccactaatggcaccagctcagtcaggtccgccagctgtgtcagctcagtcagaacaacccaagaagggggctgtaggaaagccaggaccctgcttcaactgtggcaagcacggccactttgctggcaagtgtccgaagctgaatcgcactggacccaggttcatccaggcccgcgccaatcatgtgtctgcagaggaagcacaggcagcaccagaggtcgtgttgggcacgtttccagtgaactcatatccagcaacagttctctttgattcaggtgcctcgcattctttcatttccaaaagatttgctgggacacatggattatcggtagtggaacttaaaataccgatgcaggttcatacccctggaaatgatatgaggacagcacactactgcccctcggtgactatagagatcaaaagatcaccgtttctatccaacctcatccttctcgaatctaaagacctggatgtcattcttggaatggattggttgaccagaaacaagggagtgattgactgcgcaagccgcaccatcaccctaaccaacgacaaaggggagaagatcaccttccgttccccagcgtcgcagaagtccgtagcgagtctgaatcaggctgctattgagggtcagacagaaacagtggagaaaagttccaggaagttggaggatattcctatagtacaagagtatcctgaggtgttcccagaagacctcactacaatgccaccgaagagagaaatcgagttccggatcgatttggcacccgggactgctccaatttacaagaggccgtacagaatggcagctaatgagctagcagaggtcaagaagcaggttgacgaacagctgcagaaagggtacatccgaccgagtacttcaccttggggtgctccggttatctttgtggagaagaaagacaagaccaagaggatgtgcgtggattatcgcgcccttaatgaggtcacaatcaagaacaaatatccgttgccaagaattgatgacctgtttgatcagctaaaaggagctaaggtgttttccaagatagacctacgatcaggctatcatcagttgagaatt

SEQ ID NO: 8312 - DNA, 4011 bp, Oryza sativa
ggggggggcgcaagccagtttggggggctccccctagccacctcaacatcgccttgccacgtcggtagggggtcgacgccagagaggctggcgccgtccagttggaccaaaatgtgaaaaatccagtccaaagtaacacgcatgataagtttctgaaagcggcacatcatgacagttccgtgtccgatgatttctgggattatccccaaaaaaaaaaaagcctaaggcccatgtatataaagaaaaggaaaaaaatcttggtaagagataagaaagtgaaaaactctcctattaatatatcatgatatatatttgatcaattctacacttctactccctccgtttcagattataagtcgttttgactttgatcaaaataaaactgattaaaatttgatcaagtttatagaaaaatagtaacatattcaacacaagacaaatatactataaaagtaaattcaattagaaatttaatgaaactaatttagcgttatagatattgatatatttatctataatcttagtcaaacttaaagcagtttgattttgacccaagtcaaaacgacttgtaatctaaaatgaagatagtactattatatatattgtttcatatatttgtggtattttagaaaaatattaagttcaatcacccatacctaaaattctagataagtcactaggtggtttgcagaattttgccatggttcatcttatttgagtctatcttgttcttgaaaaccatctcaggctttcagcaggttcagtgcatcaccaagaaaactcatgcaaggtggtctgcagagttattttccatggattattatatttcagtttcctgttcttgaaaaattgcctcatgttttcagcattttcagcaggttcagtgcatcgagaaaactcttgacgaagaacgaatttatctttatctccggcggcagatgccgcatttactgaagaaaatgcaatcagcgatggggacacgtgtgcctcatgtgcaaataatgtgtaagctaaccaaaaagaaaaacttaaaatggacagcaaattctctgataatctggccagctcggaacaaaatctaggagatgatctcaaattctcaataccacttacgccgaaaaaaaaaagtctttattttgaacgcgtaaaaactttgcacgcgaaaacaatataatattctcaataccagtataccacaatctagcttcacagcacacgactaatcagtatataacttaaacttgctttgagcttttaatctggatgccgtcgttcttacggtggagaatttggctgatatctccccatcgtttgtcaggggattatgcagtcaaaaggacgggttttgcgtatttaaagccgcttgatagccaagcttcaattcagtaaaatagtcaatccacccatcctgtcgtaataatgctggtaattagcttgaaccgttcaattacattggtctagcattgattcagttctccaattgatgatgcttgcgtttctatcttttgctagctttgtggctgttgaaccatgaacagtatctttgtacaggaggaagtagtctctgctgtagtgaactggttctgtcaaaatattctcctttttgctcaggtttttcaaagttctgaatttttttgtcggcatttctaagttaagttcacatgttgtaaatgatatgcttcggagattttaggaatcggagggaagagaatcgaagtaacaatgtactgaactagcattagtcctgatcaccatgacagggcactataaaaagatgggttaattaattaattagtggtgcaaattgatgcagctgccatgcattgaattttgcatttgtcttctcttctgaattcaactgctatggtgttttcaggtcttctcttctgaaacaacattcgcctgagctgcttccttagtcatacagttagttgcaattctctgtctgaacctgacatgcatttcttccacagattaaaattaacaggacgtgtctagtgcttcccggaagtttcagatttcgcatcaaatgtcgatgcatggtgaatttgaatttgtttcattcgatgatcgagacgtatcgctggagatgaagactgataataattaataaatctccacgtgccactaaaatctcaacaatcatagctttgcatgacaatgtcatcagtacactaagagaacagataggatcagtgttagtccggctgctgccgcgagagaggaaaagaagaacatgatgaactaatcagtgattcgatcaggccgtaattatgaacgctgccggagtcgtttctttttctagggacagttcagagaatgagagtgctgatcgatcgatttgacaatttgacaatctgacaatgacaccagtggagaatgaatcgaaaaaaactgaaaagatcgatgaacaaacagtgtatcgacgaacaggtcgcttgatcgctgggaatggacagtttcttgcgcgaggggatcgatgcttacgtgagtgcttccgaatggttggtgccccgtccttgtctcggtggcaatgatcttggactgccatgaaagatttcgcagaaagatgaggaaaatcggtaggagaacccacacacacgagcgtctctgagattcttggtttgactgtctaaagctcgtaggaagctgaagaagcacacagtttcaaaggttacagtactttttatcgtcttgccggtcatcttagttgcctgatgtgacgaacaattcaactggaacaattgtaaacgttgcaagtacaatttgtggagtggagatatatatgctcctcatcatctgagaaatctggagcagaatcgatcaaacttgacatcagccgttcaggtatcgccaaagtaagtacagcatccggttcagtttcagtgatgtcagtagccaattctgctttctgcactgcaaaagagaaaagtccactttatttttctttttgagcgggaaaaaatatctactttacgtcgtttaaatgggggtccagtttcaattacatatccctcaaccgtaaagccgaatatagtgtatccctcaactaccaaaccaatccaaatcaagtccccaaatagtactatgagcggtttcgattcatataacatcttattgacctagtcttcatcccatataatatcgtgatgatattaacatggcactaaaaaataaaaataaataaacaccgatgaacaagatattacatgggatgaagatcctgtagttcggttaacgtttaagtggaactacaaaaagttgctgtggtctagtagttgaccacagacggtcttcctgtaaggcgtactccagaaccgctaaaatgttaaccgacgagatagaggaattgaatactctggagctcctctcctttcacagctgccaataaatgagttctgctccttccatagttgccaagaaaccaagaggactaggaagtcgaagcccttacgaagatgcttcagcaggcaattcctagaagtcggccaccaaacctaaagcgtgcaaccgcgggaaggagcgaggtcaggccagccaagtgaagacagcacatggtgccaaacctgtcgaacgaacacacagtcgatgaggatgtgactcgttgtttcaaggagcgaacacaacgcgggaagaagggaatgtcagtgacatggggtttcatttttttcccctaattgtaagtacaagataggcgccacgtaggacacaactggatcaacacgccacatcagccgtcatcaaaaactaccgaggaacgtaggttctagaggttgaatgtgcttcatagttgagggatgtgactgaaactcgatacttaaggacctaaactgaacttttccactgcaaaatgcaagcgaactgggccgagagtggcgaggttgggctgggccggaggcctatgtaggatggcatgtacagtaataaaccctacatctaggggcttttccggaagggtcgctctataagtttgcaacaccccagctagggtttccatccacattccacctg

SEQ ID NO: 8313 - DNA, 6070 bp, Oryza sativa
aataaatagatttttaattgaaaattaaatgaagaaattcgcaaatatccatttaaagagcatataaacttcaaatggccatatcttggccatttgaactcggaattggaccgttcaagtctctaatttttccttaagatgtaaagaacccatttttgtgctttgtttctgctgttatgtggagtttagtagtgtaaaagcccttttcttttccgttggtcgtgtagacgctgcagcttcggaagatccgctcttcgtggaagccgaagccgtcatttgggaaagcgagcaaggcaagtcacatcatccttgaacatattgaatcccagtttgtaaaattatgttgatttaaattattgcattatcgctttatttaaattcccgcgttatcactgttttatttagccatgcctatttacctttgttatgaccatattattattgttattgttattattattaccttgttcaccctagaataaataaaaccccaactagtgggtactctattcatggttccactagtataaatttaggtagatgcttcgctgattaattaggcaacattaggtggttttataactttagacttgggatattctcatatcatttggacactatggaatggttggcttatgttggaattggacacacacctctcttcctctttcaaaacccctaaaacctgttttcggtggggtttgggtgcatgccagttatgggaagtagcaccccggccactataaggattaagctcgggcctctgttgcaaagcactaccgtacttccacatgtctaatgggtaaggcttagtttgtggctcagtctagtcttaaacaaaagtacacggattggagatggatgaagtcgggtgtcgatggacattctccagggcaaatgaaggctacacgagctgcggcccggtagtcgagatgtcatatggcagagggttggtgccctgctgctaggggctcagttctgcctgcctgtcccgggtatcccggccgtaggcaggattgggtcggtactcttgtttatggctaggatgggttggaaactatgtcacgtcttccgtctgtataccgtggtggtatgtggcgcgtggtaacacgtgaggaagatgtgtcttgtgggtaaagatgtacacctctgatcagagtaaatctattcgaatagccgagccctcggatatgggcaagccgagcaatgtacccaagtcagtgttataattcttaaaatttgctcaacaactaaaatgtggaatggttggcctgggttggcttgggacgagctggaacccaggtcgggttgccagttcggtccgaatcatcgtaggccttgggttaaggcaggttcgtgagggttcacggccttgtttaataatattgtgtagctctaggatcgtctttataaaataactttgggcaactaagtgacttttaaatgctgtttactgcaaaacctaacccctattattatccccttgtactctccttgcattaatcatgcatctgccggtgtggcttgctgggtactgtggttgtactcattcttgctcaatctttcccctcttcagtaagagaagctttggagaagatgtcttaggtggagtcctagcttataccccagttgagcgcctgtgaagatggagccgtaggcccgctagtccgctgctgtttatttttgattgtcaggccttaagtgcctttgtaataatgtaaatattatcgatataataaagatgtgtcttttatatcatgtttgtgtggtgtaccccggcttttcctgggacggggattaatacactagcgttcgggaaaaggcaattttcccggtcgcgacaagctggtatcagagccatctcgactgtaggataagccaagtggataaaacctaaggacatattttataaataaaactatttgcgaaagttcctcttttcttcttcccctaatgctatttgcaaaaggtttacccttttcttccttcttcaaatttcaactagtactagatggtcagctttgcgaagaagaagatgtcgtcagttgtttgccgaagctccggaaggctgcaggatccgctagcgaagcgaaggaagcagtgaagccagctgtgaagcaggagtgaagatcttggagaacccgtcgcagaacctaagccaccctctagtgtttcgtttgtcgtatgtttccttgcttgtgtgtgtagcgcgtggtttgcatcggtgggtggtgatgtaaccatgctaggttgtttgcttaatcaacttgcagaataagcaaaacaaacaacacatcaacaaaaagagttagttcctttaaggtcctgtccctagctctggtctattctttccttgtatgcttcctctctcaacccctaccttgtgacagatggataacactggtaacaaaggctatgggaatgatggatccgatgactcaagaacccaagccaatgggaatgagaaaagcatcaacgaaacctcaccagagctaatccaaattgtggttaaccaaaccaacatgttggcaacagcctttcaactattacagaatcggaacaacccagcaggggcaaccaacgttcaagtatctacagtccagcaacagtgcaagttatcagaatttctcaaaacggggcctccaacctttgccattgccgtcgatcctatggaagccagtgattggttgcgcacaatcgagaagaagctagggttgattcagtgcaccgaccaggagcgggttggcttcgcaactcatcagctggttggaccggcttcagagtggtgggatagctacgaaacatcacggccagaaggacatgccatcacctggaacgagttttcatctgtattcaagagatcacatgttcccgcaggaatgatcacactaagaaaacgagagtttcgctacctgaagcaaggagatttgaccgtcacagagtacctgcacgagttctatcgtttggctcactatgcaccagaagacgtggaaacggatgaagacaaacaagagaagtttctccaggggttaaaagatgagctcgcagtgcaactactcctagaggattatgaagattttgagaaacttgtggacaaagccatgcaactcgaaagtgagcataatcggatgacgaactgcaagagaaggattgtcaacatcccagtaattccaggtggtaaccaaagacagcgcactgagccacttcagatcaccggatcttctgttgtgcatcaagagttcctgccccaagaagatgaacgcaatgcagacaacaacactagcaatactaatgatgatgataccaccaacaaccatggttcttgccccattagtgaccactcgaacaaagcgtgcaatgtcagtagcattcaccaagatgtcaacgatagtatcaatgttggaacccagaatgacaaccttagcaattttgactctgggaaggactccaatggtgatagcaataatggtaccactgatgccaatgttagcaaggattcccaaccaccaattccaactccaagtcaaaatgatcgtccccagatggacagctcagtaaagaagacgttgatttgttacaactgcaaagaaccaggtcatttctctagagattgtccacagccgaagcgtaacctgcgccatcactccggccattatgcaagaagaagacaagtcactcgccttgtggtcactggagcaaacgccatacctgtgaggcctcatgttaattctaacccatagtagatacaatgtaccgatgttaagcaccttccctttttgtttaaagcagtgcctcgtattcatgtaatatgggagaaatttgtaataaaaacaagctctaagaggattcttttggaagatgcggatatgtgatcatgtgtataattgtttactgacaaaggagacctagggtctcgtgccagaggaactacattctaacctcgagctaatcaccaacctgaggatggaaaagaaaatcaagtgattaaccaaagagacatttgtttggactaagagtttcagatgtgtctttttcggatcaaaggcaatgacagtcagtatagcttttggcgaaacacttcaaggtttcactgaaaggcagcaagccaaaggacctcatcatccccagaagcgtccgcaatccacattaaagaataccccctgttagagataagccgaaagaagattgataaaagagattggcaaagatgttctctagcatgaaagaagtaggccgaaaggtgattgataaacagaaacatgctctgcatcgctcaaggaagacccctaattgtaattgccccacaacagccaccttgtcattaagtaagcaagatgacctaggtaaaagtgtttctatgaaggcaaggggtgaagtcttcaactcggtatcagatgctacacggagtgaaaagtgcaagccccggttaccaggcgacgccatgtcttgggagatgatccaatgggaaagaacacatcaaggctgaaggtgcacaggaatacgttgaatgctaaatgatgacaacatgaagagaatagcggaaagtaaactgaacataaagaaagtgaatctgcgttgcttgttcgtgggagctattcccagttatgaatcaggtgatacgttcgaagatagtctacagaggtcagacaacgaagcttcagatttggcaggataacgatcaaacaataagaagtccagcagtaaagccatttggggagacgccaaagcatgtcaagtgggagaagttggttcggttgagaaacataattcaaaggcaaagttatcgaccctcgcatcgaatagcagaagtagctagcacccggagaccaggaaagctaatatgaggcagtttgtggcaagttagaagtaaatgacaagcctgatatccttatgacgacaagctggtatcacaagcatggtatcctagtaatgtcgagctgatctcgacgcatgacatgaagtgggtaacttgtatgaggttgactccaaagatgtgaactatgcaaagttctggaactgaagccccatcttcaagtgccgcaacccagtcgaagtcagctaaaggttcaaccagggacaagtcaggtgaagagaagattccatccgcaataggagatcgagccaagcagtcccgagtggagaagttttgctaggcaagtttgttataaaagacgcaacggaagaagtcagacaagaagagaagaccgcccaacctatcttcttgctagcctcctcgaatctcggggacgagattcttgtaaggggggtggatttgtcacgtcctgataaattcatcccgaaataaaaatcatcttcaaaaaggaataatagaattaattaaaattcgaaaagaaattggcaaacactaaaacacgtacaagaaaaattcaaatgtgacccggagaatttttgttaaattctccttggtctaaaaggagccctcaaattttagtggaattttcagagcacaaataataagtgaaaagaaataaacaaagttaaaaaggttttataaaaagaaaaccctaaaagaagtcttttccccctcctcctcccttcttgggccggctcggcccattccctccctctctctctctctccccccccggcccatcggctccccgcgcgcgcgcgcgccgctgacaggcgggcccgcccgccactctcgctgacgggtggggcccacctgtcatctccctcctcccgccgcgccgccgcccgcccgtgccctagcgccgccgccgccgcggattgcgccgcatcccgccgtccccgcgcgcattaaagagaggggaatcactccccgcgtttccctctcccgattccccctcttttccctctctctctccctcggattcgtccggattcatcccgcgaagttcgccggcgtcttcaatggcgcccgagatctccgcgcgcggtttcctctctccccggccgcgctctccccctcccgttgctataaaatcgatccccgtgcttcgctcttccgtttccgccgctcgccgatcgctctcgccgacggtttcgtgcccgcgccgggctcctctctctccgccgtagccgtcga

SEQ ID NO: 8314 - DNA, 20812 bp, Oryza sativa
tgagccccactgtgctcacctaacccatacacgcggagcaaaaacccacgaggggtcggggcgcctcggccctcggggccgaggggggtgcggctcgaccccctcggggggactaagaggagggcgaacgcatcaccctcgggcccgacgtccctcgggggtacaaggccacgtgtgcgattgtgtctgcctcaaacctctagtcatgatactcctgatcccatgtcaccgacagtagcctccggcgttatgccagggcgatcgccctctttaagggaaacggtcgggcgtgacgccactcctaagtcctggtgacaggtgggaccggtctccacaattgggcagaaacccaacggtcacaaaccacgcacatcggcaatggtaactcggctgtcaacaatgagcggtctcttcaagactgccacattacttgagtagcacacgaatctggacatggcgattcgtttcgtctgaagatatggtaacgtcgcttcggtcggcgagcgtaattaacgcgcgcacgatatgatctatctcgactgccacaaccgcatacccacctcatgcgccgcaagcgggcgaatgggattagtggaagcgtgggcgcgagaaacgagggggcgaaatagtgggcgcgagaagcgaggagccgggcacagcgttggcaagagtataaaggcacagaggaagggatctgtttccttcctttcgccattattccccttgtcttcgccgcttgcaccctaactccttctttcctgtgccctaccttcgccacacgcgctcgctcttaatcttctcttcctccggcgccatggcacggggttccgctctgctcgatggtagcgtgctgccgccttcccggatcgtgagcgagaggcaggctgggctgtcgcgccgcttcatgccggaatctgccaccggccgggagatagtcacgctgggcgagggacgcccggcgccagactacccggggcggtccgtcttctttctcccctttgcaatggcagggctggttccaccattttcttctttcttcatggatgttctggagttctacgatctccagatggcgcacctcacccccaacgcggtgatgacattggccatcttcgcgcatctgtgcgagatgttcattggggtgcgcccatctcttcggctgttccggtggttcttcaccgtgcagtcggtgtcgccgccattggtagtcggtggctgctacttccagccacgggggccggtgctgaaccgctacatcccctgcgccctccgcaagaagtgggacgactggaagagcgactggttctacactcccctcgccgacgaagcgcgcctccgacttccgagccagcccccggcgcaggcctccagctggcgggcgccggtagatctgggggatggctatgacgccgtcctcgaccgcctggcgggcctgcgatcccaggggctcacaggggccatggtgtacggcgactacctccgtcgtcggattgcgccgctccagcgacgtgctcggggcgcctgggagtacaccgggtccgaagacttcacgaggacccaccagggagtgagatgggactgggctcctgaggacttcaagatattggtccaacgggtgctgaatctcaactccgtagaggcggccctcattccccaaggaatcctccccctctgcagcgatccagaccgcgcctccatcctgaccattatgatggcggtcggggcctcagaggagcgagctccaaagggccacgacggtgcaggcgggagccgcaggggggaacaatctaccccgagagggggtcgtgcttctgggtcccgcgacaggggcccggggagcagccgccctgccgacgcccgggggaagaggaagcagggaggaacacctcccccatctcctccccgagggggcggggcggcgcgtgccagtaacaggcgcccggagggggccgcgccaacatcgcagcccgagggggagcgcaagaagaagcggccccgtaagatgggggagacagaaccatctcggggaaacctcatttcccctccaaagtggtcgtttaaccgaccccctcgcaggttcgtctctcacccatcgtggctgtattcattctctcaacgcgagttttcactcacccatcttgttcgtcttctggttttttcttttgtttcagcgagatcccgtcgcgtccctcccgccattccaagtccggccagtctgaggccgaggatccggcggccgcagaggccctcaggcgggaatctgaccggcgagaggccgcggatcgcctacgggaagctgaggaggccgcccaggaggccgcccgggctcgccaggccgaggaaaccgctcgggaggaggccggatttcgccaggacgaggcgatggcgacttccgaggcagctcgcgacgaggccgcgggcgcgtcgcttgggcccactccctcgggcgacgctcaggaccaaccgggtcagggggacatccccgagtccggcacttccatcggcggcccgagccgcgtggcatcctctccaaggcggctcttccccacgccttctatcgccctactgaacgcaaagccccttctgcaggccttggccgccgcaaacaccacggtgttggatgggttaagtgcccaggtggaggtcctgcaggcagagcgggcggagctcgacgccgcgtgggcgcgtgtcgaaaaggggcgacgctcggtggaggccatggtggaggtgggccgtaaggctcaccgccggcacgtctcggagcttgaaactcgtaagaaggtgctggcggagatcgccaaggaagtggaggaggagcggggggctgccctcattgccaccaccatgatgaacgaggcgcaggacaccctccgccttcaatacgggagctgggaggcggagctagggaagaagctcgacgccgcccagggggtgcttgacgctgccgctgcccgagaacagcgggcggcggagaccgaagcggcgtcccggcggcgcgaagaggcccttgaggcgcgcgccatggcgctggaagagcgcgcctgcgtcgtggagagggatctggcggaccgcgaggccgccgtcaccatccgggaagcaacgctggtggcgcacgaggctgcctgcgccgaagaagagttcacgctccgcctccgcgaggacgcgctcaccgaacgggagcgagctctcgagggggccgaggccgcggcgcaacagctggcggtcaacctgtccctccgcgaggcagcgcaggaggagcaggcgcgccgcaatctggaaggtgcccgcgccgagagggccgtactgaaccaacgggccgctgagctcgaggcgcgggcgaaggagctggacgcgagggcgcgcagcggcggggcggccacgggcgaaagcgacttagccgcccgcctcgcagctgccgaacgcaccatcgccgatctgcagggcgcgctggactcgtccgccggggaggtcgaagccctccgcttggcaggcgaggtagggcccggcatgctttgggacgccgtctcccgcctagattgcgccggtcggcaagtgggcctctggagagggcggaccgtaaagtacgccgccaaccagggaggcctcgcccagcgcctctcgaagatggccggggctctccaacggctccccgaggagctcgagaagacaattaagtcatcctcgagggacctcgcccaaggagcggtggagctcgtcctggcgagttaccaggccagggaccccaatttctctccatggatggcgctggatgagttccctcctgggaccgaggaccgcgcgcgcgcgcaggtccgggatgccgccgaccatatcgtcgacagcttcgagggctcggcccctcggcttgcgttcgcccccaactccgacgaggagggcaatgccggtggtgcagacgacagtgacgtcgaggccggcgatccgggcgcatcggattgagcccccagacccccgccattcttcagttttttcttcttttctttcttctaaggccttcgggcctcttttttgtatagatcaacttaatctgtaatcaaaaatgaagaaatttttgtgttaatttcatcttgctgtgagtatgagatgaggatgatctgtgccgtggtccttttgtgtcttagcttgaataagggcttgtgcccaggttctggtcctcaaaaggcgcgggtcggggctagtgcctggggagatccacatgtcgagactggccaggccgggaacgtggtgaccgagggttatgggtgacccgattgtgggtttttgccgattccccctgggagttcaccacgcctcggggcacggctcggttctgggccccgtttggcgattttagccgacccgagcccccgagggcaggattgagcacgagtgacctatttcaagtcaagattcttcaaaaggaaaaaacaacacagatacagcctttaggaaattgaaactgcttttatagaaattcagatataagagaaataagaatatgcatatgttgtagcccccggccaaccctgcacgcccgaggggggtgcggggttggcccgagcccgaaacctgacacccgaccccccctcaggggtagaagcgacgaaggtgttcgatgttccacgggttaggcagctcagtgccgtcgcccgtggccagccgtatggagcccggccgggggacgccgaccactcgatacggaccctcccacattggtgaaagcttgctcaatccagcacgcgtttggacgcggcgtaggacgaggtcgtcgacgcagagtgatcgggcccggacgtggcgctgatggtagcgccgcaggctctgctggtagcgcgcggctcggagggccgcgcgccgccttcgctcttccaagtagtcgaggtcatctctgcgaagctgattttgatcagcctcgcaatacatggtagcccgaggagacctcagggtgagctcggatgggagaaccgcttccgcgccgtagacgaggaagaaaggcgtttccccggttgctcggcttggtgtagttcggtttgcccagagcaccgctggcaactcctcgatccatgaatcgccgtgcttcttgagtatgttgaaggtcttggttttaaggcctttgaggatttccgcattggcgcgctccacttggccattgcttctggggtgggcaggtgaggcgaagcagagcttgatgcccatgtcttcgcagtagtcgtcgaagagttcactagtgaattgggtgccattatccgtaataatacggttaggcactccaaaccgggccgtgatgcccttaatgaatttaagtgcggagtgcttatcgatcttgacgaccggataagcctcgggccacttagtgaacctgtcgatcgcgacatacagatactcaaacccgcccggggcccgcctaaacggtcccaggatatcgagtccccagacagcaaatggccacgaaagtggtatggtctgcagggcctgggccggctgatggatttgcttggcgtggaattgacacgctctacatcgccggaccaggtcgaccgcatcattaagagctgtcggccaatagaaaccctggcgaaaagctttaccaaccaagatgcgcgaggcggagtgggctccgcattcgccttcatggatatcggcaagaagcacaacgccttgttcccgaggaatgcacttcaggaggattccattagccgcgcgctgatagagggtcccttctaccagcacgtagcgtttggagatgcgatggacgcgttcactcccttcgcggtcctcgggtagagtcttatctgtgaggtatgcttggatctcggcgatccaagcaatcaatctaagggagttgggagcactcccctcgggtcccgaggcctggactccgacaggcctcgggggccggtcaggcgcatccgtctctcctaaggggtcgggtcgcgccgacggctgggcaagcctttcttcaaaggcgcccggtggggtctgggctcgcgaggacgcgagccgtgagagttcgtcggcaatcatgttatcccgtctgggcacatgccgaagctcaatcccgtcaaaatggcgctccatacgccgtacttggcgcacgtaggcgtccatctgcgggtcagagcaccggtactccttacagacttggttaacgaccagctgggagtcgcctaacaccaggaggcggcggatccccagtccagctgccactcttagtccggcaaggagtccctcgtattctgccatattattggtcgctcgaaagtcgaggcggaccaagtatctgaggacgtctccgctcggagaggtcaacgtgacccccgcaccggcgccctgaagagacagggagccgtcgaactgcatcacccagtgggcggtgtgaggcagctgcgaggggtccgtgctggcctcggggatcgagacgggctcgggagccggggtccactctgccacaaaatcggcgagggcctagctcttgatagtgtggcgtggttcaaagtgcaaatcgaactcagaaaattcgattgcccatttcaccacccgtcctgtaccctctcgattatgcaagatttgaccgagggggtaagacgtaactactgtgacccgatgcgcctggaaataatggcgcagtttcctcgaggccatcagaatagcgtaaagcatcttctgggcctgagggtatcgggttttggcgtcccggagggcctcactaacaaagtagacgggccgctgcacctttcggtggggccgatcctcttcgctaggggccgcatccctggggcactcttcgtccaagcagcctcgcggggcgcacttatcttctgtgctgatgacctcggggtcggaggataacaggggcggccttcccacagtggcttcggggccgtcctgggggtcgggggctcctggcgtcgtcgaaaaagcgggcaaagggccaactccggtcgtcaggggccttaggcctccgttcggctcgggggcctcttctccctgctctttcccgggtcgggtcagcacagggttagcctcggggtcgaagggcgataggtgcggccttcccacagtggcctcagggccttcctgggggtcgggggctcctagcaccgtctgacaagcgggcagagggccaactccggtcgtcgggggccttgggccaccgttcggctcgggagcctctcctccctgctctctcccgggccaagtcggcacagggtggggaagcgtgaaatgagaattgttctcatcgcgctccacaaccaatgccgcactaactacttgcggggtcgccgctaagtagagtaacaagggctcgtctggctccggggcgaccagaactgggggagagcttagatacgccttcaactgggtgagggcattttcggcttcctccgtccaggtaaacagtccggagcgtttgagaagcttaaataagggtaacgccttctctcccagcctcgatatgaaccgacttagggcggccatgcaaccggtgacgcattgcacatccctaagtttgctgggggggcgcatccgctctatagcccgtatcttctcagggttggcctcaatgcctcgggcagagaccaagaaccctagaagcttgcccgcaggtacaccgaacacacacttatcggggtttagttttatgcgggcggagcggagactctcaaaagtttccgctagatctgagagtaacatttcctagttgcacgtctttacaaccaagtcatcgacataagcctcaacattacgtcctaattggttacccaaagaaattcgagtagtacgttgaaaagtaggacctgcattctttaacccgaagggcattgtcgtataacaataggttcctatgggggtaatgaacgtagtcttttcctcatcctccctagccatgcgaatctgatggtaaccagagtatgcatctagaaaacacaaaaggtcgcaccccgcagtggaatcgacaatctgatctatgcgaggcagggggtaaggatccttaggacatgccttgttaaggtcggtgtagtcgatgcacatccgaagcttgccgttcgccttgggaacgaccaccgggttcgccagccactccggatggatgacctcacggatgaatccggcttccagaagtcgcgccacctcctcgcggatgaaggcttgacgtttcggggcctgccgccgcactttctgccggaccggccttgcgcccggccgcacggcgagacggtgctcaatcacctccctggggaccccgggcatatccgccggtctccatgcgaagacgtcagcgtttgcccgcaggaaggagacgagcgcgtcttcctatttgccgtccagaagaccaccgatccgtgtggtcttggacgggccgtcgcccagggcaacctccttgaccgggacctcgtcgcctgtgatcatccgttgcctcggggtggcgggggcggaagcgccaagcctctcgtcgccaccctcgggcttggatgcagcgacgaggtggtccgcgcgctgctccagacaagcgagcgcgactttgaggtcgccatggacagagatggggccaccggggcccggcatcttcatctgtaggtaggcgtagtggaccgccgccatgaacttcaccaacgcgggcctccccaggaccgcgttgtagggcagactgaggtccgccacatcgaagttcacccgctccgtgcggaagttggcggatccaccgaaggtgaccggtaggtcgatgtgacctaacggccacgtgtgccccggcgtcacaccgataattggctgggacggccggagcaccatccccggggccttgatggcgtcaaaggccgcaggggaaaggatgttgagggccgctcccccatcaatgaggacacgccccaacttcacgttgcaaacggtgggagaaaccaccatcgcaatctgccctccccgggcaacgcacggtgggtggtcggtctggtcgaaggtgagggcaacctccgaccaccgcgcccgacacgtcgcctcatgagtaggggccgcggccagaagctctcgcttcatggccttgaagctccggcgagaaacgtgagcacacgctcccccatcgacggtggcaatggtggccccaggctcttggaaacctaggtcatcatcgccgtcatcgatgtcctcggcgggggccttctgcttggcctcacttcgccgattaccggaaggaaccgccggggatttgccctctcggcgctcctgcctcctcttctcctcccacttcctcgtccgctcagccaaacttttgactgcacggcagtccgcgaggtcgtgaagggaagtgttgtggacggtgcaccacttgccggttgggcgctccctgttgggagcgccggcctcgttctttttgcctcccgcaggcctcccctttcgggtggcccgcgaagcgccctcgacggcgaggacatgaccctcgtcgtcggtatgggctgacctcttcttcctcctcctgtcacgccgccctatctgagcggcggatccgggggcggccgaagctgccacaccggaaccggaggggttccaggtccatgcctcctccttacgagccactcggtccgcgagctgaaaaagctctgcggtagtctggggctccttggaggcgatcttttcaagcatgcggttgtgccgcacaccccccctgaacgcgtaaatcaccgcgtgcgcagggatgcatggtatggtgttgcggacttggacagaaccgctgaatgtacgagcgaagtgactcatcatcccttcgctgtactgcgtgcaagtccgcttcctcacctgggcgcggatatgtgccttggaagttcatggtgaactgttggcacaaatcctcccaagagtggacagacgcgggtggcaagttcattagccaaccccgcgcttgtcctttcagggccatgggaaagaaattcgccatgaccctgtcgtcacccccggcggcctcgatcccggtcgtgtagacctggagaaactcggcggggttgacgctcccgtcatatttttcggcgatggtgggccggaaccttgggggccaacggacattccgaaggctcgccacaaaggctctacagccgacaccaccaaccgggggcacggagggctgatccccgcgtccgtggtgaggtgacactccggacgaggaggcgccctccgttgcgtggggagcacgtcggccattacgccgacgctcgatactgatgcgagcatccggttccctacgcagatcttcccgggtcggaggcgttcacgaaggagtggcggccgaatggcgaacagcggctgccgctcgccgcgccctccatcttgacgatgcggagccgatggtagcagcaccagaggccttggtggcggaggaccgcccaccagcatctaggcgctgccgtgcagtcatgaccaatttggccacatcgtccagccaacgttgggctggagactccgggtcatgggcgacgggcgggtgacgtaggagcgcgccctggggcgtgctgccgtcgccgtagacgaggaggcgatgctccccatctcgccgcccttctccacctcctgtgggtgtcgaagtcgcggatccttcggccctctcgagcgccttctcccacctaggactttggcgtggagggggcagtggagtacgagctcgacggcgtgggtttggctccccgtcgtcaccgctcatactcggggagaggtcgtgcgcctttgctggctcggccattgggctgaacaggaaaagcttggcgcacacgaaagagtgcgagagctcagaaaatccctcgcagagccccctacctggcgcgccagatgacggagcgtggggctcctcaccgggagaccgcgcaggcccccctttgccggttcggccggggactcagggagagattctaagctctctgtatgtggaaggctcgcaagacaggaaacacacaagacacgggcgatgtatacaggttcgggccgctgagaagcgtaataccctactcctgtgttttgggagatctgtgtatgaaggagctacaaagtatcagccagcctctcccttgttctgggtttctaatctggaaaagtccagtcccccctctcagtgggcaaggtcctccttttatatcttaaggggataccacatgcaccatttctctcttttttgtggggacttaccccccccccttttcataaatggacggagatttgtatagttgccgtccgagtcaccttctgatgagacggcccacaactacctccactttcgccgggagcaggtgcgacgtggaatcgtggctgtctgctgacgacatgaccggtatcagaccagtcacgtcggtcattcttgtccaccacgtgtcagcttagcaatctacatgctcgcccttcttcacacaacatcttgcctgtaatggtttggatgaagcctggcatatatctgaccaggactaacgtgccatctctgggaggtaacacgctagctccagctggggacgagcgcctagaagccctcgtcctgacgggatggggcgaggcgtgcgtcagatcgcctgtcgccacctaacccgcgatctgaccggtctgtgactggtcacagaccggataaacgagtgcactgcactgcgttacatgcggcgtgacacgctcagccaaaccgcaataaatgtgttaggtgagccccactgtgctcacctaacccatacacgcggagcaaaaacccacgaggggtcggggcgcctcggccctcggggccgaggggggtgcggcccgaccccctcggggggactaagaggagggcgaatgcatcaccctcgggcccgacgtccctcgggggtaccaggccacgtgtgcgattgtgtctgcctcaaacctctagtcatgatactcctgatcccatgtcaccgacagcttatatcccgacgctccttgagccaaatcattagcctctatattctgttctcgagatatgtgcttcaaagtcaccagccgaaattcacttatcaacgttcggcacttttcgtaataaaccatcaatgtatcatccttgcattcatactctcctgtcaattgactaatcaccaacaacgaatcacccatgatttcaatagcatcggctgcaacttcctgaagcaactgtaacccttttaacactgcctcatactcagcctgattattagtcacacggtgtttaatagcataggcaaattcaaaacttgcccccaaggcgcaattataaccaagccgataccataaccatgactgcatacagattcatcaaagaataatacccaaggcataatgtcaaccaagccgattgaatcatcacgatgacccacaataaaatcggctacagcctgtcccttaatcgcctttggtgattcatgccgaagatcaaactccattaaagaaaatatccacttgccaactctccattttaaaatcggagccgatagcatgtacttaatcacatcggctttacacaccacagtgcactcattggacaacaagtaatgcctcaacttagtacaagagaaatataaacacaaacacaatttctccacaggagaataccttgtttctgcatccaagagccgacggcttaaataaaacacaaccctctcttttccttcaagctcctgaatcaagaccgagccgattgacttatcaccggccgacaaatataatcggaaaggaatccctttttatggagggatcaatactggaggagaacttaaatattctttaatattatccaaagctttctgttgttctgccccctaagtgaattgctgatcggctctcaatcttaacaatggtgtaaaaggttccagttttccagacaaattagaaataaaccttcgaacaaaattaattttgccgatcatctcctgcaactctgtcttgtttcccggaggcttaatctttttgatcgcattgatactcctctgaggtatttcaatccccctttcatgaacaagaaatcccaagaactggccagccgatacaccaaaagcacattttgtcggattcatcttcaaaccatatttcctagtcctctcgaaaacctttctcaaatcggctatgtggtcctctatttctttggatttaacaaccacatcatcaatattgacctcaaccaaccatccgatcagatcatgatatatataattcatagccctctggtacgtagctccagcgctctttgagccgaaagtcattacaacccattcaaacaagccgattgcaccaggatatctgaaggccgtcttatggatatcttcttcggccataaagatttgattatatcccgcgttcccatccataaaacttagtatcttatgtcctgaagcagcatcaaccaactgatcggccattggcatcggatattcatccttcagggtagctttattcaaatccctgaaatcaatgcaaaccctcaccttaccatttttcttgataacaggaactacactagaaaccctttcagcatatcggcaaggacgaataaaaccagcatcatacaaacgtttgatttcagccttgacaggttcaagcatatcggctttgcatcttgtcacgaccgaaaaaacccaacgggcgttccttacgtgcgtgtattattccttgtcccaggaggcaaggtacaccaaaagttgatacaatacagagtttaacaagcggaagcgtaaataattaatttattacatgggcggcgaaggcccagcacacatgaagacaaacgaaaaacagcggaagactagggtgacgaccacaggcgcttgacggcaggtacgagctagacaccaaagccttcatcttccaggaactcctcttctgggtttgggaaaaattgagcaagactgagtacaaccaccgtactcaacaagacacacccacaagtgcagaataaatgcaagggagtacaagggagtcataatatagggggttagggtttgcagtaaacagcattaaaaggcacttagttgctcaagctattttgtaaatacgatcctagagctatacaatattattaatcaaggccgtgaacccacacgaacctgtcttaacccaaggcctacgatgattcagaccgaactggcaacccgaccctgggtcccagctcgtcccaagccaacccaggccaaccattccacattttagttgttaagcaagttttaagaatttaaaacactaacttgggtacattgctcggcttgcccataactgagggcgcggctattcgaatagattatactctgatcagaggtgtacatctttacccacaagacatgtcttcctcacgtgtaaccacgtgccacataccaccacggcatacggacggaagacatgacatagtttccaacccatcctagccatagacaagagtaccgacccaaccccacctacggccggaacctccgggacaggtaggcaggactgagcccctagcagcaggacaccagccctgtgccatgacatatcgactaccgggccgcagctcgtgtagccttcattttccctagagatgtccatcgacccccgacttcgtccatctccatccgtgtacttttgtttataaccagactgagccacaaactaagccttacccactagacatgtggaagtacggtagtgctttgcaacagaggcccgaagaccggtccttatatggccgaggtgctactatcaaaaccatgcaccccgagcccagcataaaaccattttgagggttttgaatagagggggaggtgtgaatccaattccacaataatccaatcattccatagtgtccaggtgatatgaatattcccaaagtctagagttgtaaaaccacctaatgttgcctaattaaccagcgaagcatctacgtaagttcacactagagtacccactagttggggttttgtttattctagggtgaacaaggtaataataacaataacaataataataaggtcataacaaaggtaaataggcatggctaaataaaacaatgataacgcgggaatttaagtaaagcggtaatgcaataatttaaatcaaaataattttataaactgggattcaatatgttcaaggatgatgtgacttgccttgctcgctttcccaaacgtcagcttcaacctccacgtagagcggatcttccgaagctccagcgtctacacgaccaacggaaaggaaaaaggcttttactctaaaaaactccatataacaagcaggaacaaaacacaaaaatgggttcttgacttcttaaggaaaaattagagacttgaacggtccaattccgagttcaaatggccaagttatgaacatttgaagtttatatgctctttaagtgaatatttgcgaatttcatcatttaaattttaatttaaaaaggatttattgcttcagccaaggggagggggcgcgcggaccgggtccacgggagtggggcccacgcggcagcctcacggtccacggtggaccgggcgcacccgggctcacaccggccggcgccgtgggtcccacgcgtcagccgggccccacgcggcggccattcgacgcgcccgaaggcggccacgacggcgcagccggccggaggcggcgcccgctcccctatggtcgccggcggcggccataggcacggcggagcggcggccgagagaggggaagggaagggggaaaagaggcggcggtccacggctcaccctaggtcgacggcgacgacgaaaagggcggccggagcggaggaaggcggcggcgcggcttaggtcgatagggtcggcggcgttccggcggtcggcgagctcggcgagggggtggacggggtcgacggcggtgcggcgaagccggaggaggcgatgccggggcgggagactgtcccggcgagtggagaaggccggccggaggtcgtcggcgatggaggagagagagggcgacggcgcgagctcgattccggcggggagacggtgcggcaaggggcggaaacgggcgagggaggcgcggggagggtttaaatagggttggaagttggagaggaaggaaaccggccgggaggtccggccgccatcaatggcgccggcgagatttgcgggagcaaatccgcccgtttgaatgcgagagagagagggaaaaatggggggacagggggaggggatcacggggaatatttccccccacttaattgcacgcggggacagcgggatgcggcggattcggcggcggcggcggcgcttggcgcgggcggggaggcgggagcggcaggaggacgaggatgacaggtgggccccacccgtcagcgagggtggcgggcgggcccgcccgtcagcggcgcgcgcgcggggagaggccgagtgggccgcggggagaggagagagagggggagggagatgggccgagccggcccattagagggaaggggacttttttgggtttttctttttataaaacctttttaactttgtttatttcttaacaattattatttgtgctctgaaaattccactaaaatttatttatacattttaggcttttaggaaatatacaaaaatcctctaagccttatttgacttttactttgcacattttaatttttggaggctttcacacggattttaattattctaggcataatttaaaggatatattttagggtcgttttgggacgtgacacatcttctcggaggctgctggtgtggtctaatccctggttttaaaggtaatcgatgctcgacgatcgatcggctgagtcctggcatctcataatactcccaagcaaagcaatctctaaactctttcaaaagttccatcagcttggttctaaattctgaagacaaattcttactaatgaatgtcagccttggtcgatcacccggacctatatccacttcttctaaatcatcggctgacataaaaccctgaccttgcttgtcatcgagatcatctaccgtgtccttggcgtagacgcttgaaccctccacgacgccctcaaaataataacttgggttcttcatcttcaatcggttgtatatcagaatcggacacttttagaaaatctccaacccaaatcttcccggataaacaatcaaggtcatccatctcccaaagagctagatcggcactggcaacattaactgacttgtcggctggcacaatctcaaccttgtcgccttgccattgaatcaagcattggtgcatggtcgaaggaatgcaacaattggcatgaatccaatcacttccgagcaacaagctgtaagaacctttcccatcgatgacaaaaaatgtggtagggatagttttactgccgactgtcaattctacattcagaacaccctttgtttccgatgggttgtcaccaaagtatttaagcaccatgttcgtcttgatgagatcctcagtagttctagctaactttctgaacgtagtataaggcatcaaattcaccgcagccccatcatcgaccatcatattagacatcggcttcccattgacatagccatttatatacaatggtttaagatgccgattttctgtcccctcaggcttttcaaagactgctcgttctggtgatagaaccaacttagccgatccctcttctaattcgtcaacatcggcctggtcaatcccaaattcggctggcaaagtaaagaccatgttaattggcgccgtcacaacacttttcccatttgccaacctctttgcttcgtcggctgcaatatcatcggctccaagatcttgattcttaacacaccactccttccttggctttgcttttctcagccgatgaccaatttcttgctcgacctcctggaagcgctccctactcctcaacctttgaacccttcttttctgattctttgtaaaaaataccagaaggataccactgggtctttgcgttctcgtcttcctccaagtaatcgtcttgatttaccgggcccaacctttgatgaacaggaattctcgcctgcttcagccgattgcctctattgtacgatcagcttgaactctctgtaatatcactgcacccaggacagtcttcaatagatggtagcctcataccttcgttccagcagaaccgaaagaactcacaactccaatgaggatcgaaaccatcattatcttcttcataatgcctctcttgttgtttgccgtatttcttctgatacttatttataattttagccgaattcacgcgaaaacctctcgctcgtcccacatcagctgtccgaccaacggtatgcaccatgttaacggggaaaggattaccatcaaccttcatcggctttttggaatcatcaaacttaatcttccctccttcaatggccacttgaatctgctgtctaaaaaccttgcaatcattagtagaatgagatccagaattatgccatttgcaatacctccttttgcctagttccttggccgatggaattacatgaccagcggggagttgaatttgcttctcccggagtagcagatcaaaaatcttgtcagctttggtaatatcaaaatcatatttctcctcttttccagaattctttacccactgacaaggtataacctttttactccttacccattcggctgcagctatttcggagtcatcgtcgtcatcatccgatccatacacgtaagggcagacatgattaaccctcttagagcttctcctggcctctgcaaacctttgttcatgcaatgttaccttctgcacgagatgcgacaggctatcaaaatcttcagatgagaatttctccctaatcagaggaatcatgccttgaaaagccaaatcggctaactgggcatcagtcaaacttaagctaaagcacttgttcctcatctccctgaacctctgaatatactcatgaacaggttcatcatgcctttgcttaattgccgtcaagtcggataatttcatctcatgaactccactgtagaaatagctatgaaactgcttctccaaatcggcccaactattgactgatccatacggcaaagaagaaaaccatgtaaaagccaatccagacaaggacaactgaaataatctaactctgagagcgtctacagccgatgcttcgccgcactgagctaaaaatcggctaatgtgtttataagttgacacaccatcttgtcccgaaaatttggagaagtctgggattttaaatcggttgggaagagggactttctcaaaccactcagggtaaggttgccgatacaattttccagtatctctcggcttaagcccaaattgttctctcattacatcggcaattacatcggcccatggtcgttgttgagctactccttgcgactgttgctgtattggttcaaactgattatattgagaagcaaactgaggttgggttagccctccctgctgatactgaacttgaggggaaggaggctgatattgataatttatattgcccccttggcaattctggtaatttggctgaatactttacaccaaatgttccggcatactttgcaccaaatgctccggcataatctgaggcatcaccgtaccatctggctgtatatggtgaaccaaatgttctggaacaacctgattcaggacgtgcccagccgattgcccagccgattgattcatcaaagcctgctgcagaatcggctgtacagtttgttgttctggaggtgttggctgaactggctgcacaacctgctgccttggtggagtctgttgaatcggctgcacaacctgttgccttggcggcgcctgctgaatcgaattgacagtagattggaggggtagaaacatagcagtcacctgatcctgtgttggccgatttaccgtctgcccgctatgctgtggctgctccctcatcaatagccgaggattattcggctggcctagtgtcgacgctgatggagcaggcaaagaagtcaatggcggtgccatcggctgagccgatggtgcactcggaagaactgcttgagtaggcggctgaacatcagtgatcagaggttgataattcgggaaaacacctccctgcaagtagaccgggcctgcagcttgatgctcgactattgatccatcggctatcgtcttcatcatgttagacaaggtgttgactaacactctagattgattgatcagagcattgtgtacggcgtagtccactcgatcttggaaattgttgaaaaaatcttgtgttgtctcaccattctgattaagatttcctctttgtggctcatgagcaccatcaccttgaactgcatgtaccccctgagagccgtcaccctgattctcttgagctgagccatctaaaactcttttttcttctctctccttagaggtactggtctcaggctcatcgggaaccacctttaccttgtacttttgaacaatgttgccttgcgagtctgtgtgaatgacttgaagaactgttctcttgttgcatcattgcttcgaaatccttcttctggtcaggtgtgagcttttccggatcaatagccacaatattcccttcattaacttcgctcaaacctagtatttggattttctctttaacagtacctgggctagccgaggatggcgacggtggcagcttctcggccatgaggaagattaatttctgactcctaatgggtcccaccgggcgtgccaaaagtgtgttgacagaaaacacgaggcctgggagatctgcttaactccagtgcaggtccaaagctcgccttcagatgtatgagcgtgccagttgatttgatcctgcaatcaacaagagatagaacaaagaaaccgcaattaatcctataaatgatagccgatcgactagatgccgatgacatatcatttatttcaagccgatgtcatgcgtacatcgatcgg

SEQ ID NO: 8315 - DNA, 6470 bp, Oryza sativa
aaacagtggagaaaagttccaggaagttggaggatattcctatagtacaagagtatcctgaggtgttcccagaagacctcactacaatgccaccgaagagagaaatcgagttccggatcgatttggcacccgggactgctccaatttacaagaggccgtacagaatggcagctaatgagctagcagaggtcaagaagcaggttgacgaacagctgcagaaagggtacatccgaccgagtacttcaccttggggtgctccggttatctttgtggagaagaaagacaagaccaagaggatgtgcgtggattatcgcgcccttaatgaggtcacaatcaagaacaaatatccgttgccaagaattgatgacctgtttgatcagctaaaaggagctaaggtgttttccaagatagacctacgatcaggctatcatcagttgagaattcgggaagaggatattcccaagacagccttcaccactcggtatgggttgtttgagtgcacggttatgtcctttggactcaccaatgcaccggctttcttcatgaacttgatgaacaaagtgtttatggagtttcttgacaagtttgtcgtggtattcattgacgacatacttatttattcaaaatcagaagaggaacatgagcaacatcttcgtctggtacttgagaaattgaaggagcaccagttatatgccaagtttagcaagtgtgacttctggttatcggaggtcaaatttctgggtcacgtcatttctgctcaaggcgtggtagtggacccatcaaatgtggaatcagttacaaagtggaccccaccaaagacagtttctcagatccggagttttcttggacttgcgggctattaccgtcggttcatcgaaaatttctctaagattgccaggcccatgacacagttgctaaagaaagatgaaaaattcaaatggtcagctgagtgcaaccaaagttttgaagaactcaagaagaagttagtctctgcaccagttctaattctgccagatcagacaaaagacttccaggtctactgtgatgcatctcgccaaggattgggatgtgtgttgatgcaagaaggcagagtggttgcatatgcttcgcgacagttgcgtccacatgaggccaattatcccactcatgaccttgagttggcagcagtggttcatgctctgaaaatctggcggcactatcttattggcaaccgctgtgaagtttacactgatcataagagcctgaagtacatcttcacccagcccgacttaaatctccggcaacgaagatggctggagctgattaaagattatgacatggggatacactatcatccaggcaaagcaaatgtggtagcagatgctctgagcagaaagagctattgcaatgcagtatgtaccgaaggcatgtgtgacaaattgcagcaagatcttgagcacctaaatttgggcatcgtagaacacgggtacgtagctgccctagaggcccggcctacgtgtcacgtcctgataaattcatcccgaaataaaaatcattctctaaaaggaataatagaattaattaaaattcgaaaagaaattagcaaacactaaaatacgtacaagaaaaattcaaatgtagcccggagaatttttgttaaattctccttggtctaaaaagagccctcaaattttagtggaattttcagagcacaaataataattgagaagaaataaacaaagttgaaaaggtttataaaaagaaaaatctctaaaagtcttcttttccccccccttcctctcttgggccggctcggcccaactctccctccctctctctcctctccccgcggcccatcggcctcctccccgcgcgcgcgccgctgacaggcgggcccgcccgccgccctcgctgacgggtggggcccacctgtcatcgccttcctcccgccgctcccgccgctcgcccgtgccctagcgccgccgccgccacggattccgccgcatcccgccgtccccgcgcgacataatgaggggggaatcattccccgcgatcccctctcccgtttccccctcttttccctctctctctccctcggattcgtccgatttgaattccgcaatcgtcgccggcgtcttcaatggagccgagatctccgcgcccgtttcctccctctccggccgcgctctccccctctcggcgctatatatttgctccccgtgcctccctcctccgtttccgccgttcgccgcttgctctcgccgtcggattcgtgctcgcgacgtccacctctctctccgccgtcgccgccgacctccggtacgccgccgacgtcgctccgggctccctcccgactcggcgtcacctccgtcggcttcgccgcgtcgtcgtcgaccccgtccgctccttcgtttcgcccgccgaccgccggagcaccgtcgccctcgtcatcccgaaccgcgccgccgcgttcctccgctccgttcgtcgtctccgccgtcctcgtgtctcggggtgagccgtggaccgtccctttcgcttccctctcctctccgctctctcgggcgccgctccgccgcgccggtggtcgccggcggtgaccatcggggcgcggtcgtgccgcctcccgtcggccgtgccggcgaggccgccttcgggcgcgccctcgcggctgccaagtgggcccggccgtcagccgcccgcgcccgcgggtgcggctgacgcgtgggacccacggcgccgaccgccgccagccgcgtgctcccggtccaccgtggaccgagaggctgacgcgtgggccccactcccgtggacccggtccgcgcgccctctccctcggctgacgcaataaacccggtttttaattgaaatttaaatgaagaaattcgtaaatatccatttaaagagcatataaacttcaaatggccatatcttggccatttgaactcggaattggaccgttcaagtctctaatttttccttaagaagtcaagaacccatttttgtgctttgttcctgcctgttgtatggagtttattagagtaaaagccttttcttttccgttggtcgtgtagacgctgcagcttcggaagatccgctcttcgtggaagttgaagccggcgtttgggaaagcgagcaaggcaagtcacatcatccttgagcatattgaatcccagtttataaaattattttgatttaaattattgcattatcgctttgtttaaattcccgcgttatcactgttttatttagccatgcctatttacctttgttatgacattattattgctattgttattattaccttgttcaccctagaataaacaaaaccccaactagtgggtactctattcatggttccactagtataaatttaggtggatgctttgctgaataattaggcaacattaggtggtttcataactttagactttgggaattctcatatcatttggacactatggaattgttggattatggtggaattggacatacacctctctttctctttcaaaacccctaaaacctgttttcggtggggtttgggtgcatgccagttatgggaagtagcaccccggccactataaggattaagctcgggcctctgttgcaaagcactaccgtactaaccacatgtctaatgggtaaggcttaactcggtgctcagtctagtcctgaacaaaaggacacggatagagatggatgaagtcgttgcgacgatggatatctctgaggcaaatgaaggctacgcgagctgcggctcggtagtcgagatgtctaggcaaatgaagactacacgggtcggtgcccgttagtcgagatgccatggcactggactagtacgcgggtggtctcacccctatgtgtgtggcgcacccggtctagatcttgttgctaggggctcaaccctggcctgcctgtcccgggataccggccgtaggcagggttgggtcggtacttttgttcacggctaggatgggtgaagggttatgtcacatctttacgacgggttccaaggccatggaatgcggagtaaagatgtgtcttgtgggtaaagatgtacacctctgatcagagtaaatctattcgaatagccgagccctcggatatgggcaagcctagcaatgtacccaagtcagtgttttaattcttaaaatttgctcaacaactaaaatatggaatggttggcctgggttggcttgggacgagctggaacccaggtcgggttgccagttcggtccgaatcatcgtaggccttgggttaaggcaggttcgtgaggggtcacggccttgtttaataatactgtgtagctctaggatcgtctttacaaaatggctttgggcaactaagtgacttttaaatgctgtttactgcaaaacctaacccctattattatccccttgtacccccccttgcattaatcatgcatccccggcgtggcttgctgagtactgtggttgtactcattcttgctcaatctttcccctcttcagtaagagaagctttggagaagatgtcttaggtggagtcctggcttataccccagttgagcgcctgtgaagatggagccgtaggcccgctagtccgctgctgtttatttttgattgtcaggcctgaagcgcctttgtaataatgtaaatattatcgatataataaagatgtgtcttttatatcatgtttgtgtggtgtaccccggcttttcctgggacggggattaatacactagcgttcgggaaaaggcaattttcccggtcgcgacactacgctcgtggatcaagtcagagcagctcaagtaaatgatcctgaaatagctgagctgaaaaagaatatgagggttggaaaagctcgagatttccatgaggatgagaatggcacaatctggttgggagaaagattgtgtgtgcctgacgacaaagaactgaaggatctcatactcacagaagctcatcaaactcagtattcaattcatcccggcagtactaaaatgtaccaggacctcaaagagaaattctggtgggtcagcatgagaagagagatagccgaattcgtcgcactctgcgatgtttgtcagcaagtcaaagcagaacatcagaggcccgcaggactgctacaaccccttcagatcccggaatggaaatgggaagaaatcggaatggatttcataacaggtttgcccagaacatcgtcggggcacgattcaatctgggtggtcgtggatcgactcaccaaagttgctcattttattccagtacacactacctatactgggaaaaggttggcagagctttatctttcaagaatcatgtgtttgcatggggtacctaagaagattgtatctgatcgaggaagccaattcacttcaaaattctggcagaaactgcaagaagaattggggactcgtttgaatttcagcacggcttatcatccgcaaacagatggtcagaccgagcgagtaaatcaaatcttggaagatatgttgagagcctgtgcgcttgactttggcggagcctgggataaaagtctgtcttatgcggaattctcttacaacaacagttatcaggccagtttgcaaatggcaccgtttgaagcattgtatggccggaagtgtcgtacgccactcttctgggatcaaacaggtgagcgccaactgtttgggacagaagtgttaactgaagcagaggagaaagttaggaccgtcagggaaagactgcgaatcgcccagtctcggcaaaagagttatgctgataaccgccgaagagagcttacttttgaagcaggggattatgtgtaccttcgtgtcactccgcttcggggagtacaccgcttccaaaccaaaggcaagttggcaccacgctttgtgggaccatacaggatcttggaacgcagaggtgaagtcgcttaccagctagagctcccatctaatatggttggtatccacgatgtgtttcatgtatctcaattgaagaagtgtttgagggtacctgaggaacaagctagctcagagcacattgacatccaagaagatttgacctacgtggagaagccagttcgtatccttgagaccagtgagagaaggaccagaagcaaggtgatcaggttttgcaaagttcaatggagccaccactcagaggaagaggccacctgggaaagagaagatgaattgaaggccgcccatccgcacctcttcgccagctcttccgaatctcggggtcgagattccgtttaaggggggtaggtttgtcacgccctgaagtacccctcccttgctctaaattcataaaataaatcgtccgaagaaattgtttaatttaacctagagagaaaccctaaagtaataaatgcaaataataatcggaatcggcatgtggaatttttcttggattctgcatgtcaaaatacgctaacaggatttttagtggaattttcagagccttggaaataattttaaccaattaaaataagcaaagtgcaatattaaatccctggaaaa

SEQ ID NO: 8316 - DNA, 10717 bp, Oryza sativa
ccccacggccttgataaataatattgtttagttctagaatcgtgtttacaaaatagccctgagcaactaaatatctttaaatgctgtttactgcaaccataacccctttatggtataactcctttgtactcccttgcatttattctgcatttgtgggtgtgtcttgttgagtacggtggttgtactcagtcttgctcaatttttcccaaccccagaagaggaattccaggaggatgaaggcttcggtgtctagctcgtgcctgccatcaagcgcctgtggtcgtcgccctagtcttccgctatttctcgtttgtctctgtgtgtgctgggccttcgttgcccatgtaataagttatctaattacgcttccgcttgttaaactctgaattgtatcaacttttggtgtaccttgcctcctgggacaaggattaatgcacgcacgtaaggaatgcccgttgggttatttccggtcgtgacaagttggtatcagagcccctttgaccctaggacgagccgtagatcccaagccttagcaatattttcaaaaataaaatcccttcttatttgtgaaaatcctctagtctctctctgtcttgctgcttcatttatcgccaaaatctgacctttaaaatgttgcttttctttttgtttttgtttgtagatggccggcagcgtcacccgtcgtggtttggacatgactggtttcgtcttggagctgcggggtatgtgcgtggccctagggtatccacacggagtggactaccaggccaggccgcttccggagcaggagggtgatgatgcagagccccacgctgcttgggaggtcactgcagtgatcctcgctggctctcccgagcggtcttcgctgacagtcaccgcgggtggagactccttccccgccgcttgccagagcgccgctctcctcgccatcagcactcttcaccagcgctacccggacgagttgcagcactcgccctaccgctaccaccctcgtcgcggaggagcccgcgaccacgccaccttccgggatgctagctcggaggatgacgctaccatcgtgcacctggcgcgcatggtggaggcgtacgacgcggcttgtatcgacttccatcagatggtgcgccgtgggatggtcgagaacaacctgaagatcctggagctgcgtcaagagaacctgcagctcaagaaggacctagacgcagtggaggcgcagctgcatcagctcaagatcgcccagggagagatctgccgccccaagcgtcgccgcgtctgccgcagcctgaagatcaccgcccgcaagagcacctccaggcccgagcttgttcgtcagtccctggcgtggacttgcttcgtcgagacccctcttgccgagcccgcgcccgtggttccccaggagggggaagcctccggcgttggtagcacggaggatgcgcagttgctcaccttccgtcctggcccgtcgcagcagtagacgagcagttagtaggcttgcgcgtgtgttctttctcgtttgtcttgttgttgggttgtgtggggcacggttatgccggtgtgtggtgtaactgtgtcggagcctgtctttattttattcgcctaagcaacttgaactttaatgaacccatttaatagcagtaataaattcaagaattatggtagtcgtgggtggttagctttaattgtcagctctctctgtttgctggttctgtgtggggttttcagatggtgatgaccaggagaagtgctaacaccggtgatggcaaccaacctgaaggcagcaaccacaaccatcagggcaacccacctccacctcctcctccacctccaccaccaccaccagacaccaacgccattctcacccaaatcctcgcccagcaggccaacatgatgactgctttcctccaccacctccaaaatccgccacaacttaatgctccaccaccacccccacaacactctaaactcgccgagtttctccgcatccgcccacctaccttctctagctccaacaaccccgtggatgcgttggattggttgcatgccgtggggaaaaagctagacactgtgcagtgcagcgatgaggagaaagtcatcttcgccgcccaccagctgcagggacccgcatctctatggtgggaccatttccaggctacgcagccagagggacagcctattacatgggctcgcttcaccgccgctttccgaagaacccatgtgcccgccggagtcgtggcccttaagaaaagggaattccgagagttgaagcaaggcgaccgctccgtgatggagtatttgcacgagttcaacaacctggcccgttacgctccggaggatgtgcgggaagatgaggagaagcaagagaagttcctggcaggaatggaccctgagctgtccgtccgtctagtctccggggattatccggatttccaacgtctggtggacaagagcatccgcttggaagccaagcacaaggaactggagtcgcacaagcgccgcttggcgaatttccgcaaccaacagggtgctaaccaaagggtccgctacaccaatccctatccagggggatcctcctcgcagcagcaacaacagcagcagcaacctcgctccgcgcctcgacctcaattcgtggtgcgcgtcccacagccgcagcagcagcagaatcaacaagggactcgtgcgccccgtcctcctccaccgactgtgcagcctggtcaaggccgcagggacgctcaaggtccgcagcgtctgtgcttcaactgcttcgagcccgggcactttgcggataaatgcccgaagccaaggcgtcagcaaggccaagcgcctccccgccccaacaacggtggtaaggacgtcattcggggtcgtgtgaaccatgtgacggccgaggacgtgctgacaactccagacgtcatcgttggtacgttccttattcattccatccctgctaccattttgttcgactctggagcttcccactcgtttatatctgtgccattcgtggggagaaatcagttgggggtagaaaggcttagaaaccctctgctcatcaccacccctggaggggttatgacagcaaagtattatagccctgccgtccctatagaaattcaggggattccttttccctcggatctgattctgctagacaccaagaacttggatgtgatccttgggatgaattggttggctcaattccaaggagtagtggattgcgcgagacgcactgtcactctgtaccgagggccggaacaaccggttgttttctttgcacccccaacctcagtcagaagttcagaacttcatcagatagaactgtcagaaattcccatcgtcagagagttcggagacgtgtttccggaagaactacctggtatgccgcctaagcgagagattgagttccggatagatcttgctccaggaaccgctcctctgtacaagcgaccctaccgtatggcagcaaatgaactggccgaagttaagaaacagttggaagagctgaaagaaaaggggtatatacgtccgagtacttccccctggggtgctcctgtgatttttgtggagaagaaagacaagacgaagaggatgtgcgttgactacagagctctcaatgaagttaccatcaaaaacaagtaccctcttccccggatcgatgatctgttcgatcagcttaaaggtgccactgtattctccaagattgatcttcgttccggatatcaccaattacgtattcgcgaagaagatattccgaagaccgcattcaccacgcgatacggactgtatgaattcacggtgatgtcgttcggtttaaccaatgctcctgccttcttcatgaacttaatgaacaaagtgttcatggaatacttggataagtttgtggtggttttcattgatgacattctgatatactcacaatcagaggaagaccatcagcaccatctccgtctggtattgggaaagctgcgggaacatcaattgtatgccaaacttagcaagtgtgagttctggttgtccgaagtcaaattcttagggcacgtgatatctgctaaaggagttgctgtggaccccgaaacagtgaccgccgtcaccgattggaagcaacccaagacagtcactcaagttcgcagtttattaggtttggcaggatactaccggagattcatcgagaacttctccaaaatcgctcgacccatgacacaattgttgaagaaagaagagaaatttgtgtggagcccgcaatgcgagaaggcgttccaaactctcaaagaaaagctggtttcctcgccggtgttaatcttgccggatactcacaaggacttcatggtgtattgtgatgcttcgcgccaaggattggggtgcgtgctcatgcaggatggtcatgtggtggcctatgcctcacgccagctacggcctcatgaaggcaactaccctacccatgatttggagttagccgcggtggttcatgctctaaaaatctggcggcactatctcattgggaatcgctgtgaaatatatactgatcataagagtttgaaatacatcttcactcagtcggacctgaatcttcgacaaaggagatggttagaactcatcaaggattatgatgtgggaattcactatcatcctggtaaggccaacgtggttgccgacgctctaagtcgaaaaagccattgcaacactcttaacgtccgtggcattccacccgaacttaatcaacagatggaagccctgaacctaagcatagttagtcgcggattcttggctgcgctggaagccaagcccaccttgctcgatcaaatccgcgaggctcagaagaatgatccagacatgcatggactcctcaagaatatgaaacagggtaaagccgctggtttcacagaggatgaacacggaaccctatggaacggaaatcgagtatgcgttccagataacagagaacttaaacagttgatacttcaggaagctcacgaaagtccttattccatccaccctggcagcacgaagatgtacttagacttgagggagaaatactggtgggttagtatgaagcgggaaattgcagagttcgtggccctttgtgatgtgtgccagcgtgtcaaggcagagcaccaacgaccggccggacttctccaacctctccaagtacctgaatggaaatgggatgaaattgggatggatttcatcaccggacttccaaaaacccaaggtggatatgattctatatgggtagttgtggatcgattaaccaaggtagctcgattcattcctgtgaagaccacctatggagggaacaaactagccgaactctacttcgctaggatcgtaagtctccatggcgttcctaagaaaatcatatctgataggggaagccaattcacctctcacttttggaagaagctccaagaagagctgggtacccgattaaacttcagcaccgcatatcacccgcagacagatgggcagaccgagcgtctaaatcagatcctagaagatatgcttcgcgcatgtgtcctggatttcgggaagacctgggataagagtctcccctatgccgagttctcctacaacaacagctatcaagccagcatacaaatggcaccttatgaagcgttgtatgggcgcaaatgccggacgccgctaatgtgggatcaagttggggaaagccaagtgttcgggactgatatcctgagagaagctgaagctaaagtcagaaccattcgggataatctaaaggtggcacagtcccagcagaaaagttatgcagataaccgtcgccgtgacctggaattcgcagtggacgattttgtatatcttcgggtcacgccattgcgaggtgtacacaggtttcggacaaaagggaagctcgcacctcggtatgtgggtcctttccgtatcgttgctcgacgcggagaagtcgcttaccaattggagctgcccgcctccttgggcaacgtgcatgatgtgttccatgtgtcgcaactcaagaaatgccttcgagtgccatccgagcaggccgactcagagcaaattgaagttcgcgaagacttgacctacgtggagaggccagtgaagatcctggacaccatggagcgcaggaccaggaaccgggtaatccgtttttgcaaggtccagtggagcaaccacgccgaagaagaagctacctgggagcgcgaagacgagctgaaggcagcccatccagatctcttcgccagttcttccgaatctcagggtcgagattccgtttaaggggggtaggtttgtcgcgtcccaaatcgactctaaaatacatcctcgaaattatgcaaagaataagtaaaatccatgtgaaagcctccaacaattaaaatgtgcaaagctaaaagtcaaataaggcttggaggatttttgtatatttcctaaaagcctaaaatgcgtaaataaattttagtggaattttcagagcacaaataataattaagaagaaataaacaaagttaaaagggttttataaaaagaaaaatccctaaaagtccttttccccccttcctctcttgggccggctcggcccaactccctccctctctctcctctcccccgcggcccatcggcctcctccccgagcgcgcgccgctgacgggcgggcccgcccgccaccctcgctgacgggtggggcccacccgtcatcccctacctcgcgccgcgcctgccgcctcgcccgtgccctagcgccgccgccgccgcggattccgccgcatcccgccgtccccgcgcgcaataaagagggggaaatcactccccgtgattccctccctctttcccccctcttttccctctctctctccctcggattcgtttggaatccctcccgaaatcttcgccggcgcaccaatggagcccgagatcgccgcgccgatttccttcctctccggccgctctctccccctcccaacactatttaagcactccccgtgcctccctcctccgtttccgccgttcgccgctcgctctccccgtcggaatcgagctcgcgccgtcgtcctctctctccgccgtcgccgccgagcttcggttcgccgccgtcgtcgccccggacctcctcctgcttcggcatcgcctccttcggcttcgccgcgtcctcgtcgacctcgtccaccccttcgtttcgcccgccgaccaccggaacgccgccgtcctcgtcgacctgagccgcgccgccgcctctctccgcttcggtcgccgttcccgtcgtcgccgtcgacccggggtgagccgaggaccgccatttcgcttcccccttccctcccctctctcgggcgccgctccgtcgcgccggaggtcgccgccggcgaccatcggggcgcgggcgcgccgcctcccgtcggccgtgccggcgaggccgccttcgggcgcgccccgcggctgccatgtggggcccggccgtcagccgcctgcgccctcgggtgcggctgacgcgtgggacccacggcgccggccggcgcaagccgcttgcacccggtccaccgtggaccgtgaggctgccgcgtgggccccactcccgtggacccggtccgcgcgcccctcccctcggctgacgcaataaatccgattttaaattaaaatttaaatgaagaaattcgcaaatatccatttaaagagcatataaacttcaaatggccatatcttggccatttgaactcggaattggaccgttcaagtctctaatttttccttaagaagtcaagaacccatttttgtgctttgtttctgcttgttatatggagtttagtagagtaaaagccttttcttttccgttggtcgtgtagacgctgcagcttcggaagatccgctcttcgtggaagttgaagccggcgtttgggaaagcgagcaaggcaagtcacatcatctttgaacatattgaatcccagtttgtaaaattatgttgatttaaattattgcattatcgctttatttaaattcccgcgttatcactgttttatttagccatgcctatttacctttgttatgaccttattattgttatcgttattatttctttgttcaccctagattaaacaaaaccccaactagtggacactctactcatggtgccactagtacaattataggtagatgcttcgcttttaattaggtaacattaggcggttttacaactctagactttgggaatattcatatcacctggacactgtggaattgttggagtattgtggaattggattcacactgccccctctattcaaaatccccaaaaatggtttaggctgggctcggggtgcatggttttgatagtagcacctcggccatataaggaccggtcttcgggcctctgttgcaaagcactaccgtacttccacatgtctagtgggtaaggcttagtttgtggctcagtctagttataaacaaaagtacacggatggaggtggatgaagtcgggggtcgatggacattctccagggcaaatgacggctacacgagctgcggcccggtagtcgagatgtcatggcacagggccggtgtcctgctgctaggggctcagtcctgcctgcctgtcccgggggttccggccgtaggtgggattgggtcggtactcttgtctatggctaggatgggttggaaactatgtcacgtcttccgtctgtataccgtggtggtatgtggcacgtggttacacgtgaggaagatgtgtcttgtgggtaaagatgtacacctctgatcagagtaaaatctattcgaatagccgcgccctcggttatgggcaagccgagcaatgtacccaagttagtgttttaattcttaaaacctgcttaacaactaaaatgtggaatggttggcctgggttggcttgggacgagctgggacccagggtcgggttgccagttcggtctgaatcatcgtaggccttgggttaaggcaggttcgtgtgggttcacggccttgataaataatattgtttagttctagaatcgtgtttacaaaatagccctgagcaactaaatatctttaaatgctgtttactgcaaccctaacccctttatggtataactcctttgtactcccttgcatttattctgcatttgtgggtgtgtcttgttgagtacggtggttgtactcagtcttgctcaatttttcccaaccccagaagaggaattccaggaggatgaaggcttcggtgtctagctcgtgcctgccgtcaagcgcctgtggtcgtcgccctagtcttccgctgtttctcgtttgtctctgtgtgtgctgggccttcgttgcccatgtaataagttatctaattacgcttccgcttgttaaactctgaattgtatcaacttttggtgtaccttgcctcctgggacaaggattaatgcacgcacgtaaggaatgcccgttgggttatttccggtcgtgacaagggtggattaatcataccgatcatatcaattccccaacctctaaaaggccacggtttaataataggattcatagccgatgctggcgccctttggatcgctccaaacttctgacaatcttgacaacctttataatatctgaaacaatcctccagcattgtcggccaaaaatatccagcacgtcggagcaaccacctcattttatgagccgactgatgtgtaccacatatcccttcataaacttcgccgattgcaacttttgcctgatcggcactcaaacatttaagcaacactccatcaatcgtccgataatagaagtcatcatccaataaagtatatttcaaagctttataacgcaatttccgcgaagccgattgagatggattctgtaaatactgaaacacatcatatctccaatcatcggctgtaattgtagcaatctctatttcgatatcttttatcattggcttatgacggagcgtggggctcctcaccgggagaccgcgcaggcccccctttgccggttcggccggggactcagggagagattctaagctctctgtatgtggaaggctcgcgagacaggaaacacacaagacacgggcgatgtatacaggttcgggccgctgagaagcgtaataccctactcctgtgttttgggagatctgtgtatgaaggagctacaaagtatcagccagcctctcccttgttctgggtttctaatctggaaaagtccagtcccccctctcagtgggcaaggtcctccttttatatcttaaggggataccacatgcaccatttctctcttttttgtggggacttacccccccccttttcataaatggacggagatttgtatagtttccgtccgagtcaccttctgatgagacggcccacaactacctccactttcgccgggagcaggtgcgacgtggaatcgtggctgtctgctgacgacatgaccggtatcagaccagtcacgtcggtcattcttgtccaccacgtgtcagcttagcaatctacatgctcgcccttcttcacacaacatcttgcctgtaatggtttggatgaagcctggcatatatctgaccaggactaacgtgccatctctgggaggtaacacgctagctccagctggggacgagcgcctagaagccctcgtcctgacgggatggggcgaggcgtgcgtcagatcgcctgtcgccacctaacccgcgatctgaccggtctgtgactggtcacagaccggatcaacgactgcactgcactgcgttacatgcggcgtgacacgctcagccaaaccgcaataaatgtggttaggt

SEQ ID NO: 8317 - DNA, 8601 bp, Oryza sativa
ttgtgacattgagtcttacaagggaaaatgacagtgatgttctgtactgtttcaagtctcaacgcattttcgtctcgtctccttgagagtaatgtgttgatgtgctgtttgcggtggggatatttttcttgtcaaagtgttgagatttcctaatcttgtttaattatttgataataaataaactgatctgatgtgtgttagtccgaaaagcaattaatctgatgttgggatgacagggaccattgctgttttgtcattgcttctgtgtaagtctgctctagggatctgatgctgttggttaattagtagtacgtcctatgacaaaaacaagaggcgtttttcttgacccttttttctatcgaggtccaagattgcgatatctgatgacagtactaatcaatgtccacattaatctcatgcatcttggtatatgtgtgtgctttggttgttaatttggcacgcgtacggccccatctttcttctaggagttcaggatctgcagtggttggcccttgcttgccacttccgtgcaactgctaatgcctcgtactcccttcgtcccaaaatataagagattttggatggacgtgacatatcctagtactacaaatttggacgtgctctctgttcatattcataatactaggatgtgtcaaatccactcaaaatcccttatatatttttttgccgggtaaatcccttacgtattgggacgggggagtacagaacagcacctagttgcaattcaccctgtgtctcatgtcatttagaataggaagtgtagaacatagcagaacatgctctactgttaatttcataactgaatgtgggggtggaatgtctttgctaggccgggagaatggaaaggacaatggtgtgaacagtaaaagttagataatctccacacaatggccagttttggtactgaaaagggtgtagtaattcaggaggtgtgcacttgcaatatgcttacaactgcctagcactgtaacttctgctaactttacctgtttatcgcgtactagttgtcgcaggtgtacccaattgtggtccacattggccatgatctgtagcttagggaaagcatattgttttcattgtcatggactgagcggttggtggtgtgtttaaatcctttgttcggcaagattgccttcattgttcctttacttgcatggttagttgtttagttgctttggggggaacactgacatgtgtgctttacataagtgtttactacacatatgatcagtatgccatttaggtgttttgctgatcatactttctttctagcttgatgcactcatgcttgtagaagttgttcaagtgacattgaggccatcataatggtgacctatcaaacaatgtaccttcatcctgtggtttaattgcaacccttgctgtgatccatttcttttatttcttagtgagctatcgtaatcacttttccattgttggctgaagatatattcatttagacaacggaacatgtatgccttgtagtacattcttttttctaggagattcttatagtacattcagttgtgtggtcatcttcagagtccttttttgcaagcacaacctaaatacttctctctggtagtataagaatggtcagaacctctatatacacaatcagtcctgtcttgagaaattgttaggtctttgtatcgtcgtatagagtactgctgcccattagtcttcgtccgttgaatggataaattcactctgaacaatgtaactgagattatggatcataactcattatttagtaactttattcattgtttcaattacatgcttggatgcttgtcatttacctttgcgccatgtggaactgttataatgcatcagaagttcagaacttgaaccttgttttttttttttttttgagaacttgaaccttgttctgtaatattgaatgtttgaatggtgcaggaaacaaatagtaacattttgaattcattcttttcaggaaaatagatgcgaaggaagagagatctttggatggagaaagaggggattgagatcgaactagccggaggagaaaggccggggcacataaaatggggaagcggcgaatactcccttgatcataatgtgcaagtcactgattaagctgtgatcagaactgaaacctgatcgatgagaatagtatattattcgtaattatgatgccattcttctcttcaattgcagcagaatgcagcttctctcttgagtgctccatcatcttttctgccatcatgtccaatcaagcgaaacccgttcaacagaaacagaatgttgcctgtttctgacttctgtgttttagtactactacaaaaagttctgcaaaaccaaatcgtactactcccctctgtcccaaaataagtgcagccataagttctctacctaactttgatcatccgtcttatttaatttttttttataattagtatttttattgttattagattataaaatatgatgcgtgacttattctttatatttttttaaaaaaaataaaataagacgaacgatcaggtttcaggtagtacaatttctattcccacctaccgtcagaatcaactgaataactgcacatatatctgtgttcttggtactgaacaaacgaggcagaaaattgcgacctgttcttccgtccacaatgcaggaaaaaaaggcacacggccattctttgcatgctgttcttttctctgtttcttgcttctttttcaaacttcaaagtgggcagctttggaagtttgagcacggaaacctgatgaggcaaggaaggcatatcctgactctgcaaagagctcaggacgtgacacctttgcaggcacgtcgtcttgtcatcaaaagttactcctcctagattgcagaggacagtggcagagatccggcatgggagtgtgttcctctcgtctgcacgtcacgttctttagagcctgtttagactgtgtttagatccaaacttccgtccttttccatcacatcaatctgtcatacacacaaaacttttcagtcacatcatctccaatttcaatcaaaatccaaactttggatccaactaaacacagccttagtttcgaaacaaaaagtttttcactccgtcacgttaaatatttggacatatatataggatattaaatatagattaaaaaaaaccaattacacaaattgcgtgtaaattgcgagacgaatcttttaagcctaattacgccatgatttgacaatgtggtactacagtaaatatttactaatgacggattaattaggcttaataaattcgtctcgcaattttaagacggaatctgcaatttgttttgttattaatccatgtttaatactttaaatgtgtgttcgtatatccaatatgacacgccaaaagtttttgttcgtaaactaaatagtcccttaatctttagttacacgatttaaggtgatgtttgggtgggagggactaaactttagtcctctcagagactaaaattttggtgagagacctaaatttaattgaagatgaatatcggagtgtcagagagaggacaccaagatccagacaatcaggccccccttccctgtcacacccgtgtcactggtcactagacatgcaatgtgtacactgtacagtactgaaaagatgacacacaaatgcacttctttgcgagtagtgcatttcggtgtcagttcatatgcgattcatagacttttgaactttagggcccctttgattggtaggaaagtgtaggaaatttgaaggattttaatcctattaaaaaaattcctatgaaagcctttgaaataaaggattggatccaatactatccttaaaagttcctatagaatgactaatcctatagagattttggaggaaagttaacaagaggtccaacctcttggaaaaattcctttgagtctatctctctcatccgattcctgcgtttttcttgtggtccaatcaaacggttatttctgtgtttttcctgtatttttcaatcctctgttttacacttgcattcctgtcaaaatcctacgttttttctattcctccgtttttccattcatgcgattcaaagggacccttagtccctccatcccatgttaaaatagaatgggacatttagacccctttgatttaaaggaaaatcatagaaattttagagaatttattcctataagacttttttcttatatagccctccgaatcaaaacattaaattctaagaaattctataaaatgtctcatttcatgtaagttttggaggaaatttaagaggtagaatcttatgggaagtttcctttaagtctttatctcttctcaaatttatgtaattttaatagttattcatatgtttttttttgtattttataattatagttttacacttgcatttctgtcagaaccatatgttttttctattgctttattttttttcgttcctgcaattcaaatgagcccaaaactttttttttccaaaataaagaaacctaaaatatgataagatatagccatatccagattctttatactaggttattttccatcttattttacgtttgcttattttgggagtaggtttgaagtcttgagcaattttacctttgtctattcctatcacaatgttatgcggactcctatactacttccatttcatatactataagatatttcaacttttttaacttaatacatgattaaatagctcaaatttcatctactacttttatctgaaattatcttatcagtcatgaatgtggctatatgcagttacagttggtagatagaatcgttaacattctgtggcttaaggccgaaattaaacgcaggttgtacgtttgtgaaggctgtatgttgcagtcttgcagaggcgcgtgtttcataaagacctgacattgttgtgaccatatgcaaatgcattatacctgtggatctagatctgctaccgtggaaagcactgatcttgtccaaggaaaataaacgcccacatgtcggcaaaatccacccattgcctccagttgatctttttgctgtgcacatatggttttgtgtgcagtggctaatgcaaatgtgtgtcgtggagagacctcgtacgatctgcgggccgacgtgggggcgaaatggcgaatcgtgtttaaccgagcacgttttactctatcggtagtcatctcggccgtgccatctcgttgtgcaggatgccggtgaaattctctgtgcttgggccggcccagctgaaaccggcccatgggctgcgattgggttgtgaacgactagctacagtacaaacgccatggatgtgctgggcttgccatcgttcagcttcctcagctttgacgcaagctgggcctcacggccgtggtggtgatccctcgcgccgcgcttcttgcgcttcgccgccgcggcggcggcgtcggcgtcggccatgtcgagcagtatccttgcctgctcgagcagcgtggcgagccccgcgtacgcccgcttcatctcctccacggcggcgtccccctgcgcctccaccgcgtccaccgtctcgcgcagctgccgccggttcagcccggcgaggtacgccgtgacggcggcgctgggtggcgcgccgttgacgagcgacgccgcgtgcgtggcgtcctcgacgcccactggctagtccgtctcgcccccgccgccgccgcagcccaggtcggcgaggtcgacgcggagcgcgcggccgcggagggcgcggcggtcgaggttgcggcacgcgctgcgggcggtctcgtcgtcgaggtactcgacgaacgcgaagcccctccgccggttgccggcgtcctcgtcgacggcgaggcggagcgactcgacggggccgatctcctcgcacgcgtcgcggagctccgcctcggtggcccggtacgagacgttgccgacgaacaccacgctgctgcaccggcacgacacggcggccatggcgggcgaacttcgaaccggggcgaagtcgatcgaacaggtttggtttgatgattgaatctgaaaagcctttcgatttttctatacaaggagtagtttaatttccgacttctgagtcggtggcgagtacgaacgcgttgggttcgattcgtgaactttcaacacgtttccagatgtttcaacacgttggaagtatttgatccgaccctattttgtacttttaaattaggtctcgattatctgatatcctaattcacttttatgcatttagatgatcttacgtagtatcatcttcattagtatccgttcaagtaaattaacaaaaacaattgctaaattattaaatttctaaaaaataaagagcatatgaagcacttaatttgcaacatctggacggtggaaagcatcaaacagttgaatagtacggagtttgttcgatgcatctcgccaccatgacgtgtaccgcgaaagaaggcgccaaaccgtcgtccacggcgacgacgtgtcgccccgcgcgagctccggtcgggtcgccctcgcgccacgtggaggtcacctcccatttcctcgtctcccacgacgaggtgttcgtccgtgctcagcagcagcaggaggaggaggaggagaaccacaagaccaaaaccaaccatgggcgcgggcgtggcgcgcacggcgtggcgccacgtgacgcccggcgcgcgcgcgcgtccggtcctccattatagggggggaggggggacacgagcgagctccgcgttccccggatcgatcgccatcctcttcttcttcctcctccgtcgttcgcgtgcatgcgtgaggtgctcctcctcggctcgttggtggttctcgccttgttgtcgctgttcccgtgctgctcctgtctctcgcagggagcggaggaggaggaggacgacggcgaggtgcgcttgatggggctcgccggagaggccgctggctcgcctggcagtggcggcgggttcaggtattccgtttcgcttcatctctctttctgatttcgttttcgtttgatccgttttaagcaagttgggggccgaacagccaacgaataagccaaatttaaaatttttaaacttaattttaagattgattttgagatattttcaacgtagtttctttaacaacattggtttttaaatcacccagaacgcatatataaaagttttacctacaaatttatttttatttcctaataagccgttttggcttattatgaaaaaagccaaacgatgggggtttttatttattagatgggtgatttttcattttggattgggagtgttagtttcgaatatctgtatatagccattgacagagaattcgtttctgttattattacctgatattgttgttcttcttgtgttatcatgacagtgcaaatggtaaatttagctatggttatgcgagctctcctggaaaaagatcctccatggaggacttctatgacaccagaattgatggtgtcgatggagagaccgttggactgtttggtgtctttgatggtaatctgatgctttttcatgatgcaattagtgttttgtgttgacttaaataaatatcgtcacctgcttattcagtgattactgatcgtaatactacgtggtttgttttctgcaggtcatggtggagctcgagcagcagaattcgtcaagcagaacctcttcaccaatttaatcaagcacccaaagttattcagtgataccaagtctgcaattggtattgtgctatttatctgtgtctattttctctaaagcaaactacttcacccaaaaattttgtttgcactttggatgtttaattccctgaacattctgtcctgcagctgaaacttacactagcacggactctgaacttctgaaagctgaaaccagccacaatcgagatgcagggtcgactgcctccactgcaattctcgtaggcgaccgtctgctcgttgcaaatgttggagattctagggctgtcatttgtagaggaggagatggtaagattaagaacatttcaattcatgtttactttactgattgttgggcagatagcgtaagtgcttcacctgtacatgtttttcaaccaatgtcctgtcctggtctgtatcatgaatgttcgttgtgtcaaccgagcaactctatattacctattacaatttgcttctaaaatgattgaaacctcagttttgtgatgcattatttcatcttgatgatgcagctatagctgtgtcaagagaccacaagcctgatcagtcagacgagaggcagaggatagaggatgctggtggttttgtgatgtgggctggtatttcaactcttgatctattcattgtgctgatgctacatttaccctttttttcgacattgaacaccaagtccttaatctataaaaatgctaaaattctgttggcggaaattttgtaggaacatggcgcgtgggtggtgttcttgctgtctctcgagcatttggtgacaaactcctgaagcaatatgtggttgctgatccagagatcaaggtcctcaagtttcttccaatctcaaattcataattcatgcagctcataaagaaagtatatgcatagaggccatgaacgatttcaggatacgaccatattacgttatgtactgttgcaaatcgaaattcgacatttatctgcttatttgatctgtaca

SEQ ID NO: 8318 - DNA, 8919 bp, Oryza sativa
  unsure (1)..(8919): unsure at all n locations
gaacggaaatattggcgtgagcaccttgttgaaatgtcggaagcactggtaaactgagatatttttcaggagtttcctgcagctccatgcaaggcagcaggaagaacatgagggtgaacacccaaaacctggcattccaggttctgttgttctgcatgcggcagttccacaaagaatgttcaggtactgccggcttatcccagcagatatgccatcagattaccactggtttattctgatgcctcaacagaaagctcgctgaacctggtatagcctacctgtatgtaccacatatatccttgctaggagtacttggaaatattggcacaagtacaacggtactcggtagtacctatccttacaaaaagtggtacattttgatcagagagtgacgctcagtatcagtattgagatcataaaacatgttgatcagtgtgggactttcagtatcagtattgagattagtacacgtcgaacacagcgtgacgctcggtatcagcagagagataactaagcttgacaaatgacaacatgtaattgtcacaggagcttaagacgtttcatacttgagcaacaaagcgatcaaaacaccagcacatcctgcatccagccgctaagtacacaggcaagataatatcaagcacgtaacagatgcagccagtaataatctcacaagagccaacaatagactccgatattacgcattgacacataaaacacattaaggttttgatagataaaaagatctccagcaggagtgtgacaccacatagtctgtaaggaccgtctgggtttattgaccaacattacagataagcaagcgcacaggacacacgaacaaactcgaagcactcataactcgtaggaaaagcacacgacgatacgaactggaaatattcatggcgaacgaatactcaaaagacgataaggcgaagtaggcgatgattggggacgaggttggacgcgtcactcttcctcggattcagaatccgcgctctggagccactccacgaatggtttggcattcttcaccacctgggactccttgccagcagcaacagattcattgtaccactgagttatcacttcttcatccaggatgtccccatcatacagggccttgagaacaatcggcacctccttcacagcttcagggctagacttggcaccgaaggccaccagggcttgcagcaggaccatctgggaggcttcatcaggtacagcagccgcgaggaatttcttcttcttcacaacctccttggcaaatcctttgccgaggccgccaaagagtgcatcaaaaagagcattcatagcatcctggggtggcagggctgaggaagtcatcagacccttgagctgaacagcagtagcacccttgctcaagttatccttcatctccttgaccagatcatcataaggactgcttttagcctcttcaaccacatgttttgcacttccgttggaggcaccctccttgtgtgaggcctcgtgcttcttcttcttctcaggttcttcagtggacagcatcaccatctcagcagttgcagcgctcagttgctcttgcatgcgctgttttgcagcctccagcgaagtgtcagtctgccactggacatcatcgtcgtcatcctcatctgcagccacattgtcaccatcatggctgcgagttggtgaatttgaatgatcctcatcagagccagaagcagccttcttcttcccagcaccacttttagaggaggtgctttccttggatgcacctttcttctttgcttccttctttagcttcttcatctcctcatcagcagcctcaccttcctttagacgctccttctcagctctcctcattgccttcttgtctttcccaccacccttcttctgttcaggtggattcttcaggataaaagttgtgagcttgtccctcatgtcaacgtctgacacgaaaccacaggcagcacacttcaatgtaatcatctgggccttggagatgaggacctcagtctcagggttgccacatccatagcattggacatacttcttgatgaagttctcgaggagaccagccagtttagcagtatcatgtgccccattaaccaaggaagtaccagtcttctcatcaaatttagactgtgcaccaagctcacatccaaagtactttgttgtgtaggaagcaggcctagctagggcttttgctatatccaccatgttcacgatgttagtcttgatgccattgccacggccttctattttggtgatcatcctgggcatcttatacctgtagaaagcatcatcgcggtttgaagcaccaatgttttgcagagccatcttggattaattttctttcaccgagataatatcagaagcaccaagagccagaagtgacaatagtcttgatccttgaagtggatcagcagaaaccagtgcactccaagagcagccagaagtttgcataaattgacaaggcttcggatgcatgcagcagggccttccaagcgggagcttgtgcctttttctcgtccgagaatattctccaagtaatccaactgatcccaagtaaagcaagtcttgttcagacataaaagaagcttcaacttttagaccctccactttgtcagattgcagcaaaactgatgctgcctcctgcatcatacgtcaacatcagattcttcactcatacagacaccatagaaatgtacttatgtaagaaataattcaaatgcaagtaaaatatacaatatactacatatctgatgcatatatatgataccaaagttcaaacgaatactataaatcacttatcacttaaatattcactccatcaacaaagcgaacaatctatctgtttgtattctacttgcattatcctgtataaaatattaggatagtgaataaaaccatttgcatgtccaaaatactgtacaagaatggcatttgtatgaatgcaagatgaagaatgcaacaaaaccatgttgcaatgcgcaacaggctcctttgttacattataatgccagcaaaagttgaaaaccacaaggcacattactgaaagttctaatatgtcagacacactgaccaaacagtttgtactattatacaattgaagcacttattacacatttgtcgaattcagcatatactggattaatgtgtcatctagatcatctgcataataaacctttcaccaatattatataggataaccactcagaaactctatggaccaaacaaatagcataaccatatccatcaaaagtgcaaccagagctaaatagacaaggagactgtcactcaggaaatagaaaacagaagctcgtaagtgcgacatagctacgagtaaagaagtaaccatgcataagcaaataaaactgtgattttgctggccaacatcaaaagtgcacactaggcgtagtaaacaatgccataaataaactcagcctagcagattgatgacatcatggaaaaattaatacaaaaggaaggatagtaaataaggaatacgatagcaattggcaaaaacacatgaacattcaatttcagatggcaaaatattgcagtaataactgggaatggtcttattagcacgacgaaacacaatgcaccagtacaactactacgagatttgattacataatggattcgatcaccccctaaataccagaatggctaattcagtgtactaagaaacatacgacagacatcttttgcatagcactacattcgatgaaacaatcgaaagtttcataaactatcactacaataattaatgctagtaaaatccaaccaatagatggtaactaatgcaactgcaacatgtttaacgcatcctagcagcatgaagtacaacaatattaactgaaaaactacacgaggcacaataatcgaagctggatgaactgcaacagcacgagtatatgaaaatccacgcaacatcacatgaccgagctgacacgttagataatagacgcaatatacacacccaaagtatctgtattcccccaaactccatcactagcaaattactcataatcaggactatcaacgacttcccaagccttagaaatcgttcgatccgacgagatttgaccatgagagaactcctaaaatggcataaatccgcaccactccagatgccgaccagagagaaaccgaaacctgcagagggtgaggagatcaggggaggaggagggatcggggagttgctcaccttgcgatgggcggattggatttggggacgtcggcggcggcggcgggatcgacccgacgagggttcgcgaagcgtggggaaatttgcttgcggcggctggattgtggaagaggggggaggaggatggttaggtaggggtgggttatatagctaggttggctagggcttccattccgtgttggggttggattcgaattctgtgagaggggggaggatctgttgggcctgaaaataggccggaccagggcttagtttggtggattcccacggcctgttttgcaagagaagagaagaggaatggaagtttaaagaagggagttgatggtgtgattgatcatgggagtaaacatttttagtacacatctcttgtttggttttcgcatctaattccctcacagtctcatgaattaacatgtcttccttagataagagattggtaggagtcggacgccttgattctctatcctaaaccctctcgaattctcaagtcctccaaccaaactaaactttttaagctcggttggcatgttcgttgtggtgcgaatggccggtcgcgagttcgactcgcgggacctcacctcgacgggttttttctcgtctttctttaggactgtccttcgggtagtcttgactagaaataacggtacacatatacacacgcgtgagtgttcagtgggactgtatgtttcctgtgcaccgaagcctaatgcctctaatctcaatcttagcgtgtgttagggacgcgcacgcgtgtgtgtgcgtgtgttgttgtggcgtgtgtgagtgtacactctgagttgtatcctctgtcaccaactccctcaaaccaaaccgacccctattattttgggctgtaataaggtccttcacagtacgtctagctctcgtgtgaacttttgatgcgccatctcggatatcggcggcggcgatcggccacgagggttcgcgaagcgtggtgaatcctgtggcgagcggtggtggttaaatctctctctagaagaagactcgaagcgggctgtatctgggctggtatggggtgaacttttttaattgggccgtaattattttacacacctgtacatgtgggccgagagcgcgggagtccgccagaaaaattatgccgtctcgaactcccgacgtcgccggagacgaagacgaatacgacggcgagtcggcgacgtcgacacgagatggagcccaatttctcccgagaaaacggcgcgagaaacgaggggaatctcctcctctcgtgatgcatcgcacacaacaattaacgccgctctagcaacctgggagtactcctatcaacacaaacacacaacagcaagatggagctagctagagatgctctttgcatgcaacgatgcaagcaagaagaacactactcctgtagagtggtagtagcggcagctatacacgcctatacaagcgaatttttttaaaaaataatacgattttaatagaaaatcgcaaaaatataggtcggttcgacgaaatcgtaaatttagcaccctgtcgaacaaccgtgtctcgatagaggtacttatcgaactatggcagttcgacatgtacctgtcgaactgccatagttcgatagggtagttggtccaagggaaaaaaataaaaaaaggacagtaacagtgcctggcaggacatatcgaacaagcaaacttcgatagggtggcatgtcgaacagcccaagttcgatagggtctcagctacagtgtgctacagtgtttttcctctttttaaaaattattttatcatctgtcgaactgcgggcaccctgtcgaactgcggttgttcgataggtaccctgtcgaaccacggatattcgatagagtgccaaacttgcgatttcgtctaaccgacctatatttttgcgattttcctttaaaatcgtattatttccaaaaaaaatcctatacaagcacgttgggtgcatgcactgcacgcagatgagtgaatgcatcgcgttgatcgagccatggatgtcacggtgcatcgacctgggatattaattaatccatccgttctgcttcatcttataattaagtcgctttaactaccttttgagttaaagttctataattttaactaagattatagaaagtttagcagccatctanancacaaaatattttcattaatcaagaattgaatatatttttataatatctttgtgttaaaaatactactatattttttttatgaacttaatcaaatttatactacctctgccttacaaatactctatttttcagtttttagatgtaatgtatgactattcgtcttatttaagaattttctatgattagtatttttattgttattagataaaaaaaagatatgaatagtatttcatatgtgattaactttttcataaaatttttaaataaaacgaacaattaacgttggacatataataaatttaaaatgcagtctttatgaaacggagggaataagtttaactgataaaaaaatcaaaacgagttgtaatacgaaacggatggactggtcctagtgcggtgtcttggatggcgaagctagcgaacgaaccttccatcgatcgatgagagatcgagcagccggagaaattaatagttcccgtgtgcccggccggaatctgattccttttgctaaagtgtgcgcatggcgtatgcccaatactttggaaatttctttattcacagcattcaagcttctttatagttgttttgctatgtgaactttcaaagatgttgtcaactttaggttgtacgcatcatattatgccaagcagtcggtatatcacttggatcatattattcggggattcacaccgcatatgctatatattgatatcaagtcacttggttgattacaattatcaaaaccactcggttggttagattatttattccttgactatatgtttggatggttcaattaaccacatagtcgggggctacacctattaggtgcatctattcgatgcacctgactttatttttcagccctccacagtcttcagatttggtaaaagtactcgggagaccatggcgaagatgattgaagcactcggctttggagtaatctagttcgagagaagattatattttcgactgtgaaggtctcaggggctactgtggagattatgggtaccccatatccacacggcatggttatccgactagtaataggggataacatatatgtatggaatatgtaacagatcgtgacttgggtattacgtttccctatatattatggaacggcctaaagttctggtttgataagattgtaaagtagatttaggaaaccgataccgtattggttaaggtttctatcttgtaatcctgccccccatcctatataaggtgggcaggaagccctctagggggcatgagacacaacctgatcgtcagatcaatacacactcggcggattcaaatccccaaacaggagtagggtattacctctcattgagagggcctgaacctgtctaaatcctttgtctctgcatccatccacttttaggtctcgtgcgctaccccgttttattattgccgaattcatgtttcgacacgatgagagatcgagcagccggagaaattaatagttcccgtgtgcccggccggaatctgattccttttgctaaagtggatacctagcttcggcggcgacgtacgtctccaatggaatcgtacatgtggagattatggatatcccatatctacacggcgatgatatttggactgaatataggataccgaatatagatagaatatcttatgtgtatcctgggtttgtttcctgacttgtatatcaaggaaacaacttaagacttagtcggtcacgactgtatttaatctgtatctgtgtattccgttagggatatagattatcttttgtaacccggactccttcctatatataaggggggtccgggcgcctctaggggcagttgttggattttctccaaatcatacaatcaataacacactcggcggattcatccccggacaggagtagggtattacttcttttataagaaggcctgaacctgtataaatcctttgtctccaaacccatacactttcctagcttgatagccacccccttttattattgccgaaatctagtttcgacagttggcgcgccaggtaggggtagcgtcaagcttttcgccgatcagtgcaatgggttccatctccggcatcgacggcctcgtcttcccacccgggcagacgtttcggttcggcagcctcgacttcgtcaccaacaacttcggcaagatttctctcctcgactcggaatcagaccagtcgggagagaaccggatttcggtcccgtttggattcccgaacgcggctgaaagctacttcaagaccatctcaaccgagtcggcttcaaaccactcggccgagatcgcatcttctccaacgataccagatcaagatgatggggcttacccaccagtcctgatgaagctccccgacgatttagcggccgtctccaccacgacagcgtcttcatcccgtaggcctaggcggaagtcggcttcaacaccgatttcgcctagcttcagggaagtcggcgtcatcctccaaccactcggcacggtttcgacggatcagctggatgactacaacagctctcccaccgtcgactcacgtcctactgacattgtggagtacgacgaatttagttctcgatacaacgacttcgacgacttcgacgac

SEQ ID NO: 8319 - DNA, 27688 bp, Oryza sativa
  unsure (1)..(27688): unsure at all n locations
ccccccccccccccccgatttttttcttttatttgtttgatttttttttcacgcttagggacaaacaagaactaaccataaaaaaaattgaattcaaatggatgtaatatgtgacctgtagaatttttcctctcctctcctctctctctccaaactagtgcagaggagagagatgtgcaacttttttatttttattttatttttttgatatttttttcacacttaggaactcacaagaaccaatcatataaaaaataaactcaaacggacgaaatatgtggcatgtggaattttccaaagctctaccgaaaaacttctctcctcgaaaacacaatcttgcaagcagaatttggaggttttagaatcgccgtacccgacaaagcggggagaatcggatgtaactttttctgtagatgtctgtggatatattatttgcctgattctgagtccgtatgagaaagttacgtctattttaataaatgatacccgaatgacttttcagtagagctttggaaaattctacgagtcacatattttgtccatttgagtttattttttctatggttggttcctgtattctcctaagtgtgaaaaaaatatcaaaaaaataaaataaaaataaaaaaaatacatctctctgtactatttaacttatggctatcatttcatgtggttatatttgaattagagattaagtaatttcatatagtggtagagtgcattatgtttaacatgctgatcaaatggttttattaaaggagttatggtctaattttgatgaaggtgtaaagtaggctaagtggtatgctattttcgcatatctagctaagtggtatattccgttcgagttttaaattttttttttgtggctggttgtatcgtgatcctaagtgcgaaaaaacatccgaaaaactaaaataaaaataaaaaggttgcaactctatatagagaaacaggaatagaggcgaggggtggtggggggggagaggggcggcgccagcatgcctcatccctagggcggtgccagccattgtggcgccctcctcctgccacgtcggttcgcgtgtgccacggtggcaggaggatggcgccagagaagctggcgtcgtcccgttggacgatggcgccagccactctggcgccaaaaaggaccatttctgggaaaagtttttttaggggtctatttgcgaaataagttttttaaaagaatcaaaatgtgaaaaatccagttactttggaggtgttatttttccctatggaccggctgcttgtgagagatctaagcattaataggcagtgggcattgcgaattgttccggtctcttgggtgcatgaatatatagccaggaataagcatgaggattgattcagattcaactggagtagagattggtgtcgattggtccatgacaatataaaatcttgcaatgtctcttatatacaggattcgttttatataattaaaaaaaaactccatgacaccttaaataatgtaaaacttagttcatttaattgaaggagtagtttgcgctcacgtacccctaaattggtgtgttacacgagcttcactcgatttatttttgttattgcaattgtgccagatagtgtttaatcatgtgcaaacactaattaattaggcctgataaagctcatactcccattggaccatattggcacttgcaaaagtccgctagtccactctgcacatattgcagaacaagtattcttgtgcgtcataaaaaaatggacaatatgtcctttttaaattcacacctagctaagtaagtctcacccggccaatgctagcctcatttcttttacccagcgagaataaaatcactggattattttaccatcatgtgctatatttagaacacacgttattaaaatgtcataattaagtttcacaattagtaatattatactccactttgtccataaatataagcatttcaaacgtttaaaatttatttacgaatatacgattctaaagtactacttgtatcattaatcatatctcattcattttttttacataatggataatcgagccttttacttcaaaagaacctacaaccatacattttttttctttcactttgccccccttccaacaaagttttctgtgctcaaccttaatctataataaacctataaatggctatatttatggatggagagagtaatagataatactatacatttatgccagtagaaaggaaaaaaatccaagtacaaaaagaatataactatagcacttaaagtttgtaaaaggatacgattctaaagtagtactcccatcgttcctaaaagattatatttttagctagttaaagatagattaaatatataggaggttaaaatactactgtgaccttcttcattaatgcaggaagagcaaggacgtgggaatgcttctggttctaattaaaactaagagaaaatgatcgatgaaatgatactactattaaataattatagtggacccactctaaaattacaatctttacgggacaactttttacgcttaaactacatcaatttagacttggagtagtactatttttcactccaatcaccactcatttaaattccttccaatcttagggtgtgtttagttccacgctaaaattagaagtttaattgaaattaaaacgatgtaacggaaatgttggaagtttgtgtgtagaaaagttcgatgtgacgtttttgggttcaaaatttagaactaaaccgtgccttaccccaactatctccattctgaagcacccccgtttaatgagagttatctagattattttcattttatattaacttgttttttaaacattacaattttttaggacgaatagagtatatttatatttgaagccatccttctctgtcttcttttttaaaaaagaaaactcgcgagaagagtttgaggacaacatagatttaatttgtctttcattctctcctgcctcgagaaaaataaaaggaattggctgttgcgaatggagattaaataggctaaactgtgactggagggagacgataatggatatgcttctctgttttgtaaaacgtggactgatccttcctagaaaaattacaaatgtgtcgttctccgtgcacttgcttcatatgaacaacaccagtcagcagaccgtcaatgaaatgttttgttacaacttagtacaaaatgtgttcttcgtgcaaaaaaactcatggtagcaacttaattaggcttgttaatataaagctaaagaagagttctcggcacttgcacaaatccactaggcacccacttcacattacattgcagctagaaatgaacaaaaatattcttgtgcctcactaaagaaatggaaattgtcatttttaaattaattcataccaatctaagtgcattgtatctgaccgctctaaaaaaagcagagcaatttactatcatatagtactacatttaggcatttagcacgggcgttattaacacaaattgccaattaaaatgtcgtcggtttcacaacacactcctgatactgtaacagatagcatctgatgctggtgtccaagaaaccgccctaccattagctagtagctagtcctcttaattggctaccttccgatccctttcatcgccttcctcttcagtcaaatgacacattaaattatgtcggtaattcacctccgtacacaagcaaacgcctgctagcttaattgatccccataattaaccgcatgcggtataattttcttcttcaatttacacaagaaaccgaccttgttgatcgagttgttgttgtcacctataaagctagcataaacacactactcctcttcttgaccccttcttctcttctccatagctatcaaacacaccttgtaagcttctagcttcttcttcttcttctacatacacttcatcttctccatagcaaacaccttaaacttatagctgcttcttcttcttcttcttcttcttcttcttctacatagaatagaagcttctacataagatatagtccatgtatagctctagtagcatggaaggagaggatctaggttcatggcttggtctcgggatcggcggcggcggttacgcatacggcggcgacgattgccggaggtcaccgtcgtctccgtcgccggtgcagatgttgttctcccagcatgtcaaggaagagatcacgaggggatatgatcatggccgtgatgaagaacaagcttcagggagcaagatcatgaagggagagagaggtgcaaggctaagggtgatgaggtccatcaggaacagcggcggcgacggtagccgctcgcgtgtactgagcctcggcgacgacggcggcgatggcggcagcggcggcggcggcggtggcggcacgaggaagaagctccagctcaccaaggagcagtcgaccttgctcgaggacagcttccgcgtccacaacattctttctcatgtacgtttacgtgcacatcatatcgagtaatctgttactaattctttgggattttaacacaactgttcgatcgattcatgcatatgatccatgtagttagtaagaaattaactgatgatttcttggtcaactgagatcaagagatcgagccgtatgagtttctgcttcttctagggctacctgatgaacgtatctcatggttgtttcatatatgacaggctcagaagcacgagctcgctcgtcagctgaaactgaagccgagacaggtcgaagtgtggttccaaaatagaagagccaggttcgtagaattaaattaattacattcagtttggagattacaaaattctgcaattagtgttatgattaacatctgtgaaaaattaaatcaaaacgcaggacgaagctgaagcagactgaggtggactgcgagttcttgaagcgatgctgcgagagcctgaccgaggagaacaagcagctcaagcatgagctcatggagctgcgtcggctggcttcgccggcggcggcggcggccggctcgcagctctacgtccagttcccgagggcggcggcggcggcgatggtgaacgtctgcccgtcctgcgagaaggtcaccgtgatgggcggcggcggcggcgagacgggaaagagctcctccagctatagctcttaataatataaattaatttaactattagtttgtactcggagtttgaacaaacacctgatgaatatggaggtgtgatgatcgatcgacttcgtgtagatgatcaactagctaggtgtgccaatatatatataactcttagtaattgatttgacgcccttatgtaaggttttgcatgcggtgttgcagcatgcaacctagctaggcttttttatggacttgttgctgtgaaactcaacaagaaagcctcttgagaacaaactgcctgatcaccagcaccctcttgtgggccggactggacatgcaactgcctactggtactgattgggctgcacacattaaccatgcacacttattattttcatattcctgaatcctgagctgatttaagcttttactcatactcatcagtgattgacgtgtgacgatttttttttgaacaaatctggttttcttcataccaatcaatatatgttatagtacggaatatatatgatctcagatattgagagagagtataaggccatgcaagttatcttggagagaagagagaggggggggggggggttgttgaaattatcatgcagtatatgtttgatcctgtgtcatttgtaaggttgatgtttgaaatgttaccattttttttttggcaagattgactagttttaacatcggtgccgttttttggttccaaccaaataggtgacaaaattttggcattgccagatcttaccattgccaaaaaaaattggatataaccaaacaagcccttacatcctattaattgggaaaataatcctatgagaactacttggtgcagaggtcagatgttttcattgtttagtgaaccttctattatcgtaaacaatagcagagaactggtctcatgctcatgagtgatcaaaagttcaaaacacagagcaaagtttaagtgttaaccaactttgttatgattgaaacagagtaaaatgctaggatctcatttatcttcatttctcttcaatatatatgaacaaacaaatagtgctccttgccgctgccgaggaaactatgaaacaaaagacaaaatacaagtatcttcccagatttttagtatatctgtaactataactataacaaaagacaaaatacaagtatcttcccacaacatttcctatcatcaattcttttcagagtttttttttacaactgtcataagcatttcagaagggaggacacgtagcaagactatccgagcagtgattggatccatatagaagtgcatgggttagctgacccagtggcggagccagaaaatttccacgtctaaggctgagctaacgagatctcaaatattttcataagttacataacatttttcatgattataatgggaattatggagctaggcatggggctcaagccctaactgccccatgcctgattccgcccctgagctgaccccatagctttttcaaaccatttatatcaactttaatttatatgggtttaaagttatcatcactcaagtatcaaatgaaactgatcggtaaaattcttgcctccgccacaataggtggaatacaaatccgtgcaccaattgtacccgggagtaataatgaactaccctcctatatttttatatgaaattttcttttgaagataactaaagttataggaaaaataaaaacttagactccttatcaagcctattgtacaagacagccagtgtaaacaagatatcagcaggagagaatcttcaacccgatcaactagtaatacgacaatatgtatgacaacatcacgtacgtgcaaagcagcaaaggggagagcgacagatggtgcttttcaccacagccaaattagctacaggacttagcttttctcgtcgaccgttcgttttcctactcacatttcagccacagtgatgtagactcgcttgttcctttcgaaatcacttttatccctactaatttagtattaagggtgtgtttagttcacgctaaaattagaaacttgtttgaaattgtagcaatgtgataaaaaaagttaaaagtttaaagaaaaattttgcaactaaacacggcctaaaacaataaactaaatgtattgttgctgtaaattttggtaattctatataaattaccactcttaaaaacttaatttagcgaatttggtaacaccgtcaacaaacacacatcctacgctatctagtaatgccgaaatagcaatattaatgaaaacaataaaaatgtgaatctgacatattttgttattgagtactccccttaaaaaaaataaatttaaaattggacatgacacatcccgagggagtaggtaaagaacaaattgagcacgcgtgcagctcgtacatcggtacatgttgattagagcttgaaaaggcacgccgtgatgaacatctgagcagatactaaattgtgtggtagaatcatgacttgggatgcaaagtccagttgctacaggacaagcctaacttaacaacaggataatcaccgagctgatcaacatgagggaccagcctaattaatagtacaatccggtctagtcttcttgtcctaagcatgggtcaaataaaaattagttttcctaatgaccaataggaaatattacgtaggaaattggcgagaaactttcggctgattattggcaggatgagaagtagacatggcggaagcaaatccagaattttggacggctcttgactctttgtcaacacgagatttccgggaactttcacacaaaagcctgtaaacgcttcagagagtcgcactctcaccatctgtttattggcttatcagttttatcttcaaattaaattttagagttttttattatcgtttttgcttttaacattgtatttgaaaccacaaattatacagatatactttcgccgtgtttagtttcaaaatatttcttcaaacttccaactttttcattacatcaaaacttttctacacacataaacttccaacttttctgtcacatcgttccaatttcaaccaaactttcaattttagcgtgaactaaacatagcctttgtattttaacattgtaaaagttttactatgtagaattcttttattcgtccatgtggataagccgaagccaaacgatcagagcctgcctatgcctatccactcgaaaaagcctttttctgttgagcaattctacggtacctgggaaagtaccttgagtaccaaaaatttagtgtaaaatttggtatctcataatacctatctaggttattatgtacagtagaaaaaatggtatatcatggtacctccttaaggacagtaaaattactataatctattgttggtaccaccaactccaaaaattcctgcaggataataccaaatcacactgtactactacggctgaaacaagccgatcgactgcaaacaaaaaagctggagaaaggaagcagctgcgaaacagaatgcaacgcgtgtgtctgttgtgtccttgagtttctgcgcaaatgtgcttgtcgtttgcacgtagcagtacgaaggaaaaagtacgaattacccgtcaaactatcgcggtcgtctgaattacccccctaaccataaaaccggacattcttcacctataactatgcaaaccagacgaattacccccctcgacccaatccacggtggttttggtttacgtggcgtacacatggcagtctagttagcgttttttttaattaaaatattgtggacccggatgtcatacacttcttgctctctctctattctctctctcactcttttctctctcgcacggcgaggacgaacgcagggacgggcggtcggcgtgtgcggtcagcgaggtgaggcgagtgcggcggcgcggacgtcggcgcagacggcggagctgtgtggcggcggaggagcggaggtggcggaggagcgtggcggcggagctgtgtggcagcggaggagatgaggcggcagaggcggcggaggagcgtggcgccgaggaagttggcggcgcccttggcctcgcgattgtgggcgagcaccttggcgcgcccttggacgccgccgcgtagttgtactccgcgccgcttggctcgagccggtgggccgccgcgccgtcggggatgcggccgttcgcggccttgccctgcaggatccggctccggaactcgtcgagctcatcgagcgccgcgtccgtggacgatttgctgccggttgtgttgttgaacggctccaggctccggtggtcggtttcttgctacggctccggcgggtgcaacgatggctggcacgtcggcgcggccgcggaggcgttatactcagtcgggaaaatgtaggcctccagcggcattaccttgcagtagttttcacgcattccgtcctcgacatcgtcgtagaaatctacaaagaagagatcaatcaaacgccagggtgacatgacattgatcgatccatgacactgggagcgaaggaggaggaggcaccagacggagaagaccacggagagggacacctcgcggaggccgctgtccatggatagcgcatcggtcaccggcgggtcgcagccgccgtttcctccgccgcctccttctctcctcttcttgctcatgcatgcacttgcgcgtgccttcctccctgctgctgtgccaaagcgctaaccacgccgctgcacgctctcaccacaaaccttgcctttgcctctgccacaactgactccgccgcctccgctcctccgccgccacacagctccgccgccacgctcctccgccatcagcgccgcctccgcctccgcgccgacgtccgcaccgtccgtgccgccgcgctcgcctcgcctcgccgaccgcacacgccgaccgcccgtccccgcgctcgtccccgccgtgcgagagagaaaagattgagagagaatagagagagagtaagaagtgtatgacatgcgggtcccataattttttaattaaaaaacgctgactggactgccacgtagaccaaaaccaccgtggattgggtcgagggggtaattcatccggtttgcatagttacgggtgaagaatgtccggttttgtatttcagggggataattcagacgaccgcaatagttcgaggggtaattcgtactttttcctagtacgaaatgcacacaaaaaaggtggctttcgcttttgagaagtactacctctgtccaaaaaaaggcaaaccatgggtttccgtgtccaattttgactgtccgtcttatatgaaatttttttataattcgtattttcattgttgctagatgataaaacatgattaatattttatgcgtgacttgtctttttaatttttttcataatttttaaataagacggacggtcaaacgctgttcacggaaactagggtttgtctttttttgggacggatggagtaggtcaagtcatcgagattccgtcgtttgatcccttcaggcttcagcttcagcgagatcaaaatacaagccgccctctgcctctccacttatctctttcagctttagcaggatcggtttgccattgtggaaaattggaaatcatacaaacattctcttgtgcagcctcgggtcatgcatgacgtgcatatgcgagtgaccgtaaaggacttgcattcaactgtaaaggaaaaaagaaaaggatattgcttcgcaacataagaagaaagcaccggtggtgatggtggagtcgtgagtggaaccagagatttgctatcagtctcttctttgagtgtgtgttagggaactcactcatcatgggtttgtgagtgtgccaagtagcagagccaccgcccggttagtccgggctcgccggcgaaaactccattaaattttaatattaactagcataatgcccgtgcaacgcccgtgcgttgcacggataacagatgatagtgggtggttgaagtttgatcaaagtcgagtcgtgttgttcttgacaattaatcttctttatatttgcgggatatatatttctaagcagataagccttaaaaaaatgagagaactataggaatatacccgtgcgttgatatgtgaagaaaatgtgtggagttgaaaaatattgctcccttcataaaacatgagctgaaaattgtgaagatatggagaaattaactcatcctctgtgtaacaaaaccaaataggcaaattttgctacaggacatcgtgacttcacggctttaattagctgtgggacactacacagattaactttttgggatgtaaaagttggatatttgctagtgcaggggtggaaaaaaagctcgggctcgtgagctcaactcgggcttggtcgagcttggttggcttggctcagctcgtaagccaaataagccaagcccaagcctcctttgcagctcattgctgaaatgagccaagccgagctagctcgcgagccgcttgctttgacttgcgagcctaggccatcatgtatttatatcgattattttactttttgtggcgttattatttgtcaaattgaaatttatcattaagattttgaagaattgaatatataaacttatttaaattttacatgttaatgatttatttttgattttttaataattacaaaatatatatgaagaggtgtttcaacaggaaggcttgcaagacagctcgagctggctcgagccagaaaacgagccgagtcgagctcaagttttagcttgtttccctgactgagccgagctaagccaagcctagtttgttgcgagccactgcaagccgagacgagctaggcttggttcggcttgtttccacccttatgctagtgacaccatgctcattaaaataataatttccggctattgagaaaagagaaattgtcaaaaattcccctagacccccatgtttgctctcctttatctcctccttatccggttccagctccttgggcagcctcaccgcgtccaccccggccaccttgccgcctaccccggacaccttgccgaacacgtgaacgaaaacagatccgtcaactccgccggccatgccacgtccaattcccactcctctgtgagcttctccatcacctcgtgcgcaccgacgcaggccaccgtgacgcgcctgttgcgcaggaatgtgaggagccgcgccatccttccgccgtcctcatggaaaggaagcacgctgacggtatactcggactggttgcagtcgggctggtacacaaggcatgggagccgctgatgtagatcgcgacgtagcggatcagggtgccgaggtcccgaggatggccgcgcacgcccttctcgcccctatgggcaccagttgttgcgcggcgcatggccacagagcacgatgaggccgaggacgaagggtgcggagtggcggtggccacggtatagcagtgtgatttcccggaaccactgcatgttgtccacgtcacgcttggggtaggtgatgtcgacgagggcgaggtcatcatcatcgtagccgatgcagaggacaacctcccttctggtcactggcaccagatctgtagtcgcacatcgacacacaatgatttcacatcacaagaacacatctcacatcaacaaatgaactctcacatcacaagaacacatctcacagcagcaaatgaactccaagaacgcatctcacaaataacaaagaatcacaaataacaaagagaggagggggagagatagatccgccggtcgccgacgccgttgcctcacctccacaccggccgctgacgcatgccgccgctccactgggcccccatgcctcccctccgccagatctgcaaggggagggaggggaggggttgcgcgccgccggatccgccgcccccctccgccggatctgcaaggggaaggaggggagggggtgcgcgccgccggatccgccgcccctccgcaggatccgcaaggggagagaggggaggggccgccatggtcgcccgctgccacctgctctcgcagcccttcttcccacccgcagttgagggagggggagggaggggccgcgcgccgccgcatgctgtcgcaccgccggccggccgggagagaggggaaaagaggagagtgggaggagaggaggagatgagtggagtgggaaagagggaggtgggaggagaggagcgggcggaggaggagatgtgtgcgggcgcggttaaaagcggtgggcccgtgctattgaaaattcgtgtgcggttggcttaagtcgcccacgcgggataatgtattttcccgtgcgggcgacagcccggcacctgtccccctctttttccatgcggttctacttacggaccgcatggaaacaaaagtgggtggcgtccaagaaaatatatcatgtagcagtgtcgcagattgaaaatagttttgcatatttactcatagtctctagtagtcatgcatgctttctcgatctgtcaactcaaaattatacgtggactcgcgtggagacaggtcatgtgacatgtggatgatagcgcgaatactctaatttggcttatctcgtggaaactttttactttttttcaatcgatatttttttgtctcaaacaaatattttgtatttactgaaactttaagtgattttgatgtcaacaatataagtaataaagaaaaatcatcattagttgtgaagtactcttacgtgtatctaaaaaaactttttttcagcgaaaatcaatatcacaataaagaaaggaactttgaccggtcatagttttttttaatgaaaaaactgaagctcgtacctcattaccgaggaggttgccagctccaagaggtcttctgctcaaagagctctaggctcttctcaatcccagtctctttgtctctctccctcctcactcgttcggtcgttccccattcacatcgcacgtcgtcatccaggcatccagcgcctccaccagcgtgcgccctcacatcctcccatactcagcccttgcgcctcctccctgtagtagcggcgccttcttccgcctaccggctgcagcagcggccagcggcgcctcctctccttgatgcggcaaaagatggagaagcgcgacagcgagaagatgaagaagcgcagtggctgactgggggtgacgacaaggcctcctcatgcaacggttccaagccattgatgctgctcgtgcggatccaccaccgacgcctggatcccgtcgtctcttcgtctccctctcgcgcggatcagccatcggcggcgacaggaggggcggatccggcgacctcttcccctcccgcacggatcccgtcatctctccgccctcctctcgtgcggatccgccatcggcggcgatgggaggggtggatccagcgacctcttcccttcccgcatggatccgtcgtctcttcgcccccacgctcacacgggtccatggatttggaggtgcgtggtgagggggtggaccgtgcgcactgggctgcgtctcctcctccccattgcctcgccaagccggccaatacttgatttttttttgcaattttttccttttttttttggccccggtgatttaatttttgggatggttttgctttattgttgttggatttctgattcagtttctttcgtttccgtgcattagttctgggcttctacgaacgtacgagacaggagcgatgcggtctctcgatctcgcatgtacgatgcggtctctcgatctcgcatgtactgacgaaccaaaattttgggaggagatcgtacacggacaagtggaaaaaattgcacatacggacgaaaaatactaatactaattttggtgacgattggaaaaatactaatcttttaattagttaagataagtaaattgatgatgaaatttttatagtaaatattagttatattaaattttgttcagcctcaaagatcttattggctccgctactaggtgtgcttggtgtgagatccgcttgtggctgtgtgagtatggtccatatgcgtctgtcttttatgtaacagttacggaaatatgctagagttaaaaagaaattattttctctctctgaactcctcactaacttggattttaggttgtagtccctccaaacaccctcttcgactcgggttaagttgcactagctgcaaacaccaaataaagagcaatgcatccaatgaatgaagaccatgggtggcgcgttttccgagcttttaaatagtgtgaattttttaaatgtcctataagtttctaagcattttccgcaataaattttaaatttacaaggaaaaagtacgaattaccctcgaactatcgcagtcgaccgaattacccccctaaactagaaaaccagacattgctcactctgaacttttaatgccggacatattaccccctcgatccaatccagagcggttttgtcctatgtggcatacccgtggcaatgtagtcaggattttcttttttaaaaatagtgggacccacatgtcataccccatttcctctctctctcgggcacaaaataggcatggcggcgcagggacgggaggtggccggcggcgtgaggggacgggcgggggcagacaggtggaggcagtgccgattgcagtggcgacgagaaggaggaggggcccgcggtggcggtggcggtggcggtggcggcccgcggcgacacaggggctgagcacaacaagggaatgtcacacggcaacatggtggctcgaggaggaggaggaggaggaggtgatggcctctacacgcggtggcacgaggcccttggaggcttagaccacacgacaacagcgccacgtggcagaagctcgaagacgacgacgctctcgggcgagtgatggcgctagccggntcgtgccgacgcccgcccgcgcgcaaccaagccgncgtcggcttgttacccaccggcgccctccgtcctttcgaccccgcgcgccaccgnccaccttccattcccacgccgcgctgtgcgtgctgtcggggtggaagccgcggcggcgatggtggagggggacaacgagggggtggagagcgactagtcgatgatggacttgacggtggcggaggagaaagacgcctcccgctcccccaggcgctccagatgatgaaggcctctagatccacgcgccgacgtcgctcccgaggatcaggggcggcggatcctcgcgccaccgtcgctcctgctgcacctgcgcccacttgagcaccgccccatgcaccgccgcggcaacctcatccatggcagcggcgtcaagaagcgcggcagcaacatgcaacaacgtggtctggcgatggtggcggcgtccatcctcatccatggccctcctcgtcttacgttgccgtcgtccgccgcccgcccctctgcgcagagagaggtgaaggggagaaatgacaggtgggtcccaccaattttttaaaagaaaatgttgactggattgacacgcgtacgctatgtaggaaaaaatcgctctggattgggtctaaggggggataattcgtccgatattaaaagttcagggtgaacaatgtctggtttcagattcaggggggtaattcgatcgaccgcgatagttcagggggtaatttgtactttttccaatttacaataattaatttattgttaactctcgagtattatcacaaaattagataatatatatccgacatccatttatccgaactggtccttaggacaggagcaatagcatcctctatttctcttcagtgaattttggagatatccatacacattactcgcaaagtcacaaggtgagctccattattggacgcattccgtcagcatcaactgcctcatccacggtactctctccagcgcatgaaaagcaaacattgtacacgatgtaacatatgaattttaacaaagttatatctaaattcatataaaataagttacatcttatattgatttatttttcattcggaatgcggaagtatggggtagcatgttgggatcaagatcctctaccgtcgaagtcacgtgacttttatcactgacacgtggatccgacgatgtctggactcacatgttaatgataaaaacaccgtgtatttaaaggtacaggagctcaatctagcatgttgtgtactaatcatgttcacttgactcgatcgatcgctccgatcgactacaccccgccgcgccgcgcgcacgcataaaacccccaccacctgaacctccacctccactccacctccacttccacactcgagtagcgagcgagaggtcgtcgtcgtcgtcgtctcgtcgccgccatggagatggtgctggactggcgctcggtgggctcgctcctcgccaccatcatggtgttccggaccgccatgcgcgacttcctcccgcccgaggccgagatcttcctccgccgcctcctcacccgcctcgccgccgccttccgtccccacgtcggcaccatcctcatcgacgaggccgacggcgccagcggcggcgccaacgacctctacgacgcctcccagctctacctcggcgcccgctgcctcgccaccgcccccaccgtccgcctccacaagccccaccaagctccccgccccgtcgcctccctccccgacgcccacaccacccacgacgtcttccgcggcgtcctcgtcaagtggaccgctcgccccgtcgagcgcggcgcctccgccggcggcggcggcggcggagtgttcaacccttacaacccttatggccgaggtggcggcggcggcgagccgcgcagactcgagctgcagttcccgcgccagcatcgggagctcatccacggccactacatccagcacgtcatcgacgaggccaccaagatgcggctcaggtcgagggagcggcggctctacaccaaccgcgccgccgcccccggcgacgaccaccaccgcctctggacgtcgcacgccttctcccacccttccacgttcgacacgctcgccgtcgacccggcgctgcgcgacgacatccgcgccgacctgctgcgcttcgcggcgcggcgcgagcactacgcgcgcgtcggccgcgcgtggaagcgcgggtacctgctccacggcccgcccggcaccggcaagaccagcctcgtcgccgccatcgccaacctcctcgagttcgacgtctacgacctggagctcaccaccgtgcccaccaactcccacctccgccgcctgctcgtctccaccacgcccaagtcggtcgtcgtcgtcgaggacatcgactgctccctcgacctctccgaccgcaagaacaaggcgagcgacgacgagaacgcggcgcagctctcgatcatctccccggccgctgcggcggccatggcggcgatggggcgggaatccatcagcctctccggcgtgctcaacttcgtcgacggcctctggtcatcctgcgtcggcgagcgcctcatggtgttcaccaccaaccacccggagcggctcgacccggcgctgctccgccccggccgcatggaccgcaagatcgagctcggctactgctcgccgcccgcgctccgcgtgctcgccaagaactacctcggcgtcggcgtcggcgacgaaggatgcgaggacgccgccgacgatccggacacggtgagcggcctcatggccgacgccgagggcctcctcgcagccggggtgctcatcacgcccgccgacatcgccgaggtgttcatgggctgcgacggcgcgggcgccaccgccgcgctgaggaagctcgccgacgagctgcggcggaggagggacgcgccggcggtgcctgtcacagaggaggcggccatgacgacagagtaaaaagcagacgagccgccattgcggattgcttgaacttgaacagcatcatgatcaatatataattaataattttcatggtgatttggtttcgagttaggtattaattaggtcggttgtgatcgtgtcatggttgcgccatggatggaggatttgaggatttgctgcattttgcaatggtgtgtggctttctgaatttttcagcaattttctttgcgttttatgagaagttgcaccatgtcgtctcctctgcttttgttttgatctccggatatacgtcgacgtggacgtttgatggcaacgaacattggccgtccgtactggctggctgctgttgataacgcaaattcacagtagtcattagcacaaggttaaatttctgcaattacttgcgcgcatctcaatttgattttatatgtggctattcatttatatttgattgtttttcatattaaaagttcaaaaggtatttttgtaaaactacaatagaattaggtagagtttttaattctactctgcgtgccgtccgccgcttccctcttcgcacgcgacacgtgtccaatcatccggggaagacgcgcacaactggttgcggattagcattctcgacataaaagaagtaacagcaatgggcaaaataagagtaggttaacaagtcatgtatggagcttttgactaacggtagggttaaactaagctagaggagccgaaaaatcagagcacaggcttaccttatccaatatttcgagatgagtcaggccactaatacactttacgacttccataggtcataggtgactcgaattcttgaaactggctcggcatttggtgatatgatctatctttctacgtgtacataactttaaccttacttcttgtttacaaggacaaagctgtcgttttcggaacaatgcgaaaacaattgacaagaacaacactggctcagatataaccatgtttatgttacacttcaacaagctaaagatgcatagattctatataggtttacttattatacgtttgaacaaatattactgcaccataagttttatatcttctcgtttgaagaaatattagcatgggtgaaggaaatgagagcgggctcacgaagtgcttggatgatcaaataaattggtcggggaccaaactaagattttcctaaagactgctcatacatcaccatatcacttttagtctatagaagagaggaaattatgcacattttggattcggattcaagtctcctaatagcattaatttcaaacggacctagccaatgatctagaaggaatctcggagcccatgattatttattggaaagcttatggaatctactttcatatagttctgatcacacatcaaaattccttctaatctattggtaatctacaaaacaagccatgtacctcatccagtccaagtccgatttgaactttgggctttgtaattgtgtcgtgactcgtgggctaagcccaagggggtgtgcgccctagctataacaaccctaggtcgaccctagaatctatttaatcagttaccgtcatcaaattagggttggattttgcagttttgctgctagtttggtctgtggaacaccaacttatgagctccatcttaaattcgcaatatattcaaattgcatcttctactctcttacttgtgttctcgattcgcttacggaatatagtctttttggcgagatcaaccatgtttcggctcgggtgataactaacagaggggtggtgtagtgattgcacggggttcggtcattctgatcggagcttttgaatcatcaacatcaagtctccacaattaacctatctagtacctaacggaagattcagaaccttagtcctcatcaacaatactccccacggtaaagaaaatatgatatttaacctattttaaggtcagtgagatgccgtcctgaccataatacacacactctctttctcgggtataaataaataattaacatttagaacaagacttgtggtctagttatccttatacttattcatattacttattagtaaaaacattatttatgggtaaaacgttattcttagcggtaaaagacgagtgccataaaataaaccatgataaaaagaacacaaaaataacttaaaatcaagtttaaaaaatttaaattttggtttataagcataagcaaaacaatgggatcatttgtcaaacttttatagcattgatcatcaactttgcattgtaaaaaagaaattataaaattgaatgacttcacgatattacgatagtactgaaaagtgaaaacctacctacatatatgccatttgtttaacaactaagaacttaataaactattgatggtcaaaatttcaaaaaattgataatattttgtgttaaagtaaaatatttatgacctgagagatattttttttaaaaaaagttaaacatgtattggtggatcctacatgaattgcatattattactcagggtgcatatacgaagaaccaccacatgcatcttttctgctttagccaatggcaaagaacttgtagcaatctttgatgtcatgtcatcatcaactggtagaaaatttggaaaaagattaatccacccatccgaccagtaaaagacttgaccgaagcgtgccaaactcaacttttggatttcttgctaaatagtaccttcatattttaatgtatgacgccgttgacttttaagtagtattcaataatacgaaaacaataggaaaatgcatactgaaacagaacgagttgggcttaaagcttatgaagcccataaagtcatttaggcccattcatttttcctttcctagcgttgagctcgtccacgagcttctgcagcgcgacgtgggctccgtcgtcgccgtcgcatcccatgaacacctcggcgacgtccgccggcgtcacctgcacctcatcgagcagcctccccgcctcacccatgatctcgtcgtggtcgtcggcgtcgtcgtcgtcgccgaggtagttcttggccagcacacgcagcgccggggccttgcagtagccgagctcgaccttgcggtccatgcggccgggccggagcagcgccgggtcgagcctgtccgtgtggttggtggtgaacaccaccagcctctcgccgacgcacgacgaccagaggccgtcgacgaagttgagcacgccggagaggctgatcgtctcccgccgcatggccgcctcgaccgccggcggcagaagggttagcgcgtgttgcagcatcgcacggttgcgctgctcgtcggcgtcggcgtcggcgtcgtcttgggacgacggcggcgccggcgcgcgcgtccggtcgaacagtccgagggagcagtcgacgtcctcgacgacgatgaccgacttgggccgcgtcgaggccagcagcctccggaggtcgtagttggaggtcactgtggtgagctccaggtcgtagatgtcgaactcgaggaggttggcgatggcggcgacgaggctggtcttgccggtgccgggcgggccatggagcaggtacccgcgcttccacgcgcggccggcgcgcgcgtagtgctcgcggctgcgcacgaaccggagcaggtccgctcggatgtcgtcgcgcagcgccgggtcgatggcgagcgagtcgaacgtggacgggtgcgagaacttgtgcgccttccagagcatctggtgatcgtccatggcgccgccgtcgccgtagtaacagccgccaccaccgccgttgttggtgtagagcttcctctcccgcaactttgcccgcagcgccgccgcctcctcgagaacgaaggggatgtacgcgtcgcgcacgacgtcgcggtcgcgtcgccggaactcgagccgcaggcaccgttgccagccgtcgatcgggggcggcgcccaccggcgggaggaggaggaggagaagcttcccccgaacgacgagctcgcgttcccgtcgagctgcgacgtccacagcacgcggacgccgcggaaggcgtcgcgcgtggcgtgggagcccggcagcgacgccacggcggccgccgcgccgtgcgccttgtggaggtgcatcgcgggcgccgtggcgaggcagcgcgcgccgaggtagagctgcgccgcctcgtacagctcgttgggcacgccgttggcgtcggtctcgtggacgatgatggcgtcgcacggcgtcacgagggcggcggcggcgcgcgacagcagcgcgcggagcaggccgtgcgcctccggcgggaggaagtcgcgcgccgccgtgcgcaccagaacggcggtggcgaacagcgagccgagcgaggcccaggtcagcttcagaggcgcccccatgtgtgtttgcaagctagatagatggcttcgtgttcgaatggaactcgaattgccatggccatgtcgaggctatgtatatataaggagctcgggacacttgctacggaaccgacctagccccgttcttacttgattaagatacagaatttaccttgaatttcattagcatgtttatcagggaaagtgatttcatcccttgaggggatatcctcttgtttcgtgcatatataaactttttttttaaaaaaaatagtaagatagattagtacgaaatatatcaatccacaaaaatacaagttaaaattcaatttctacaagttataacaaatatagctatgaatgtacgataactattttcagtttagtttgttctttttgttgcaacttgtagaagttgaatttggtcttacatattgttcgagtgaaatattttatattaatctatgttgtcaaggagggacatcccctcgagggatgaaaatccatatcttatttatcaaacattatattagttattacgtggagttatggagggtattatgatttgtttaggtttgtattgatttggctgaaatatgaaaagaaaaagggtctttttaagacagaggtgataatgaaaagatcgggttgattactccatacgatgcttagtatacctccataatgattaatgagtttggttgagtgggataggtttagatgggtgatggccgtcggttttattttcaagtatttggatggccatatgcatctaacctcgtctttgaaccatagcattagcaggtagtacacttttcacgctaccatttgtagttatttttgttgatttcttcatatgccaaatcactgaatatcgtatgatcttttcttatggttagtaaaaaaaagaacaattttgctatatctcactcgaaagattttttttcttatctctcactcgattttctcactcaaatttacagtgcattttcttataagttacagtgtaatttataaaacttacactgtaacttttgtaagttgcactgtaatttttgaatctacgcatgtaaattttaaattttgtattggatttggtctttttcttgaggatatggtaatttagtgtccattatggtgtttcttaattgctttttgctttttattatatctatcggattttaatccaaagattaaaaatctgtgtgatacgaccatagaaatctttcgaaagatgtataggtactcccaaaaaagaattccaaatacagatgctggggttaggccaagcatcatgggcttagcccacagtagccaaaccgacatagaggtacgaatagagatgattagttgacttgactcttgactcttgagagttaatcattgcagatcgacgctgtttccctcgatcatcttttagtaattaagtagtacggcaataacgttaattcgtagccttggcgaccaaggaagctttgactaaagagcacttaacaattaagctagagaaataaactactccaccgtgcatgatacccacgcgaacagatcagcagcatataggaccataggagtatactcaagtggaggaccataggagtatactcaagtgggaaactcaggactttcagcatagaatggacaagagcataattcgtccccttccattcccaacaaaacacaccctagagcataatcgaaggtcatcataagagattcccaacaatgtaaatcattcaagcatttctcacattcatattgatgttcattcaagcatctctctaatatgaatgtgggaaatgctagaatgaattacattgtgaaacggaggaagtacatagtttagttgtgctcatctttcagtacagtataataatttgataatgacttgcatactgttttaggacaacaattttacactataacataaattcttgtgctttacattgttattgaaaagattgaccttttctattcgtgcttgactttacagacttattttgttgtgctgaccagtaattccctgataacaagtccattaaccaacttgaatgaaggatacaagaatggctatataggacaagatatagtttaaaattatattttatgatcaatttgaaccacgaattacagttcgttaattaacttgcatgaaggatacaagagcgatcatacacagcacaagatggtttaaaaagatattttatgatcagtttgaacaatcaactaatagttcattaaccaatgtgcttggaaagttggaagaaacaacaatgatcatacaggacaagattttagaaaaggatgccattaaaatgaaaatatcataaatccatttaaacttttttttgttcatttcaaatgagcataatgtcaagagataaaacaggggcaatttatacagaactaaattatcagaagaacgacatatcaaattagaaaggaaatggcagacagagaaatacctaaacacaacacaacaaagggaagcctgaagtagcaatagttaacacacctattttggatgagccaagccttgggtttctcataaaagtaatcagtaataagaatatgggtttctgaggtctgaatattagcaaatgctattatttcatagttaccatgaaactatcacagatgttaggcagtgactatgatatcatgtcattcggatatggacctataaagtactgatttactgattcagtgacatatgcctataacataactgcaacttaatataaaccttcaaagaacaaatgcacattgatatcaactttcaccccaagaattccaagcccgagtgttgtactattgttcagcaaagaatcagccactgaagaaatttcaaaacagataggaaatggcgtttttattaatccacatatcatggcagcaaaccaaattgttcattttaaaaaagccgcaaaaaacaatggttttagtatcaaaactttcttgataaaagaaacccaaaccataatctcaatatgctaccaatttggttctaacttaagtaaagagaacagataaacttgagcaaagatagcaaactaaaaactactccacatgtactcacacaaaaacaggaacggaggcagcaaaaacatctcctaaaaaaatatggcatgttaatgaactaaactagtaataacaaggatggaagggtggggcaaatgacgatattgtgtaaacaaaaagtcaaaaagaagatctgagctaccacgttaaagatggatatgaaaataatgaacagcagcagcataactgcagagcgccataacatgttccctctttggtgtacaaactatgcattgatatacaagaacagattatagctagagcaattaaagacagttagcagcaaactaaatcctcttacagatgggccacccatatgcagtaatatttttccctatacttgccttcttactcatctgcaaatttatgaagaaaccaggttatttctacttgttactaagctcagtcacagtaaaaagattaaatgagtacggaattttgtttaagataaaagactacctatggaccaagtacaagtatctcagaattttaaagctgcctcacctccattatcaaagtcattaacctacgccttgggtagccggaacacatcgttgtatatttgttattagcaaatgcagattgaataggcagaggcaccagtacaagcctcttctaccaccacaacatagagcaacgcttttctccttccatacataacggaatcaatggaacacaacactatgcataggatgcaaaacacaaacacaaccaaaacaggaacacataaattatctagccagcaaaatttgttacattctggaatcagagcttcagcaaataggaaaaaaaaatctgatggttcccagttgaaattccaacagacaatggttgtcacgactcatgacaaatagggcatcggacgactcagaactaatctacatggatcacagcgatcaaaatcgcgacaggcatgaaccggttatggcaagagaacctacaaattaagcctggaattgcaaatgctgcactgggtaatgtacacaggatacaaatctcaaaaacttgcgtgggatgagaattgccgttaccttctagcaggttcctccgatccgagacctacccggcgatttcccagcgcaccaagctccattacgatggctcaacgtgggagctgtggagtgagaccccgcgttcacccacaccaacgcatctccatctccgacgcccaaacgcgacacgacacaaccaccgcctcgagacggaacctaaggtttctccggtgtgctacgcggggtcgccgctctcgtttgcggccgcttccgcggggggaaatccggctggagagaaacgaaaccctaacctaacgaatcctgccctatctccccctcctcctccaccgcacaaacaccaaggcgaactggcgccgccaccgccgggacgggaatgcaaggcttaccgcggattgctcgtcggcttctctcgcgaaggcatcacggcggcggcggagcggaggcgaaaccctagcgccgacgacgccccatgcgattcggagatggggatcggcgcggcggcggcggcggttcgagaatggggccc

SEQ ID NO: 8320 - DNA, 48333 bp, Oryza sativa
aatggctgtttgattggaccacaggaaaaacgcaggaatcagatgagagagatagactcagaggaaatgttccaagaagttagacctcttgctaactttcctccaaaatgtgcataggattactcattccatatgaattttaaaggattggatagaattcaatcctttgtttcaaatgccttcctagaattttttttccataggattgaaatcctctaaaatttctacatttttcctacaagtcagaggggcctaatcattttcaatgcagtactgtccgacatgtacaaatgttgaaaagtttggagtctgtagagatggtttaattcctgcagctcctacgtaggggccggacccccattggacaattcgtacttgacagtaacttttcttcaccagtacagacaaacccatagatgaaatcttccttacaaactttcaagcaaccgtctggttaaaaactaacataatggtgtacccagctggtgtttcacaagcttctcaacttgttgtttcgatcttcctgggaataaagattcaagaagttgtttcgagcttctcaacttgttgtttcgaccttccttctcaaggtgaatccatgacaataagtgtagcagtagagaaaaagagtacggcgatatcagcttgctggtcttctgtgctgaaatcaccctggcatttaacaatgtcagtagtaggcaaacagcctaacactgtcaatgaccgcataattccaactcgagtgaaaacattgcagtatggccgtacagtggagatctggttaaaaaaacagtaaactagtgaggagacttcaaccctcaaaagtattactattagtcagtaactcctcaacatttctgcaaaacactgtcctattgtacaagcaggcatggtgaacagaaaataattattgacataaatccaacacctgaaatacagtgtatgtacatcattcaaacacaggtcagaagatgggcgatgtaaagctgccggttagaaatacagtcagaagctagtaattttgtacagacaatttattagagcaggtacaacttcacatatgtacagtaaactgaaccattggtccattgtagatggctgtactacatacatggcagagcaaatctagtgatacttgatgatcaaatctccccccggtagccaccaccaccgaagtaatcacttcttgctcgagcaagcgtgacactgttctggagctgctgcttggggcaggcctcgatacgatggccaaggccaccacaaaacgcacagcccttcacaccactctgctgagcaatggccaccttatcgtcctcctgtggatcatcaagatcagccagaattggtggtaacctttgctttgattcgatgagcaattgcttcaggtcaagaagcgtagtctctgtctggttcttgttgatgaatgtcgttgcgacgccggttttcccacgcctgccggttcttccaatccgatgcacatagttctctatctcagcaggcatgtcgtagttgatcacatgctggatatcagggatatcaaggcctttggatgcaacatctgtagctaccaatacatccttttctgaggctttgaatgatttgaacgcgtcttttctttcctcatcatcttttccaccatggattgcaacagcttcgacacctttcagaagaagaaattcttggatgtaatcgacatcggctttgtgctcgcagaaaaccagcacagggggtggggttttctggagacactcaaggaggtatatgattcttgcttcctccttgacatactcaacctcttggatgacatcaaggtttgctgctccagctcttcccacattgacaatgattggtttcactagcgcactctttgcaaaattctggatcttctctggcatggtggcagagaagaggagtgtctgtctctgtgccttgaaatggtcgaacacctccctgatgtcgtcctcaaatccaagatcgactagtctgtccgcctcatctagtgttaaatacctggacatatgaagaaaattattgagaacattcaaataatcaaggaatgagagctccatcagttggcctaataagccaaagcaaaagccaaaatttgaatttttgaacttgattttggagttgattttaagatattctcagtgtaatttctttttaccgttggtttttaagtcgctacgaacaaaaatataaaagttttacctataaattaattttcatttcataataagccgttttggcttattaggaaatatgggaaatcgatgaggctcgaacaaatggtttaattactggaagcatacaatcagtatatttggctatgctgtgaggctcaaaactgaaaggaatcaaagtagattcaagacacatctgcagccttctttccatcttgtttgattttttcagctttgagcatcgacatttctattactttcatatgattagcagatagaatcttgttttacacaagcagatagaatcgaatattagcatctctccacatccccttcgaaatgactactcttacttgaaagttgtacttatgtatcatcttcacccaaaaggccaaaacttaagctgatcactaattttggctgaatttcaatttccagttgacaagctacaaggaagaccatctctgcagtttgcatatattctgttctataaacgtagtgttctgacttttgacaaagtcataagcagtagtaaaaaccattttctacaattatatcactaaactgaatactgtttagctgttcatacttcaaaaaaaaaacccaccatttccatgatactgaacatatgaacatagcgctatgaatgccaatttgatgacagtgaacaattagccatggaagcagagcattcctgaagaaatcagtgcaccacatacctgcagttatcaagattcatcttcttcttggagagcaaatccttgagcctcccaggagtcgccactacaatatgcacgcccttcttcaccacctccatctgcgtcctcatgtccacgcctccaatgcagagcagcggccgtatctccgggtacccggcctccatgagcggcgcgaggaacatctcgatcacctcgtgcgtctgcctcgcgagctcccgcgacgggcagacgatgagcccgaacgggccctcgccgggcacgatcggcatcaggatctcctcctgcagcgccgccatgatgagcggcagcacgaacaccagcgtcttcccggaccccgtgaacgcgatcccgatcatgtcccgcccggagagcgcgacggggagaccctgcacctggattggggtcggcttctcgattcccttgccgcggagcgcgcggaggatgggctccgggagacggaggtcgccgaagcttcgggacggcgggggcacgtcgtcgccgtcgacaaggatgtgccagctccgtcgcagcgcgtccgcgcgggaccgcggcatgcggcggaggcgaagcggcggcctccaccccgtggtgatcggctcggagtagctgatccccttcgcgatctcgccgacgggcatgagggccttgcggtcggagaggtgctcgatcatctccctctcctgctggagcagccgctcggccggggtcacctcaggggcctcgcgcttcagcttcgtggccttcacgagcaggctcgtcttgaccgcaacctcacccaccgccggcgacgaggtggagcgcggcggcggcggcggggctgcaactgcaactgcgttcgtggtcggcggtttagtggcgcggcggaggcgttcggcctccatggcccggcgcttggcgacggggacgtactcctcgtagtcctcctcatcgctgtccggtgttccgcggcggggcgagtcgccggcggcggcggcggcggcggcggcggccatggcgggatacgagttggagggaggcgattcgcccagggagaggaagtggtggcaaaagtcggtttcgcctagaagtcgctagatttgatacgcgtggaggcccagtagaaaggctttgggatgcagctgggccaagttcgcgagtcccagtagagatttgggctttgtgaaatctggagattttatgtggccgaccagtcttggatacggcctggcccattttgttggttatggtcagcccatgaatgaatggccagggattctccagtccggtctgattgttacgtgggccgtcagatggcacatggccggagaggtgacaggcgggggtgctggaattttttcacctctgaggttgaaactcttgtcagtaggaaatggaggtaaatcaaatatggagtccagtctcataaaaaatctctttacacctctcatactgagaatcatactcctacatcaacattgaaaagtgttacacggtcactgtccatgtgttgccgtaaaaatcttaattcttaacagtactgcagccactctatcaccgtacagaccgtcactccatgagtgcactgcgcagcagggtgcagatgagaagcaaatgatagtccatgtttttatcgtcattgccatgcatgcatacagctggttgccatttgcgagaacagcattcacagcagtgcaccgtacgtcctttcgcgtcgccttctgccaccccggcccaccagcctatcagaagactatcccctgtgtgtaccagtgtatcatatcgatcgccaaaacggaagtttcaataatccacgctatatttttgcctgttcaaaacacagaatggaaatttcacttcacgcaatagcactagccctgtactgtaacacttatttaggcacgtgatgcttggagcgaggtggagattaaaaaaaaaattggcgatgtcagtctaatcggcgagttacggcgcccgtgctatgaatgcccatgcatgaatgtcgcccatctgccaaattaaacgagcgcgtaaatgatgcaacaaaacaatgctttgaatcatcacggcggtggtagctagccatccaattttgaagagccccagatcgatccatcgaacttggctcgtctgaatgatgagatatcgagagatcccttccctccctgcaagctgccgccaggatgcgacgaatcctctcgtctcgtcggtgggccggacggacggacggacgaacggcgaatgcgtcagcgcacgcagcagcgcagcggataaggcaaaaacgcgcagcagccagccagcctcgcgaggacaacacgtgccagccgcgcgcaggcgctgcagctgcagcagcagcggcagcggggtcgcgcacgggggacacacggcggatgccgggctcgcgcacgcacgcgcgcacgggcgcacgggcgcacggccaccccagcgctgcgcgaaccgtacgcgtacgagccgtggcacagctggagcgcagcggtggctatggcgtcacgagatcaaccccacgtaacgtacggtggtgcagtgccgacccgaccggggaatgatggcctgacgccgggatgccgccgcgcggaggacgcggccggggaaggcggattgatctcgatctgcccatgtaaaaaggcgaagaaatcatgcatgccgctcacacgccgtcacgtacgcgtggcgacgcgacgaggcagagtaggcaaccgaccagctgctacccgggagcaaaaccggcgtgccgcggttgcgcgtacgctggtttcgtgctttctggaaacatcgtactgtatatactttcagtatgcgactattagtatagtataatcttctcgcggagacaagtattttgtatattatgtaacgacctcagcagcagcagcaacagcaatggagtactcctttaattagatgtgatgtactatttgtagtaggatatatcacatccaaccaaattttcttatacgtagtattttctctgttttataaagtaaatattttagcattacccaagtttatagatatgttaatgaatctagatatatatgtgtgtctatattcattaacatttatataaatataaacaagttttatattataaaaatggagggaatactatttaggaacagaaggagtacagtacagtgcttctgctagctagtgctcgcaatgtagagatgatacgtgtggcgactgatgttgctaggactgcgagtattgaacacactcacagggcgctgtgttcagcgacaattttggagttggcagccataaacgcagccgagagcgagtcagctaacgctagctaggacccacggagggacgcacgaatcagtcgcaatgataaggctaaaggctagttgatgcttgctggtgagtggtgatcgatcgatcgatccatcggccggtcacggctggaattaatcggacgcgtttaaggcgtgcggcggagcgcatcccatgcatccggcagggggtccgaatcccttcaggcttcttcagatcgatcagctcagctcagcatcaggcttgtgttaatggcggggagcaggcaggcaggcaggcaggcaggcgtgtgagcgttcaactccccttcaaatttggagctgtagatttgctgatccactcgtacggcgtacgtgcagcacacgattgatgagtgaggtagtagctgctccagatgctagctggcacacgatcaacaacgaagaggaagggaccccatccttgattgattcaattcatcgcagtagtagtagtatgcatgatgcatctgcatgcagatgtacggagtactcgctacaggttagctagcgtccgtgcgtaggccacgcgtgcatcgcgaaacaattggtaacctgcaattggggctgatgagaaactactccacgcgtacattattgttgttcagctgcgcgtatcctagtacgtcgtgtgtgaaacaactcgatcgagtcgtcgtattgcaaaaaaacgagtcatggctttgcacgaccgggtacaattctttttttatactcttctccattgatcggtgggaacgaggagggctcttggagtttttgtctgtgtacgtgtgagccaggccagagtgtcggacagaggtttagaatttgtaacgtgggtttggctgtgtttagatataaagtttggatctaaactttagttcttttccatcgtatcaacatgtcatacacacaacttttcagtcacatcatcttcaatttcaactaaaatctaaactttgtgctgaactaaacacaacctttgcgtctggattgaggccaggcatgtacatagagctagagattcagttgaagaacacataatttaatttctccatgttctcatcaattcctactagtatgatagtatcattcggtttgtaggaatgagatatatacgaaaacaaaagaaaatccagaaaacatagaaaaaaaaattatccaatcgaatctcttgaaaaaaattctatgaattaatgtgcgcatacatttctattactccacattttctatttctatgaattgaaattcctccaaacctaacaagcctaaaaaactcatgtaaatcgggcttaaagttacttatatttgagacccgggagtacctacaaaaccattattttcagagaaactatagtaaacttttaaaattattgcaaactagccttgagattaggaaaagatagttgtacatcaagatttctcccctgcatcaaagccctgtaaattcatgatagcttaagcattgatcttttgattgatgcaggatatcactaaaaagtacttcctcttattactctttgtctaaattcgttgtcttaggaggagtcacatatcttattaggttgtttttttttaagatgggagtacagcacgtagctcatggtggttggttgattacattggcatcctttattttcaactcccatgcgtggtacctatccttatcaaatgtcttaatcagtttcataatcgcaaaattgaggtggcatgagtatgtttccaagaaaatgatgacacgtttcaaaacctctgcggagcattggcggtatttgtaatcacacgggaccgtattctaccaatacgtcgaaatgtgtcaattttaatttatcccttaaaattgtgcaggagctgaacaatctactacttagtagtacatcaaggattctcatggtgcaaaatccgcagttaaagtcatgtttgcactagctaaaaatttcatactaattgcctaaaaagatacggtggagtaaacaaacagattcataactttttgacaaccagtattcgtacagtcgtacgtatcgtaggacactctgattaatatagttctgacagatatgcaattgcttgccatgcaattatagctagctgtatctgcgtagtactgtagcacagactgatgattgcacttgatgtgctctaaaaaaatcggtccttgaaaaaaaaagcgtgattgagaccctgtttagatgggactaaaacttttaagtccctatcacatcgaatatttagacactaattataaatattaaacgtagaatattaataaaacacatctataatcttggactaatttgcgagacgaatctattgagcctaattaatccatgattagcctatgtaatgctacagtaaatattctctaattatagattaattaggcttaaaaaatttgtctcgcgaattagcttccatttatataattagttttataattagtctatatttaatactctaaattagtgtctaaatatagagactaaagttaagtccatggatccaaacaacacctgaattcatgaacgcaaaagaaatgaaacgaatggtgtgagtggtcagaggtagtaccagcacaagtttgacatgttctcaggacaccactaatgtatatagtaaaagttaaataaactttaactatagcacttctcacaaatgtatatggatacaatatgacattaagagaagagagagaaatagagatagataatattatttatatcatatgggtagttcatatgcatatggatacattttgctattttctttatatgaactagttgcacaatgttaataggtggctgaatggaatagtttatattgtggatgccctcatagcaatgcaacttcttttcttaaaaaaatctgtggaaataaattccatcaaaatgacgagttaggcaaatcactaacctgtcatttgagatgcaaactctattaaatcttcaagccattaatttgcaagaaattaagaatccaaagccaggctgatattagcaatgcattttcctgcattgtcatcgtttcgcacatgactgatacgcttattgcgaaaaaataattaataaatatctttttaaaatgtgcatttaacgacttaaaaactaatgctaaaaagtaaacaacgattaaatagttatttttaaaatttaaattttggttggaactaatagtccaccaaatttatgtacagttaaacctggtgcattggggtcctattcagattcgtagtttctagaaaatatcacgtacctttaaaatttcttatattatactactccgtaggacggagtaccaaagaaccacaagaaaatttatacggccatctgaattctgaggagaacacaaccaaagatggcaaatccagcgatgagcaaacgagccgttgcgtccagaattcgctgaacgtctcggtcgattttaatatctgtactatactactacgtgaccctctatggcgtcgtcgagccgaaccgagccgagccccctctgctgctcgctacagaggccgctgtctctcgcccctctggtgccaactcacacccattacacggctggcaatggcacggcatggcatggcagagaaaagatcactcacttcgcggcaccatccatccaaccatcttccaaaacccctatataaaccccagcttcgccccctgaatctcccacacacactgatcaccgacacaaacccaaagctaagcttcgagctcccccattgatcagtgagctagctagtagctggttggttaaaaggcctttttgttttgtttgagttggagcagaggagaagaatggcggctctgcttgtggtcgtgttggttgccatgtcggccatggtggcgacggccaactttaaccaggagttcgacatcacctggggcgatggccgtggcaagatcctcgaggatggccagctgctgacgctcacgctggacaggacgtccggctcagggttccagtccaagcacgagtacctctacggcaagatcgacatgcagctcaagctcgtccccggcaactccgccggcaccgtcaccgcctactacgtgagtgtcaccttccgccgccgccgttgttgtcgccgatgtgatcatgtgagctgatggtgtttgtgtgtgcagttgtcgtcgcaggggccgacgcatgatgagatcgacttcgagttcctggggaatgtgaccggggagccgtacacgctgcacaccaacgtgttcacgcaggggcagggccagcgcgagatgcagttccgcctctggtacgaccccaccaaggacttccacacctactccatcctctggaaccccaagcacatcatgtaagtcaagtccacacaagaattcagaaattttacaggtgacaagagaatgaatcgtgaatggattgttcgttttgtttgttgctgcagattcatggtggacgacatgccgatcagggacttcaggaacctggaggggaaggggatcgcgttcccgaagaaccagccgatgaggctctactccagcctgtggaacgccgacgactgggcgacgcagggtggacgcgtcaagacggactggacgcacgcgcccttctcggcctcctaccgcggcttccgcgccgacgcctgcgtcgtcgccgccggtggccgcacgcgctgcggcgccaccgtcggcaccgacgccgcacccggcaccggcgccgccgccgccgccggtggatggtacaaccaggagctcgacctcacgcggcagcagcggatgcggtgggtgcagagcaagtacatgatctacaactactgcaccgatcccaagcgcttcccccagggcgtccccgccgagtgctccatgtgatagtaagaatatcccatcgtcgtcgtcgtcgtcgtcgtcgatcgccggcggagcaagatggccggagatgaggaaggtgactggctggcgtctgtaaaaataaataaagattggcactgggggtggtaaaaaaaaagtgtaatgtagctgtggtgggtaaaattcttttttgttctctgtttcgtagtaagccactgcacgccctgttcgtgtgtaactgatcgtgtccatgcaacaattcatgtgtaatatattcctcaacaacatacatgtgtctcgtcctcgatgtgcatacgtgatcgtgatctgctctacgttgcaactgtataaattttgttgcttactactccctcaatcccatcccgaaacaaattcatttttcacatatttcgcacgtattaatctctatctctactattataaatattgaaaatgtttttgtcgatattttgatacgttattcgtgtatgaatcggtttttaatttcgtttgcttttaaaaatacatatatgtatttgagtcggttttttaagactgttcacttttgataatacagaaggatttatataagaaatctatttaaaaaactcgcatgctaacttgagatgatcagatttctaactgcagctcataattttctaaaagtatatatatccaagcgaactcgcgactaaaccatataataataataagattaaaataaacatttctagaaaataaaaaagtaagaatttctcaatttctcaaatcctaatacaattacttatttctttattgttctctatttaaaaatcaaattattttggaataaatgagggaaacttaagaaatgaacttactgtaagcggaggtgtacaagtatagagttttggtctgattaattactcgtggtacagtcatgcactgtgcgttgaaataagttgatcttggtctatcgggtttcaaaaaaaaaagagttgatattggtcttattggtcagcagtgtgtgtcaacaccaggtcaattacttacgtacgtactcctactcagcactgggtctatcggagtagatgttgcggtctccaggtgttgaacagctgtgtgtagtacgtacgtagcctattccattattcgatgccaaacagtctctttaattgatcattaaaaaattaagcgtcttagtaattctttacgattcacgatatggatgtttggttcgacaagagagctttcgtgattagtgcgaaaattaagatacgattaactaaagatgctaccactagtctacgtcacacacgagtatatcagcatggaacaaccaaacaaacagatcaattaacttgattcagaatcaaatccaagcaaatcagttactaactcgattcagaatcaaattcagatgcccctctctcagttaatccacaaggctaattaagcagcagcatgagtgagtactgtgcgagtcacaggacagaagacgacgagaaggggcacgagtacgaatacacgagaaggacaagggctcgtaatgatccgtcaggtctgcagactctcagttgtctcgctgggcactgggcgatcgatgtgaaatgcgtgttcaatttctgattcggacaagtggccgcaccgacagattcacagggtgtagatagccttcgcccatggctggcctggccatcgtcggtcggatttttggatcagcacgaagctgatcgatcgagccaaaattcaccaacagaaacagatcgctgctgctacacagtacagagtaccggaacaaagctacaagccgtgatcttctctttctctgaagaaagatggtggctgtgggctgtggctgcttgccttatcctttcgagctggtcaggtcacggtctcacggaccagccgtttcaggctttcagctactaggagtgtctgaattttctgaataaacaattttacgttacttgagaatatatcataaggcattattttttctattgtaaatttggtatctcatgttacttagataatgtgagataccatgaggtaccaaaatcaccttaaaaaccgtagaattgctttctaaatatttagtaggtgctacttgcggtttcagtcgcccacaccgcttggttgtggtgttaaactggtagggacgttagcccgtttgtagacgatcagtactccgtggtgttaaactgttaaatttggagtagtagtagaaatcttcggtacaatgctttaatgaatcatgatgaaaagtcaaaggatgagcttgcagttttgcaaaatattgtgacaacctattaggatcaggctgtgttctagagagtttttttttatatgagcacggtttctgaaatattaaatgatattttttatataaaaacttgttacataaaattattttagaaaattaattaataatagtttacttaattaatcatgtgacttcttttcatttttttgtgttattgaatcacctcatccaaagtgttgtcatgaacaaagccttagttctttttaattatttatcaaactgttcaaacagattatttacgcggtggtaaaataaaataaaatttctataaaaagaactttcttctacttatattgcttagaccacctattttcgttatttgttaaatatatttaccacaaatattaatttatccctataatcgagtagataatctgcggcaacaattcactcaacaacttatttcaaacgaacatgagtccgttggtgagttttgagctaagtacaacaatctctttggcaatctacactaatggatgatttaccagaaaaaatggagaggagaatgactaaagatgtccctatttcttgttttttttttctttatgcaccattgtttcttgttgggatataagttcgctaagtgtcattatagttagctgtacctacagtgtgcgagtagtatgcaaccgacgtccggctgttttgtcacctcatcatgtctcttcgggtgtcgtctgatagggatttgggagtgggcatgcatggtatctgcagtaaccagtgacttacgattgattgctacacaaaagctctatcacaacttgtgactcttgcatgagcatcaacacacatgatcaaactagtacatctgctcttccttttgtaaactactactagtagtactagtaaaaattatgtactcctacattccttgagcccctttgttttagataatgacattccttagaacttttggaagcttggtttgaacagcaattaaatcatggacggttcagggagttaacaacttcaacaccaacatgtcgtgtatacattttttgtcgtgtatacattttttttctttttgccctgtttccgctgattggagttgcgtttagtcgtcgtactctcttcatttttggtttttctgttttgttttttctccctccccttagcataaaccggtttagctgattgcgttgtgtaaacaaactctctttttttctaatatattgatgtgcaatccttttacgcgttcgtggaaaaagtgtacaaatttttcaatgagagtttgaaatccaattccaggaggaaaaaataactctgaaccagtactgatctatgcatgattgagctggttgtacgcagtgcaatgatagactcaagaacaggatatacccacattgtcaaatttatgaagtttaaacagggagccaaataattggttgtccacgacgctttatttatgggtgggggtatatccgtatatgctagctagtgtcattctgccgccttcgttgcactctgcattgcgggtgtgtttagttccacttttcctaaaattaaaagtttatatatgtaagaaaattttgatgtaatgaaaaaattgaaagtttgaagaaaaagtttggaactaaacaagggctgcaagggctgcatctcttgttctcttgcaagaccctagcactagctgcagtgctatactgccgttgacaagtcacgtagagacaagagcaagtataatagggggttgtaattccgctaaatgctaaagtagaggagaaaagagaggagaagcgggctgtaaacttacagtcagcttggacgcaataaccaaaaaattacgtgagagagacaggtgtgccatatatgaattgtaaatagctaactattatatgcgtaggctaagaaaaggctataaagaaccaacaagttagttgtattattaatcttgctctaacttagttttcttttttcttttttcttttttttaaaaaagaactcgaccaaaaggagacacatcccgaagacattgcatttaaggtcgggaacttagttaagcattaatttggatcataattcaatagaaattttataggtaaacgtgggaaaaaatatggggtcttttggatcgtaggattaacctcgaatggatttactccctccgtcttaatataaacaataaatatagattcatggtattaggatatatcatatgttattttattttacgtgaaaattgttatagaatttggctccttgctagtccacgctatttcttgccgcacatgtaacatgtttatttgtactgtgcaagctataagagaaaaaaacatcataattgctattactaaatgatccaaggtcttacatagtagctgtataccacactctctttaattaattaatcatttgatgattgcaagatggtcctgaacctagtggaagatgagattacatgcaatccattccagatatgctgctacatttccagatttcacttgcctaacagagtcacaggttaaaattcgcactacaaataaaacagagatacagtagctgagttggactcattgcaaattccagcttcagtacattcatccaaattaattgcacaatttcagcaccaacataattggcacacctgagttcagacaactaccctggcctaacctgcatatgattagatattagaggatcatcatctagcctaattagcatttgggaattgggattactacttttgatgcatcaatggcattctaaagcgactttctgataactgagggaccagtccctctcctgcggacagctgctatacgtgcaagactagtcctcctcttggattggatcacgccttagatagtcctggacatcattaagtttggtcaagtatgagaaaactcggttgcttcttttctgaaagaagataattcagttgcttgtcactacttgggtttcagttactatctagatctatcatgtatgcacttcatcctagttggaaggtgatggagatgcaagctataaatcacactatctgtttaactataagcttggagaacacatgtgatggcacatggcctgaaacaacccaaattatgtcaatcatctcgcagagatgaaaggcatggccttgaaagttgaaacccatccgaatttaaaggaggctttaatagccactgacgagcaacaagaatgcatttgctgaactttcaactcggcctatgaacatcgagctggatccaactcgatcgtagcttgctgagagcttaaatgtgtactctgttctgaactctggacactgtctgtgtccagctaaaccgtggtgcggcgctcaagaggctacgaactcggcaaaaggctttgctttcgggtagtagggtttaatgtttgggtgttagtgcctttgtgcttttttgtgcaactgatccagctttgatgttgcctgaaatcctgcattgttttctgctctgccgctagtaaccccaatcaccactcgaaatatcaaggaacccaatcattatccattgtgcttgtgcatgaacaatcctgtccgatcgctcaactcaaaagttcacagctggaaaattttatcattgtcctacccttttcatgctttcgtccgtgctcatatgtaccgcgagtgcaacaaacaaaatagtttagcgcagctgaattcctggaaatttccatacgaaagtttctagaaaaaaaaaaacgtaagtcaggagcacagctgcgctaaatagcaaatctgcaattgtaacaaccatccctccaaaaccgcgtagcgtagcccaaccgataagcaggcccacttacacacatcactccccttacactttcgttatcgcttcgtgtaaaagggttaacccgggagtgatgtggttggaaggaagaggccttataagtcggttccactcggctaaactagtaaggtggtactaaacatgcgcacacaacttatatgggccacacaggcctaatccttattgggtcgggatgtcacagcaatcccctgacataggcttgtctagctgagtggtgctgtgtaacaaaaactcgttttcttataatatattgacgtgtaatcattttatctgttcgcgaaaaaaaaaatccccgatcaatattggtaataggagttatagacttatagtacttaccggatgcatccacatcttgctactgcgattcgatagccggtgagaccacaaatcgtccgcattgacaacgggaaggcctgtgaccgcgcaacgcgatcaccgatcaacacgcgggctcgtcggcgccggtgctgatgctgatcgatcttacgtcgcgtcgcgatttaactttggcatcagagtatcagacattgtcaatttttctcttgtcatcgcctcagctcgactgatgaccggacgaggcaacgtcgtcgtcgcgaccgtgccactggtggtgtagctagctagcgcttctattacgacgtcgtcgtgtggtgcaacgagaaatcctgccgctattccgcacgatgctgcatcgtgttgctgccgagtgccgacagattcgcctgggatatctatccctttcgtttgcccataatcgtttgaggaaaacgtggatttccttgtagatttgtagtttctactagtgacaggctacgtgcaaaagcgggttcccaaattcccaatcccgtagccttcttgggcttagcttaggtgcaaagtggggtacaggagaagcccaatcttgtgcacaattctaccagggaaaaagtacaccgaaggtccctcaacttgttatcgagttacaaaatcgtcgcctaaccgtaaaaccggatacaacgcatcccaacttacaaaaccagtgtagattagatccctcggtggttttgcacccggttttgtccgacgaggcggctgagccagcgtgggacccacgtggaccccacatgtcaggatgccacgtcagcaggctggcctctcccttcctcctctctctctctcactcctctctggactgggcagggcggccgacggtggggaggaggtcgccgggtgaggagttccgacggtcggccggcgatgcggcggcggagacacgggagaatgggagggcggcggcagggcgaggcggcgtcggcgggcgagcgcggtggcggagaggcggcggcggcgacgacgccgtcgcggctcccactccctctcccactcctccccaagcagcggcggcggcggccaccgagcagcggcgcgacgagggcatcgttcgccatggcggcggcacttgggctcagcggcggcgaggcgttccggctgtcggcggatgcgggcgcgggcgcgctcaagctgcacaaggacgacatcaccctctggtccgtcgacggcgccaccgtcgccatcgtacgtccttccttccttgttaattcattcccttcctcgatccttgccgatgcttgtgttcgtggctatggtgcgtttcgaatctgatgctgctcgtgtggatttggtaggattagtgcgcgtggccacacatttggtgggattagtcttgtgtttgactttcactaatcctcaatctttctagaaatatttgcaaaattgttaaagcaataatctctaactcttaactatctgggtatgacgacgaagaagatgacagttattcatatttctcaggttaatgctgctaatgaacgaatgctaggaggtggaggtgttgatggaggtgattgaatgcagctactagtgagctatcatttatctcatcacggattgactatctcatactccagtacaattctcattgtagctatacatcgagctgctggacctgaactcgtagaggcctgcccagtccagagacgcggggctggcagattctcctacgccgacgagcttctcaaggcgttctgcgctgcctttccttcttcttcatcgtcgtcgtctctgccgacgcctgcgccgccgccgacgcagccgcagccagagcagcagaaaccagtggtggtggtgtgtaggagaatctgccagccccgacgacggcctctccggcgaaggcgaagctggcggccgcgaggcaggtgccaggcggcgtggctagatccaagaggaggtgagctttcttcactttgcctccacgctcacccacgccgtcgccttcggcttcccgcgtcgcagccgccgccgccgcctcctctccgccaccgcgctcgcccgccgacgccgcctcgccctgccgccgccgtcccattctcccgtgtctccgccaccgcatcgccggcgacctcctccccaccgtcgaccggcctgccaagtccagagaggagtgagagagagaaagagagagaagagaggaaaggagaggaagggagaggccagcctgctgaagtggcatcctgacatgtgggtcctacgtgggtctcacgctgactcagccgccacgtcggacaaaaccgggtgcaaaaccaccgagggacctaatcctacactggttttataagttgggggatgagttgtatccggtttcgtggttagggacgattttgtaactcgatgacaagttgagggaccttcggtgtactttttccttctaccaggccttactgtccatcacagagcgatgtagcccacagccaaatataaggctttggagttcggaaggcggaactggacacacggcccatcctcttttccgcggtggactggtttgcgggccagaccaacaaaacaaatgtaggaataagtctattttgcttccctcaactcatgagcgtggttgaatcgcacccctcaactgcaaaaccgggtataacccgtcccttaactttcaaaactgttgcaaatcaactctctggcggtttcggaggcggtttcatcctacatggtgggttgacttggtattcattccacatggcatcgatgtggtgcttacgtggcactaaaataaaaacaaacttaaataaaaataaaaataaaataattcttggacccacatgtcagttacccaactcctcctgctttatcatcggcggcgagcaagatggagagagcggcggagcggcggagcggcgggagcagaacgacaacgggagcggagagagagcagaggtgaggaagcctcgccatcgccgcctcccctcctgcacccctcctcctccgcacaggtgaattgctcctatagttgcacactcatattggatgcaaggacgtcgaggacacaaggggatcggggagtcaaagtggccagggtttaaactagactcaagcttagtttagcagcaagggttcccaacccatctttttcatgttccgtgcgcacgcttttaaaactactaaatgttgtttttttgcaaaaagtttatatacgaaaattgcttaaaaaatatattgatctatttttgaaaacaaaaattagcaaatacttaattaatcacacgctaatagaccactctgttttccgtgcgctggagatacgttcccaaccgcctgcagcgaacacatcctcactcactttacaagcatatggttctcggggtatattcgtacttttcacatgttctatagcggatacatgttcttgttatgttctacagtaaagatcacaacgtttaaatatcatttagcaaattttatatttcgaaatcatggctaattgtctctgataggatcataggaggctggcgtcatggcgtgcatgcgcgtctgtggaattctgaggtcctgagctttggtgcgcaaagttggacccctgatgaaagattgtcttcgtacggaagtccagccgccgccgggtgcccagggcggttggttccattccatcaatcatttttccaatcgttctaattgcacttcaatcctaatctttgggtcgaatttggcgtaatggcgcgtgaaccggtccccgtcgcatatgtaccatgtcattgtaacaacagatcgaaatgcccaaagaatatttctcacaatctttaaagccacttttgacaaacaaacttattatacatccatcgtcgtcgacttattatcttcctcgtatccttttcccatctctctactactttttacacgacaataacacatacagcaatagatacagaataattctacaataaaatagtttcaagtgcccctttttttttcctacttggcagtgcactccggcggtaacccctgggggaaccggtacgtgtcggcgcagtaattgtagatcatgtagtccctctgcacctgccggagccggtcctgcgacgcgctgtccagctgctgctggtacatccacgggctccccgggttggcgcacgccgtggcgtcctgcgacgtgcacccgctcgcggcgagcccgcggtacgacgccgtgaacggcgcccgcgaccagtccgtcctcacgcgccccccctgcgtcgcccactcctccgcgtcccacaggctcgcgtacacccgcatcgcctgcgcccgcgggaacgccacccccgtcgtcgcctccgtgttcctgtactcccgtatcggcgtcccgtccacgtagaaactgaacaaacaaaacagattaacagaagttgatccttttgtcattttagcgattaccacgataaacgcgcgcacgcgcacaccactatacactctaacacaaaccaatgatatattttcgatatcactaaaatcttattaaaagcccatctacacatgcataatattcatgaggaattttataattcttgataaagtgtctagaggtaataagattttatactagaaattttggtaactcaagataattagtagttagatgtactaaattttaaattaaaaaatatggcacctcccagtacttttcaagtatgataaaattacttaatattcgtaagcaacagaatttatattctaatgagttgagtcatataaccacgactctactaatgtataagtgcattggtgtaaaaaaagttgaaaagaacataaccgtgatacgtacaggatgtgggaggggttccagaggacggagtaagtgtggaagtccttggtagggtcgaaccacatgcggaactgctgctcgcggccgcctttcccctggctgtacacgttggtgtgcaccgtgtacggctcgccgctcgcgttccccaggaactcgaagtcgatctcgtcgtgctgcgacccctgcgacgacagctgcttccacgcaacacccaatcaccattagctcttacaggcaggcatacgcatatgtactcgattggcgatgatcgatgcgatgcgtacgtagaaggtggcgacggtgccggcggagttgccggggacgagcttgatctgcatgtcgaagcggccgtacaggtactggttcttggactggaagccggagccggacgacctgtccagcgacagcgtcaggagctggccgttgccgaggatcttgccgcggccgtcgccccaagtgatgtccacgtcctggtagaagttgccggcggcgccgccggcgagcagcagcacggagcacacaatcgccgccaccaacggcggcgttctcccgggattggaagaagaaaccatcgtgtgtgtgtgtaacactgttggattggattcggtttttgatcgatcgatcagatggttttcgtgcagtggtggtgaaagatcgttgtgcgagctgcggtttttataggccactggagtggaagggtagcctttcggtcggatggttggaccagagacgagaagagggtgtaatgtaacgtacatgagctggatccattgagcggcttgacgatgtggacgtacacacgggtcagaatcgcacggcttggttttagccagtttgcttcttttttgggccttagttttgctcggtttagtgttgtgatatgattggtgtgcgtcacgcgcatgcaggaaaaggggttcctggctcggaacggaattctgtgtagtagcggtggagccaaaaattttctaagcctagcgctcgagtagggctcaattaataggatattggttttctagaaaaatatgtaatggtttaaaaggatttaagcatatttatggaggtaagccgggctcaagtctaagctgccttagtcttgcctctgccctgctatgctgttgtgcagtaatatatatgtattaggtgcaagcgtttacaatcccaacaaaaatcagtctagtttacgcgaaaattggattttctggactaccacgatagcacaaagcactcgttttttctttagtcaagttaaaaaaaatcaaactaaaatttgattttttgacaaaaaaaaaacttcttcgatttccattggtttttattgatttaccaatatatttttttataacctaagataccgctcgggactatgaaccctgtgtgcaattgacatgtgggcagaggttgtatgtccggctggctcactgcaccgaaataccgaatgatcggcaacctctcgtcacctattctgatcccaagctgaggagtcgtggagtgacactcaaatgcatgcattgatcactgataagtacgcacagattgcagctgtactaacgaaacatgaatgaagagatatgatgcacgcaaaaacaaacgggtgcggatttaaaaacgatgtgaccgaaccgaactaataagagcatgatggtgattaggattagtttgtttagatgtcctattcattagctagcttgttatggaaatttatgctactgcttgcttgtcaattacacgctgattaaatgaacatatatggattaagcttttttttttttaacaatccttagaaaggtactactcagcaagagattctgatctgcagttgtaggagcaattcttttaactgatagcctcatcggatggctatatgcacaaaatacgccaaatagcgtattagcgaaaaactataatgtgtgattaaaacatttacatttattttctttgcgacttaaacgattatgttgtaaaagaaattatgataaaaaaaactcaaaaactactttaaaattaaattaaaaatttaaattttagtattagcatatgctggttgagccaaaagatgaaagcctgacacaaccaacacacgcacaaagggaatcaggtaaagccaagtcgacaccttaacgaacgatctgttggccgttttccctcgcatagctaggttttgaccagttttgattccccgtggataaaaagatcaccataggcgactacgcatcatacaccgtctgcagcttgacaaaaatgggagcacgggagatgcgctctgaatttctcatttctcaaatcaaagcgacagcttaaccgactctgtctaaacccctaggattgaagtattagatcaggctgtcaataattatcgtagcatcaatcgaactcggaaatacatgcatcgacgaactgatcatttatgcatacgtactgcaaaattaaatggcactccgtgaacaaggcgaattcagactttcagagaaatgtaacgctgaccgtgctaatataagcttcagaatcccaaatgcataccgctcgtccaataatcaatccaacaagcatataccctataatgctctcttctagagctagcctagacaagtgctccattccatgaccatgtagatgtagctagccttatctgctcaacaacacccatcccattcaattgtccaccgtctttagctcttgttaaacctatctttttcagatagatcaaaaggggagctacgcatgcaagaatcatgttgcgacagtaatggtcgccatggccttcgattcctatatcataaaatcatttctatggatcaagtggtgtcgccaatttctaggatgataatgggtcggctggtaaagttgggaatcatgcatatacatcagactatcagagtgttcagctatccgcactgatgagctgtaggctgttctttttcttccagcctccaactgatatattgtactacgtatattaatttgtagctagtcagccacaatgcatgagcattcagtggactaaccacattgggttctctatgattagtgctaatgcattggtgatcactttgtgttgcttgcctggtggtcctctgagggacacgtgtgtcaccttttcgtttttctttgaaacgtaggtttccaagtgatagaacattatagactagctttgataatggtggcaacaaaattaatcgatcactatcgctcaagagctcagttggtgagagattcggtgcgcattggcacgaaccaactaggtttaatttggctctatggaactcatattaaaatgcacttcattttcttaacgaaaagtaacatatccctccattttctctgtagaaaagtcatagtcactgatgaagactgcatatatgtattgtagtggatcagcgcaacagggtaaatatatgcatggtgcatataatttcaaacattaatattggaagaatggacgtatatagtatgaaaatcatcaaagatttgtttcagagtacgtacttataattcaaatatcatacttcaatgggtacaacaaagaaaccactgaaaaaatatttttctaaaatataagtcactacaaaagtaaatggtatttcttccgctttcaaatatttgttcacgttaactattactattccaactttggccatttaataactcttaaaagactagtccatgataaatgaaagtttcatggttatgtttaatgtgtgtaatacatagtatgttattttcttatatatctataatttttccacataaaaggcaaatcagagtttgcaaatgaacaatgtcttacgccagtcttttttttgaaggagtgatgtcaggtaattaaaaaatggagagaatagtaacatacttttttttataagaacaaataattaacgtcaaaagcgtcatacgtttaaaaccgtagtagtaaacatcactctcaagctgtcgccattttttttgtcatcttttacagccttggtgctggcacgcgcttcctatgaattgagatccaatgcagttgtaataacgactgcaactttagcagtgatagcatattatgaccgttggatcgatgcagccaacagcttggatttgctctgccaccccctgcacagtatacgctacagtagaaaattgctacagtgattcgtgaacaatattttctaatgatctgagccgctgatttttgatccatcagctaccttgcaactgctaaagttgcagtgatagtaacaattgtactggatctcaatccgcttcctatatatcttcccagttgaaacaaacacgacttctcatcaagctctagcaaagatatcaacctccactgcgggcactaagcttatgcagcagtggagtcataaacctacccacacttattgaagccacaaactgcaaactttacactactagtatatactagtagtaatataagtatacaaacaatgtatatattttttttttcagacacgtagctcctttacatattcgcataaaaaaaacgcctttcgaattcgagcaatctaagcgtgactattatatacttcaaccaccggtatatacatgtttcaagccatacgaaaaggaagctgaaaaaggagtagccgacggcgtctggtccagtgtatgtcggggaaatcgacctgcaatctgcacttctgcagaacaaataaacggctaccacgacatggagtcatggatgacctgccggtcatgctcgctgcaattctaaagcatatctgatgcacgtagagtagataactatagctatataaagattgtatttagtagcaattaatcagaccgtgcaccaactgagcttggctagctagcttgccagccggacgtcgagttcgtcagacttggagccacatccaacgtccatacattattccatcctcctcctcctactactaccacaacacaaatcattaaaatctcttactcctagcttcattgtttggtttatttgtagaataagggaaacggccatatttgcaaacgaaaaaaataaattttaagggaatttgtaaacgaaaactaatttatgaataaaatttttatatacgtgttcttagcgatttaaaagtttatattaaaaataaacttcgataaaaaaaaactctaaaatcagctttaaatttaaagttaaaaatttaaattttgacttataagtataagtataagcgaaaagataaaacccgaatactgctgcatgacaaatcgtctaggcctgtcaagagaaggacgtacaccttgtagcaatctggagccgagttggaagcagctgtctgactagactctctgctcttctgctgatctcaaacagcagtagcacatctcatgcagtagctcgtggtctccatgaagggatatttgcggggatttcgggtcctctgctggatgttgatgcctgaaagggaggtggaagaagaaccgtgaggacttcaattttcggaagggtgatgaactagctagctgatcgaagataaggtccagtttttcggagggtcgcatccattgattattgctggtgaaatgtcgttgcggcggctaagttagaggggagcactgggaggacaggcgagcacggtgcactgtggacacacaaagcagaacaattccttcctttaatttgagattttggacgtgaacaactaaagtagtaggaatagtgttctctctgcgtaacagtaagaaatgtttggtgcatattaaaaaacttaaaattgcacatcgcactggaaatccctcgttttgttcatggatgaattcacctgaggttttcttcacaggagctagacatctcgaatatatatgtaaaaaaaagtctgtgagttatacagatattaatagcaggtccagtccccatgtacgcttcagcccattccacaaattattgggcttaatactttggcagataggcccatacccaccaagcataaaggcccagcactaatacttcgccattacggcccaaacatccaatttgcagagttctatagctcgtcgtctcacaataataaaagccggggacgatcacgagacgaatagatctttagaaaaaaaaatcaaacaagaagtccatttacatcgtcgtagccaacaaagaaagaaaaaaacagattctggaacgagttgagactttccacattaccctgcacaactcaacccaaacctaaaagatcaagaagagacgattattcattcagttcccctcactgcaaaacacaagtatgagcctacagatcgctggacgacggatggaatcatcatggagtcgacgtcgcgtacgacgcctcacgttctaccgatggggatgatgcactcggcggggaaacggtgcgggaatcgcttcctgtcggcgcagtagtcgtaggccatgtagttcatccgcacccagttgagcgtcatccagctccaccagtccatcctccgcctcatccacccgccgccgccgccggcgcaccgggaggcgccggcgccggcggcgtcccagacgcaggcgttggagacgttgtagcggcggtacgtggcgacgaacggcgcgcgcgaccagtccgtcttgacgcggccgccctgcgtcgcccactcctccgcgttccagatgctggcgaacacgtgcactggctgccgcgtcgggaatggcaccccgtacgcctcgttgttcttgaacaccctgatcggcgtcccgtcaatgtacagtctgcaccaccaacatttttttttacagatttgttacacacaggtttgtctctctgaatttgacgaggagaccgagccaaacgacatatttacaaacgaaaaataatttataaataaaacttttatgtaaatgttcttagcgatttaaaaacaagttctgaaaaataaactatgattaaaaaaatctaaaaatcaaatccaaatttaatgttaaaaatttaaattttgattgataagtataaatataagcacagaaaaaagaaaagatactcctaaaagataaaatttaaatttttcagagcttacatgatgttgtgtgggttccagaggatggagtaggtgtggaagtcggcggtggggtcgaaccagagcacgaactgctgctcacgctcgcccttgccgtcgctgaagatgttggtgtgcagcaggtacggctcgccgctcacgttgcccaggaactcgaagtccacctcgtcgtgccgcgcgccgccgctgcagatctgcgcccgttggtttggttgattaatttaattaattagttgccaatgcgagcagaaaaaaccatcagatatgtcgacgtgtgcaccatgactagctatccaggtatttcgatcagccaagtatatgccttcaggcgaattagtctgaatctttttggataaacttagaaatgttaatcgtggacaccatgacaccatgactaaaactgcctactactgaaaattgaagatgttcagcctggttaccggccggtagtaatacgtgtaatatgcagaaattgatttattttacggctaaaagtgattatacaaatattctgttccaggaaaggtagcaaatgtaataccaacattgcttggtgaaagtgatgcaattttcaccgaaacaaaaataaaaatgttatcatttttctatctctagggcatgaaccgaccaagggtgtacctgatctacatactgctacttaaatgcagaggccaattgaattcacttactgccaacatttatgctgctgcaagtacaaaattcaccccaatcaccgctcaaccatcccatctgctaatcgaggaccaaacttgttaatctgggatgacaatcttcttcttattattttctgccccataaagtaaagctcatcccaagaatgacaagtgtcaactcgtggaattcccctggtgttcctctgtcgtctactactaacaatccgagctactttaacgggatgaacaattcttaggatttcacacaaactagggggaaaaatcgaacaaatcaagccaagatcgatcagaagactgccccaacttacatagaaggaagtgatggtccctgcagactctcccctgacgagcttgatctcgagatcgaacctcccaaacaagaaccgctccttggactgcagccgcgcccccgtctgctcgtccagcgtcagctccaccatccgcccgccgtcccggaacctcgcattgcccttcccccacacggcgtcaaagtcccggtggaaattgtggtcgccatgccccgccgccgccgccgccgtcactgccgcagctacgacggcgacgagagccgccggccacctcaaccggagagaggcgccaccacgcatgtccgcgcacaatgtaaacgcatgcacaaggcacagtgacagagctccaccgatccgcgaaatgcggcgtatcgaactgacgagctgcaagaggagatcagatggtagagactagaaatgaaactggaggaaatggaccagtgtcctgcgaagaagacagagaaagagaggagagaggtgaagtgaaagaggatgtccaatttaagggcacgtaggggtggcactttcgccagatgccagaacgaggcggcatgcacgtcggttgctgcggcaggtagccctgagccccccagccatgcggcgtccactgaaatcgcatcgtacgagacacaaaccacccatgaaaaaactcaaaaaggaatccgacgagcaacaggacgtggcacagagtcgacggcgccaggggagatcgagcggtgaaacgtagtagagagtagtgtgggcgtatgggtcgcgtgtcgggttggcaatacgacgtgtgagcaggataaattagctcgaccacggtgttgctgcaataaaaaccggcgggacgggacggcaaacggcatgcatggcatgagtgcgcggcacgaacggagcggaggctggtctggtggtctgctttgatttcatctcggctggccgcggccggtgcgggcggtggacgacaccgtggactggtctcgagcgcggccgctgggtggtggttggtttccaaactttaaatgcgagcgatcatcccgtcgggtcgtgcggtacacgcgagcatgcctctccgctgcataggcgtaggacgcttaccttcgtgtagcgaagttagtacaatgcaatggcttcacatgcgctgcgaacaggggcgcgggcagtgtgatattccaattctcgtctcttgttgtgacttggtcgccggtgaagctctggtagcgtttttactgtggcaagttatggttgatgctgtctgttgcatgtgaccctgtaggttgaggaaattaggacctgtactgcggtgggattcggtggataatctggtgatggcgtgatgctaatggaacaagcgacatgattacacgacccgctcgatgcaaattaacagtcttctctctttctttagtcagggcacaagaaatcagatcgtgtcccatttttttctcttggaatcgaattgggaaacagatatctgtttgtgtcttgaactcttgatgatactactactgagtatctatctagtgaggcatgggatggatgacgtcaccgtgaagggtgggcgtgttacggcccacgggacttgtgtattgcctgttgggcctcactggggcctggtaggtatttctcctacaaggtaaaaaaaaaatcataactatcgatcaagtcgaaattaggcaggtgaagtgggccgtattccaaaattttcaatgtggttactggtgagccggataaaggctgatgaagttacaaatgagctgggttggcaagctgaaggaaaaagtatgccgaaggtccttaaacttgtcatcgagttacaaaatcgtcccccaaacataaaaccggatacaatacatccccaacattcaaatccaatgaaaactaagtctctcggcagttttgacttcggttttgttcgacatgaccgctaacttagcgtgggacccacgtgggccgacacgtcagggtgaccacgtcattatcatctctttcctctctcccccctctctctctctctcccccagttgtcggcgacgagaggtgcccatttcctccaccagctagcgcatcgccgaccgccacgtaggacaaaaccgggggcaaaatcaccggaggacctatagtaaacggtttttgtaagttgatagatgttatatatctaattttgtggttgggggatgattttgtaactcgatgacaagttgagagaccttcggtttaccttttccgcaagctgaatacaagttctcatttcccgggcttcattcggcctgacaattggaccttagcccttaagttgggcttatttacgaccaactaagttaaaatcgaaggaaaatgatacatgtacagaaatgtgtttagaaacattttacaaaaactgatgtggcatttgttatatattgtatcttgttttttcgtaactatccactgattaaatccaagtttgtaagagtttagtaaagttctttttaagtacgtatagcattactcagaatcgaatcacaacctgtgattaaaaaaataatttctaattccaaattggttctaatgcatcatgtggtgacagtttgacagaagatgatcagaactacgctgcaaacagtggcacgagaagcagtttgtgcaaacaagcgattgggtgcgaatcaaaaattttaagcaaaacatggctggttgatcaaaccgagtgcgagcattagttttgtttaatccaagcagatcttatcgtttccaatataaaatggttcgacgttttcgttagcagtgttgctgcagctgcagatgcgaatgttggtccctcggttaaattaatcaaaaccggataagctcgatctccccccacgcaaggctccagttttacagggtgtccattgtcgaaggtggccagtctggctggcacgcccagtactagtacaggtttatttcagcggctgagcacacggaaaacatggccaaaacccacaaagggatccatcttctggctaaaagcagctcactaaaatttatcaaacttggtacgtacatcgaccccgtgttacaaaaagatatcaaagaatgcgatatgcatactacatttacatctccgtggcaacaaaacacattcattattcgccatctgacgtgctcttctcatcatttttttcatcgatgacggatcatgcatgcgtagcgtacgttatgatcatcttctcgtgtcgatctcaacggagcttgcactcggcgggggtgccctgggggaaccgcttggcgtcagtgcagtagttgtagatcatgaacttcctctgcacccacctcatgcggcggtagctcatgtcgctgagctcctggttccaccacccgccggcgccgcccctcctgccgccggccggcgctgcgacggtctccattgtgccgacggggcagcgctgcgcgccgttcgaccagacgcaggcgtcggcgttgaagtcgcggaaggaggcgacgaagggggccttgctccagtccgccttgacgcggccgccctgcgtcgcccagtcgtccgcgttccacaggctcgcgtacacccgcatcggctggctcttggggaacgccacgccacgggcctcgtggttcttgaagtccctgatcggtgtcccgtccaccgcgaatctgcacgcaccaccaacacgttgttttagccaaaacccatcgagtatcaaccatgcgtctctgtctcgcgtaacaacaagaggggttcacgtgccaatgtggaagtaaagtaggggactcacatgacgtgctgtgggttccagatgatggagtaggtgtggaaggactgggtggggtcgaaccagaggcggaactgctgctcgcgctgcccctgcccctgcgtgaacacgttggtgtgcagcgtgtacggctcgccggtcacgttccccaggaactcgaagtcgatctcatcgtgggtcgaaccctgcgacgacaactgcagccacaagcacagaagatcacacaaaccatcagcttcattactccactttagttccgtttttttgccgaatttggtagatgaataaatgatgaagtgatgagaccgtttggggaggaagataagcttacgtagaaggtggtgacggtgccggcggagttgccggggacgagcttgatctgcatgtcgatcttgccgaagaggtactcgctcttggactggaacccagagccggagctcctgtcaagcgtgaggtcgagcccacggccaccatcgacgatcttgccgcggccctgcccccacgacacctccgcgtcctggaagaagttgcctccatgcgcaatggccaccaggcaggccatcgccacaatgccaagcgccaccgtcctcatcgcgcgatcacaacacacaagaacccaaagatctagcaagcgagtcgaagcgtgaggacaatgagagctactgggatcagtgtggattggtcactggaatgggatggcgaagcacttgcctatgagccggtatttatacttgggcgtggccggggcagctagcaatagcagagctgcgggcagacaggtggtatccgacgggcaaatgccggctggggtggcgcgtcgcgtacacggttaaagaagtaaatgcggcacggagcgcgtcgctgcagagcgccggatagatttggggcgggggcgatgcatggctggacgcacgctggatccagccgccgcgtgcctacgccggggtgtgggggccagagacgcgggggactttacttgaccacaccacacccatccccgcggcggcatccgcgaaagcggtaacccgtaaaccgggcaggtgatgcctgccgatggacggatggatgcgagtacgtggtaaagtgtgcagcttttgtggcgcttttgctcggctttgctcgcggatcgtacgtcacacggggccgcggccagcctcggctttacagttcatggcctgcagtgcagttcggttcgcgcggaagcagcagatcgtgatccggacggacgagccaacacgacggcattgccgccatgtgcgcgaaggcctgcgattcggggaaggttcgcctggtttgccccatgggcgaaggaagtggcccggccattccatccagggcatcgacggtcgatgcacatcgttcgtacgtactgtacgatgagcgagtgatttaattgcggtcacaaatcggtctcgaggacgactgttgctgctggtgagagtgtaattgcgcccttgatgtgtctgttgggagtttgtgttttgtgacagcggattacacgctgtgatttactggagtagtggtaagttttcaatacctgaaaggttacgttttgattgatcgagttcgggattagtaaggacgacgtccgtagatgaatcgtagctgggctctttagtactccgacatgatgccgttaggtacgggcatgttgattacgacacctctggccaaatgatgaacagagtcgccattggacttgtctaggagggagacaattgattctctggccaaattcttgcgtcactcaaccctaaagatggataactattttttttaacacctaaaatgattacacgtcaatatattagctaaagctggatatagacctaacccgctatatgtaacttgcactgtggagcatgcagcttatactgttcttgatctacgtggcatgtgaagaacgataaaacttggtggcgcgctgtgagtggccctagattgatgtgaagtggctaaggctcgcgagctagactagtgggctacaactttcttgcctcatgattgcttgttatgtctaacgtctagtcgactcaatcctaatggaggtaaaacattgtaacccttaggaaacagcatcatgatctaagtagttaaggcctaagagtatccccagcagcttatccaaatttgattctcggtacactcatatggatggccatcaaaaaaagattccttcttcatatccttctcactccaatagatcatttatatttcatactccataccacatcctcctatcttttactaatatctttcaactaagcatatatttgtattattttctaagggctatattttgaacaactaaattttaatagttttattttatcacggtaatctaaatggttagattttaacggacatatttctaatagataatttagtgcattaaattgctactttctctaaaattactcagactatgtttctcttttttctctacccatagtctgccttttgcccattccaatatattccaaccttttctattcctccttttctctctgctctgttctacactcttcattctacccaggaagcatgcgtggaggcaaggtggcctgcgagcgcagaggtacggcggcctgtcggtgtagaggcacggcggcctacggacgtggaggccggtgggcgcggaggcaactggagctagcaggatcgatggtggcggccgacgggcgtggaagggcggacgaagatagcagcaaggggcggaggcagtcggcggggcgcgcgcagggccgacggccacaaccggccggcatgaagggttggagggatgcatgctgccgctggcggggttctccttctagatctggtatgtctctctctcaccctccctccatggctacacactccctctacaccatccaccgtacagaaaaatacacatccgaccggcgacgatgacaacataggggaggtcgatccaaaactcctgataggggtgggagctgcggccactgtgatatagcgtgaggagagagaaacgctatatttgggcttcctctctccgttttggcgcatcatctatttttgaagggctagatggcgtatccactggggccccgtttttcactcccgtgcactgtatctcggacagggtatccgatagaggatctcctgatgctctaaggctattcccaacccaataattagaatgatgtccatagcattaaataaggtgccacctaggatgaaaaatgatgtggcaagtgaataaatgaggaaagagaaggaaatcatgtctacacaatatccaagacatcatgtgtgataaggagcattaaatttaagtatggaatagtaatgcttgtattaaaagagtagtgtctagtactaatttcttgatgatgtggagtttatagaaactatctagtgttttgggttgggaatggtctaatggggtgtaagagtcgaagacccccgttgtccgtacgaccatccgaaaatgcaagactcccaagtcaagtcctttaccacgcatagcatgcaagacttgtctgtcacacgacgtgccacgatggaacccacatggcatatactgcttcttttgctggagatctcgtactatacaatacacctggttccagaaacttcacaagaaatctagctggccatggcataagcaaacattcagcaactgcatccaataaaatccaaataaatacttccacagtggcagcactgaagaacacctcggcatccactactcagagacaagcaagcaagcataagcattattctatgtactgccatagtgccaccacaccacaacattcaaattcgcccatgcctctccagtagaaatacggagaagcagaaatgatcatcatgccacatatcctcgcaaacaacagctgtccgctttgtccatttcagcagcatgcatactggtgccagccaacgagccagcagcagaccgacgcaaacgggtactgtacgtgctgtggcgaggaagcagggtgggccctcgacgcaaacggcatgggccgtgcatggtttatggtttatcatgccctcattgaacgattcaaatcattgctgttccaaggggcacgtacgacgcagacgcgcacaataattcccgtgtccccgaccgacgcgcccatgcacgcatcggggactcggggtcgacgactccggcggtgcgcatttgtggcttctactgcaatattgccgatccatcgatcggtagtcggtagagcagctctgccataaacttggacttaattggttacttagccaaaagcccaaaggagaatttgcagctagctaggtagatctgatacagtgaacacaacgcattgcaactgaggggtgtttaaatctaggattataaagttttggcgtgtcacatcgggtattatatagggtatcgtatggggtgttcgagtactaataaaaaaaactaattacagtatccgttaataaaccgcgagacgaatttattaagcctagttaatccgtcattagcacatgtttactgtaccaccatattgttaaatcatggaccaattaggcttacaagattcgtctcgcaaattagtcgcaatctgtgcaattagttattttttagcctatatttaatactttatatagatgttgaaacgttcgatgggataggattagaggttaacatctattgttattggtaaaaaaagaaccatagattaaattgttggagtactaagaagaggttaacatatattattattggtaaaaaaagaaccacagattaaattgttggagtactaagaagaggttaacatattattattggtaaaaaagaaagggttaattggatccatgccactgtaaatatgacaaatcagaaaaatatcattactattcatgaaatcgggtagatgctactccaatcttctaaaattaaaaccataccactccatcacgatttccgtcctctccgtcacatttttcgccgtctccgtcttatcttcgtctcggtgcctgaggaggagggcatggcggcacgccgccctcaccggcgccgagctccatgagggagatgatagccgggcttcctctcttcgttgaggtggttgcgctgagagcagacaattagggcgatggcgcaaagcggctgaaacgcgcggtggcagcggagagagaaggaaatcgttgggagaagcggccagggcatggcgagctcgggctaaagttgggaaaggaagaggagacccatgaatttcgtttttgcaatcaatttaagaagaagagcaactgggaggtcgtattcgaacgggaggcggaggcactgcgtacaggcacggccgcacgggacttcgtatagaggttgaagacgatgtgctatagcggaggcgcagcgcacgggcacggccgcgccggtgaagcccttccccatccgccgtcgttccccatccgccgccgtgctctcctcctccggcgccggtttgtccgtcgagacgaagacgaagacgacaagaagataacacggagacggctgaatgtgacgaagaggacggaaattgtgatggagtggcatggttctaattttagaaaattagagtggcatctacccgatttcatgaataataatgtcatttttctgatttaccatatttatagtggcatggatccaattaactaaaaagaaaatggtgtgataacctgtgtttgaaagaattcgagctcagaccaatgcatagctctggcagatcccagctagtcaagcactcgagctagcagccgttctcaacggaaccacagattagcaatttagcattgccaggctgccagcgacaccacttggctgtgttcagatatgggaagttgggaactaaactctccgtacggaaaacggagcggtccattagcgcgtgattaattaaatttttgctattttttttaaaaaataaatcgatataatttttttaaacaactttcgtatagaaactttttactaaaaacgcaccatttattagtttgaaaaacgtgcacgcgaaaaacgagggagaagggttgagaacatgggattgcaaacaaaactgttcgcttcacatttctactagttttctaactacactgctaactgcttcactgtacccattttgccattgagtcagagtactcgcctgtactgtacgatgtagttacataccaatacggagtactgcgattttcagaccaaccgtgcatgggatactcttgcgttttcggcttcacatcagttacagtacacgcgacggtcgggccctacgttgtaaagccacctgatcaatgccaattgaaacgttttaacgctccccaagcacgggagttcggtgactatttaaggttttgttagcttgtcgaattgaatgcatggatgcgtacatacatttacatacccacttgtttcactttcacctttcctccgcacgagcgacctaacaattttaactgatttataccagcacaagctaaggtagcgggagactagtgcaaccacgctacagacctactccctccgtctaaccaaaaaaaaaaaaagacaatccctgggtttccacgtccaacgtttgactgtccgtcttatatgattttttttataattagtatttttattattgttagatgataaaacatgatcaatactttatgcgtgacttatctttttaattatttttataatttttttaaataagacggacggtcaaacgttggacacggaaacctagggtttgtcttttttttttttggatggagagagtatagtacaggtcaaggaaacgatgcacttttaacttactgtaataaaaaagaaaagaaaactactaaaactccagctgcagcctgcagaaacatgccgtgcccagagaggtgttctctccgtctcagacaacaagcaagcaactaatcaaagccgccggatcttccgattctatttcaacttgaaagagcaaaaacaatcaagttctccgggggattgcattcggtgtttgggctctaaccctttggtctgtgaaattgtgagtccatgggctatggcaatcttactcttggacttgaacaagacagacagctatgggctttgcggtaaggaaataaaagcccaacccaatagtctaacacggatacgatcttttggtttggaataagttcatcagaggtcccttaattttacgccgaatccgattttcgtcctcaaacccaaaaactacatacaactggtccctgaactattaaaaccggtgtaaatgaggtccctcgacgtttttgaaggttgttttagctgacgtggcgcctacatagctggtttgactaggtctacgtcctacgtggcattgacgtagcgcttacgtgacaattatatcatgaaaaaataataaaaaccatagccccacatgtcagctgcacacaaaaaaaattaaaaatagtggggcccacgtggccccacatgtcagcctcactcctcccttctctcttcttcatcctcactctctcttcttccctcttccccctatctctctctttctcttcttcccgagcagcggatgagcgggtgggcagcagagcaggcgagcgcggcgagcagtccaagctccggcggcggcggctcgacgtgcgccgcgtcggggctaagggagtcggcgacgggggaaggaggcaagcctcgaccggagagaggaggcctgcggtggggtggtgggcgcctgttgacagaaaacacgaggcctgggagatctgcttaactccagtgcaggtccaaagctcgccttcggatgtatgagcgtgccagttgatttgatcctgcaatcaacaagagatagaacaaagaaaccgcaattaatcctataaatgatagccgatcggctagatgccgatgacatatcatttatttcaagccgatgtcatgcgtacatcgatcggcaaatatcaataagcaattcagaactaaatctactcgatcaactgtagacattaatgatatataatccttatatcggtatatacttaaatcaagtgattgggatatatcggtcatcttgccgagacagtataaatcacttagatcgaaatatatattaatagtaggattatatacattaataacatagctgatcaggtagacctagcatgtatcggctaatactccgataccactctatactaagatattaaagcaagtagaatataccaaacataaccttaatatacttagatgcaataaaatcttaacataaagggcagatttaacgtgtcaatcaagcatatagaataaaagtagttaaatcaggtaagatcggctgaaactccgatactacccttatcggcaaccagaaagcaggctaaagattgcaattctaagcacgacttaatagatcaaactcaactgatgcagcattaagtatgaaaagaagaacaatatctagacaatcaagccgctggaagtttcatagagtggtagatatatcacataatctaagttaacgtcattgtctaacctaatcggctgccttccattagcagatgttagccgattataggttagataaagatattatcgaagactatgtgagatatatgataactcgacgaattatatatacaagattagagtgtcataaagatggaagcactaatcctgagaacataagtcgtcacgacaagttttacctcttgttgaagatcgaaaccgatgcagctcaacccgagagcacaaactcgttgaaataaaagtaaagcaaaaaagggtggcgatgcgccgagattgtattggatgtgttgtctcgtttttacatagggctcgggtctatttatacccgagaattacaagatacgtccataacggacacgactattatctctaacaaactctaagataccataagtctttacggcagacttttgtccaaacatatctctaaggaaattacatagaatatcctaattaataaatataattgccttcccaggactctatccaagcatggcaatcaccttgaagcacatcaacttgaacccgatgacgttcaccgggtcatattatcggaatcagctgtatcggctagccccgtgcaactcgaactctgccgatcctgaccttagccgatttagactgtagccgatttttactctgtctccgcaacgatcttcatcttggattccacttcgatctgatcttcatctccgatgccaatagtgatagaatttaccaaatttggtcgttaacacatgccccccatgtccgaaatattggataatgtttcagatttgccatataccgactctgagagaaactcgcacttgccgttttcccgaccattatcgctctgctttaaatactaaccgtcgccccagagaatctccacgccgtgatctccgttttcaccactcaagcagatcccgtcttctctctctccggcgacctcctcgacgcgcagggcgatttccaaacgattccactcccggccagatctccacccgcgacgatgacgacctccaccagtccgaccgccacatcatctgccgaatatgctgaggtaagtcctcatcggctagatcccttttccgttcatcagatcggttttcgctcgccttatcccgttttctccttctctattcttgtagcatctttccaatcttgttgcagttcccagtctgttgcatgaccaacaatactttctcggtccaatcggcaatctagaccctactgaatttatcatagccgaaaccaatagaactccttttaggtcggccaatccaaacacaagccattggaaaaacaccttcaaatcctggccttctctggagaaaagctggcctgtatggtataagcggatatcggctagcaagcaggcccattgggatgagatcggaatcagccaagccctagccctcacagtagcaaattcggccaaagatgaacccctgttggcggctgcaacttatttctggtccgacactctcaatgcctttcttttcaatcaagggccgatgaccccaacgctgctggatattatcatgctcactggcctagatgtaacctcatcggctaaccccatgagcctaaacaccaagaacacttttgagttcaaaactaagagcattgggggttggtcaggatatatcacagcatatatgggcaaagggccagtcactcctaaagaacacgtagcttttttgctgatgtggttggaaaaattccttttctgcggatcaagctgcggtcctacaaccaactggcggttcttagccgaggccctagtaacgaagaaacaatttcccttaggcaaaatccttctcggctatctataccagatgttaaacagcgcatcggccaaaataattatcggctcagtggttggaacaggtggatcatggtggctctttcaatcctggctgaacctggtagtcatgaaggttttcaatcggccatctgtgacagaagctgaatttccaaggttggagccgattgtagaagatgatggagaagaacgcacccatcgcagatgtatgtcatacggagagtatgcatctacaccagctgatgcaggagcaaaattatcggctgaacttctgaaggactggttcttcagcttttatgacggattccaaaaaaatgcccgagtttggttcttctatgccgactcaatggatttcgaactgccagccgatttcaggttcgaggatattaatcatgaaaagtttcagcaatccagagaaatctttactactgctatcagcccatgtatcctcccagtcggcatccatcaagggagaaatatccaagtctactacgagttttatcatccgatgtcattagccagacaacttggaatgggacaattgccaatcggcctgtactttgctgacaagatccaatgcagaagcgacatctcctcaactttaatgatggatcggctgttgaacatccccggacctccgttgggcagcatcgagaacataaagctggcaaggttcaggagtagggcttttgacagatggtggggtgaatggaaactgcacgtgttccaccaatcgacctccatgtatatgacggacctattccctgataccattcctcaggtaagtcttcactttatcactcttacttaaataaccaacagccgatttaaaccttaattaaccttttcttctgatctgcagacaacagaatcttctccacctcgccggagtaatagtggtaaagacattgaatatgccccaagcttgattcccaatggaggtgggccatctccttctgccatcggctacaatgcccgaaagacctcagcacttctccgaggactcatcagagaaccagccgatgccggcgagaagcggagaaccagatcatcggctgcagatccttcagccccggctccgaagaagaaggctaagacaaagaaagctaagccagctgacgatctacccaccctagatccatccatcgaacaagctctggatgaagaagaaattgaggaagacatcgaccaagctgcagccgaaataagcgatactgaaaaaacaccatcggcttcacctaagcaggctcctccattcccttctgctccagctcaattggcaagggtaagcaactttctctgtccacttttgcagtcatctactttatagccgattcctcacaattttaataaatatagagaaagaaaattgtcgtgaggaagaaatcggttactccaacccctaaaccagctccaccagtaagatacttctatcatctcattaactgacttgggctgattatatctaacatttatccctttggcagcctcctcctcctccttcttcccctcttatgcaggcagaatcaggcggccgcactccatcggctgcaggcagtcatcatgttgaagaggaggaacaattagctgcacctactattttagtaagttttattaacataaacttgagatcggccaatcatatcttgatccttaatcatccatgatattgtctcttgcaggtcttagccgatctgttctcctttgacatcaaagattacctcgatgaaacagaagaagacaccaccagtaaagcaacagctctcctgtctgatgatgtgaagaaaacactcgaagacatctcccatcggctaggagaatcactagataacctggtgaccaactgtggctcgatccgggcaaggtttgcagatatccaagcctctcttccggacgaattagtcgatgctcttactccagctgcctacctcgagcagcatcaattcaaactggagaaagccaggcagaggttagccaatcgccgggaacgcaaggacatcgaggctaaaatccaaaccaatcgacagcttgttcatgaagagaaagccaagcttgatcagttatctgaaggcccaatcaaatccaatattgatcggcttgaagctcgcaagattgaactcttggcacaacttcaagaatgcaatgctgaactggatctagagcataggaagttagccgatctcccgcaagctatcgaagaacagaaggcaaggctaaaatcggctatcaagaacattgctgagatgactaaatccttgaaagtcattcctggaaccgatgctcaagacgcccaagctatcgaagaaataaatcagattaggcaaagggctatatcggctatccagcgatacttgtctcagtgatttccatataatagtctgtaggaaattgttgtaatcggctaagacaccctaattactttgctgtttaacacatccaattttctcaaaattttgcaattttctatgtatgtgcccccctaattttacaatgttgaaaacattgacaaaattatagaaacgactaagggcgatataacaatatcggccattcgtacatgggcaaaccacaaccgattacaatagtgaaaagcaactaagggcgatataacaatatcggccatcccaaggcgatgcaaacacatcggctatcatgcatcgacaacactagccgatcatgcattaacccaaacactgggataaaacttcttcaagtatttgccatttagagctcggccataaacttctccatctagtccttgcaacatgtatgctcccttagacaccaccttatgaatttggaacagtccttcccaattcggcgaccacttgccgaatttgctatcccgagtcccaatcggcagaatcaacttccatacaagttcaccttccgaaaagtccttaggtactactttcttattataatgccgggcaactcgctccttatccctagtaacctttgcaagggctcgtagccgtgattgaaccagatcttccctttcatcggccataaggttatagtactcatcggctgttaaagtattttgcaactctgttctcctcgagctaatccgaacttcccacggtaaaacagcctcatgaccataaacaagttcataaggaggaacctgtatcgatccatgacaagccatctgataagaccacaatgcttcagccagtcgagtatgccattgccgaggataatcagaaatcttccttctaatcaacttgatcaaactcttattagatgcctcggcctgcccattagcttgtgcataatacggtgaagaattcaacattttaattcccatactatcgacaaactgaacaaactcatcggatacgaaaattgaaccttgatcagtcgtaatagtttgagggataccaaatcgatagattatatgctcttgaacgaactgtatagcatccccagaatcaactttctttaaaagaatagcctctacccacttggtaaaataatcggttgctaccaatataaacttatgtcctttactcgagggttgccgcgtcccaaatcgactctaaaatacatcctcgaaattatgcaaagaataagtaaaatccatgtgaaagcctccaacaattaaaatgtgcaaagctaaaagtcaaataaggcttggaggatttttgtatatttcctaaaagcctaaaatgcgtaaataaattttagtggaattttcagagcacaaataataattaagaagaaataaacaaagttaaaagggttttataaaaagaaaaatccctaaaagtccttttccccccttcctctcttgggccggctcggcccaactccctccctctctctcctctcccccgcggcccatcggcctcctccccgcgcccgcgccgctgacgggcgggcccgcccgccaccctcgctgacgggtggggcccacccgtcatcccctacctcgcgccgcgcccgccgcctcgcccgtgccctagcgccgccgccgccgcggattccgccgcatcccgccgtccccgcgcgcaataaagagggggaaatcactccccgtgattccctccctctttcccccctcttttccctctctcttccctcggattcgtttggaatccctcccgaaatcttcgccggcgcaccaatcggg

SEQ ID NO: 8321 - DNA, 9142 bp, Oryza sativa
aaccatttttaatggattctacacaatttccttgatttactgagacttgaatgggattaaacggagctcggatgaattagttatgaattttagaagattcactgtgtttattactataacaaaaatccttaaataatttattgcgcaataaattccagggctgacgtcagcacgggggtgcggcgccgacatgcggggcccaccggtcagcggcccgggagagagagaaaggggtggcggcgcgcgggcccactgtcagcggcacgggaggtggaaggggcggcggcgccacgtggcggccgaaccgacggccccgatctacccaagggtagatcggacggcggcgggagctcgcggtcggggcgcgcgggcgcggcgcaagccgaaccggcgaccatggcgccggcggcgcggcgctcacgcggcggcagcgcgcatgcggcagcggcgcaaggcgacggccgacggcgaccgaccggcggcggagagcggcggctagaggaggagcggcggctacacagctaggcggcggtgcggcggttaaacggtgcgggagagagagagaaaacgaggaggagggtctcaccgacaacggtcgacgacggcgggcgtcggaggacgatgacgacggcgggacgagctccggagcctcctaacgaacaaaaggagaggggttagagagggagggaagggcgcgagagggcgagggcgccggccgaaggcggcggccatggcgtcactcaccggcgcacgacggggttgggtctccggcggcgaacctcagcggaggaggggtggacgaggtagatctcgaccgcgcgaagctaacggcgacgacggcgcaaggcggcggcgagcctagcggcggctagcggcggccgaagtagcaaaaacggcggcggcgggtggttgcacggcgcgggagcgatggggagctcgggagaggtcggcgcaatggggaaaaagtgagagggagtgccggcgatgcttaaatagggggagagagggccggacgtggccgggagcggcgggaatcgccggccgacgcgggggagtggggaggagagagaggcgggattcggttttcgaatcccggccatctcgggcgcgggcgcgagcgggagagagaggggaatgggcgcggagggcgcggcgcacgcgcgaacgtggccgacgtggcccgggggaggcggaggcgtgggcgcggcggccgttacgggtgcggcggcgcgagcgggagaggcgggaggtgggagacgggtccgacaggtgggtccccctgtcggcgaccccaggagggagggaggcgggcggccggctgccgggctgggcctcggcctgcggccggcccaacagagaggggggggggaaaagaaaggagaaatgggccgacggcccatttgacaaaaaggaggaaaaaagaaaaagaaaaaggaaaaaggattttccctggaataaaatattgcttgctcaattttaattggttaaaattatttctagagctctgaaaattccactaaaaatcctgttaatgaattttgacatgtagaacttaagaaaaattccacatgtcaagtccgattattatttgcattactttcttagggttttctcctgatttcacctgcattttcttggggtcatttgaaaattacgattttggctagggaggaaaacttcggggtgtgacaaacctaccccccttaaacggaatctcggccccgagattcggaggagctggtgaagaggtgcggatgggcggctttcaactcatcttccctttcccaggttgcttcctcttccgaatgatgactccactgaacacggcaaaaccgggtaaccttgtttctggttctcctttcgctggtatcaagtatgcgaaccggcttctcaacataagttaggtcctcctggatatcaatgtgttccgaatccgcctgttcttcaggtacccttaaacacttctttaattgggacacgtggaacacgtcatggatgccgatcatgttggatggaagttctagctgataagcaacttctccccttcgttccaagattttgtatggtcccacgaagcgtggtgccaacttgcctttcgtctgaaaacgatgtactccccggagcggagtgacacgaagatacacgtaatctcctgcctcaaaagtgagctcccttcgacggttatccgcgtagctcttctgtcgagactgggcaatcctcaacctttccctgatgattctgactttctcttctgcttccgctaatacttctgttccgaacagttgacgttcgcctgtctgatcccagaagagaggtgtgcggcacttccggccgtataaagcttcaaacggtgccatctgtagactggcctggtagctgttgttgtacgagaattccgcatatggcaagcttttgtcccaagctccaccaaaatcaagagcgcaagctctcaacatatcttccaagatttgattgactcgctcggtctgaccatcagtttgcgggtgataggccgtgctgaagtttaaacgggtccccaattcttcctgcagtttctgccaaaactttgaggtgaactgactacctcggtcggatactatcttcctgggtaccccatgcaaacacatgatccttgcgaggtacaattctgccaatctctttcccgtataggtggtatgtactggtataaagtgagcaaccttagtgagtcgatccacgactacccagattgaatcatgtcccgatgatgtccggggcagtcccgttataaagtccattccgatctcctcccatttccattccgggatttgaagaggttggagtaaacctgctggtctttggtgctctgctttcactcattggcaaacatcgcagagtgcgacgaattcagctatttcccttctcatgctgacccaccaaaatttttctttaaggtcttggtacattttggtgctgcctgggtgaatggagtactgggtctgatgagcctcggtgagtatcagatccttcagttctttgtcgtcaggtacacacaatctttctcccatccagattgtgccatgctcatcttcgtggaaatcccgagcctttccgactctcatgttctttttcagttctgctatttccggatcatttacttgagcggctctaacttgatccacgagcgtaggccgtgcctccagagcggctacaaacccgtgttcaacaattcccatgttgagatgttcaaactcctgccgcaattcctcacacatgccctcgatgcatagggcagtgcagtaacttttccggcttaaagcgtctgccaccacattggctttacccgggtggtagtgaatactcatgtcatagtctttgattagttccaaccatcttcgttgtcgaaggtttagatccggttgggtgaagatgtatttcagactcttatggtccgtatatacttcgcagcggttgccaatcagatagtgcctccagatcttcaaagcatgaaccactgctgccaattccaagtcatgagttggataatttccttcgtgtggacgcaactgccgcgaggcatacgcaaccactctgccctcttgcattaggacacatccaagtccgtgacgggatgcatcgcaatagacttggaagtctttcatctggtcgggcaggatcaaaaccggtgcggatactaatttcttcttgagctcctcaaaactcttatcgcactcagctgtccatttaaacttctcatctttcttaagcaactgagtcatgggtcgggcgattctggagaaattttcgatgaatcggcggtaataacctgccagtcctagaaaactccgaatctgcgacacggtcttaggtggggtccatttggtaactgactccacgttcgatgggtcgactgccacaccctgagctgtaatgacatgacccagaaattttacttccgtcaaccagaagtcacacttgctgaacttggcgtatagctggtgctccttcaacttttcgagtaccagacggagatgttgctcatgttcttcctcggattttgagtagataagtatgtcgtcgatgaataccacaacaaacttgtccagaaattccatgaacactttgttcatcagattcatgaagaatgcgggtgcgttggtaagtccgaaagacataaccgtgcactcatatagcccgtaccgagtggtgaaggccgtcttcggaatatcctcttcccggattctcagctggtggtagcctgatcgcaggtctatcttagaaaatactttagctcctttcagttgatcaaataaatcgtcgattcgcggcaaaggatatttattcttgattgtgacctcgttgagtgcgcgataatcaacgcacatcctcttcgtcttatcctttttctccacaaaaatgaccggagcgccccaaggtgaagtgcttggtcgtatgtaccctttctgcagctgctcatcaacttgcttcttgacctctgctaattcgttggccgccattctgtatggtctcttatagattggagcggttcccggtgccaagtcaatccggaattcaatctctctcttgggtggcatggtagtgaggtcttcggggaacacttctggatactcgcagactatgggtatatcttccaattttctcaagttcttctctacggtatccactgggatttccgtctcaatctgattcaacgagacccctttctttggtgagactagagatttgtacaccactgtttctcccttctcgttggtcaaggtgactgtgcgactcgcacaatcgatgactcccttaaacttggtcagccaatccatcccaagaatgacatctaggtctttggattcgagaagaatgaggttggctagaaatggtgatctttggatttctattagcactgaggggctaaaactgactgaggttgaactatttcccggggtatgaaccctcattggtgtgctaagctcttctttccttaacccatacctccccacaaatttctttgaaatgaaagaatgcgttgcaccagaatcaaaaagtactgttgcagggattgagttaacagggaacgtacccagtacgacctccggtgctgtttgtgcctcctccgcagatgcgtggttgacacgagcctggataaaccttggcccggcacgcctgggcttcgggcatttgtcagcgaagtggccaagctcgccacaattgaagcaggaccctggttttgctcccgtctccttcttggcttgcgcgggctggcctgactgtgccggtgccattggtgggcgtggagctgtaccgcggttgggctgacttccatggtagttttgactgccactggtgccctggtggaagttgctagggttgaacgggcggtgctggcggacgatcatggtggtaggtccaccctgctgcccgggagtgaagcgcggcctctggtgacttccctgatgtgccctgaactgagcggccttcctcttcctgtccatcttgttgcgttggtcctcctgacggattgccttgtcgaccagcctctcaaagtcagcgtagtccccagatatcagttggttggtcagctcatcatccaaacccgccatgaacttctcctgcttctcggcgtcggtgcggacatcctctggtgcatatcgcgcgaggcgattgaactcgtggaggtactctgtcacagtcctgttgccctgatggagcgcccggaattccctcttcttttgtgccacgaccccgtctggcacctgtgccttcctgaagctacggcagaactctgcccatgtgacttcagtacccggtgggcgggtggccatgtggttgtcccaccaagctgacgcaggaccctgaagctggtgtgtggcaaaagcgaccttctcctgatcattgcactgcaggagattcagcttcttctctattgcatggagccagtcattcgcctccatggggttggtggtgctggagaaggtgggtggcctgacgcgtagaaattctggcaacttggactgagggggagggggaccaaactgctggtgctgctgttcggcgtgctgcatcatcctctggtgcatctgctggtgctgctgctgcatctgctgcatcatggctgccatcatctgagtttgatgtgccataacttgggcaagggtcggattctcgggaagtggtggcggaccattgccagaatcactgttggggtgcacaccatcagcgcgttcttcgccgttgctgccctcgcctgtcgtgcggttgccagtcctggtgtagaccatctggagggaagagcagatgggggaaaagaagaaaaacagatgctcaagaactaagctttattacaaaggaattaaaactgcaattgttctgatctgaattaaaaacacttaaaagaacaagcaaacatccttattaagacagccatatcataggcacatgatatcgaccgtcaactgaccccaaacaagcaacctaaacacacaaactaacaaccagaagctagaccatcgataaactaatgggaaaacgagcctaatgctcggaacggctcctgcggtcggtggagtcgaaggcgtcctcctgctcgtcacccggtccctctgagcgactcctggagcctgacagatcagtctcgccgctgccactgggagtagcagacaaccaacctccggtaccactggctgaacctctggcggctgatgctggagcgaaggagagagtgaacgcgggagctggaactggagctgcaggaactgcgggcggaactgaaggtgctgcgggagctgctgctggaggtgggttcctgggcgcaagctggatgcgcacaggtgcagtcgtcgtcttgcggggcatggtgcggatccggactcctcctggcgctggaagaccctttagctgagcgttctccttcttcaggcgcgctatctcgtccttcagggcgacgatcctcatgagcttcccatcgttcaaggccttggtcgccttgtgcaggtccgagtgcatcctgtccaatcccctcatcacagcacacatgtgaccaaaggtggtgtcgttctcgccagctgtcggacggaaggagctgacgccatcaccatgggctcgacgggggtggtagcggtacgccgtgtcgtggaagatgtagtcgtggcgctcccgtagtctggccatcatcaagtaggccgcctcctgacaggcgtgatctgctgtgcctccagatgcctcgaccgccatgttagcgaggcaagtccccacgtagccatggacctccaagcggacacggtgaggaagctcgccactgagcggcggaatcgtcgtgtactccggcgcgttgaggtagcccaccaccagtgtcatacgtgccaactctgccacgaaatcgatcatgccttctccgcggtggttgggtgggtgaccggccatctagagaagacaaaggagtaggatcaatgcatgctcaaatccaaatttaaataaagcaataaaagactcaaataagagaatcgaatagaagcgaaattttatgcatagatcattttgcatgagagcgaataaataagacagactcatataacgacaaagtaatgagaaattagatacatattaataataacaaacgaagcataaacaccttgcaacccatgttatagagctaggacctaatgcatttcacccatcaaaccccaactgactgacgaataaatcccaataattttactaaaaccctagactgactcgttttgaaaaaccccacttaaacgagcgaccaagatttttcccttgaaccacaagaacagatcccaattttcccggaacaaatccaattgcaaagagcatatgcaatgaaaaggattcagagggctcttaggtttagagggctcttaggtttccatttggcttgtcctacggtcaaggtcggctctgataccaacttgtcacgcccagaaattcccgaatagaattccaagcagaatgtgcattaaaatccccgtccaggaccagccggggtacacaaacgacaatgttgacattcagatccacgtcttacaaacatcataaaagtcttacaaaaaatgcagcggaaaacaaaaggaactggagctaagccttgactaaactgcagcgggaacaccactccacaggcatcctcgacggcacggacgaagcctactcctcggggaaaccttcatctgacacatacccgtcctctggggttgggaaaaagtagagcaagactgagtactacccactgtactcagcaagtcataccggaataggggtatgatgcagggaattaacaaagaagagctagagtggttcatttgcataaatactggcatttataaacaggaattgaatgcgaaaacggttgtaataattaagcagtattaaacatccgctgtccaacgctaacccacgttgcgacaggcccaaccatccacctaaactatccaaattcatcagattacactagggtgagactaatcacggtgaatctggttgaccgcccataaccgcgggcacggctattcgaatagttttactctgatcagaggtgtacaactgtacccacaagacacagccccacgacacgtttccgtgcgccgacatgccaccacgacatcccggaaagaggctgtgacaggaccattcgcataacccccctctaaccaagcacaccacacctcaggtttcacccccactcctcgcaaggcagcgggcagtcccctctcgtgcctaggtgaatccggaagccgcataggccgtcgcagggcccatccaaactccatcacgcccacccttgcctggatgcgtcggctagaggaaagctacactacaagcccagccgttgcccacgctggcttgtggtaagtacgataagttcttccagggcatcccgcgaaccggtccttaactgccatgggtgcgaccagcaaaaccatgcacccacagcccaccatgtgattcattttaattaaccaacaccagagcggtggtactaatccaacattaccattagaaccaacagtctaaacattaatatgattttccccattgtgaactagttgaactaagcatggctaagcaattcaggcatgcaagcttgaatcatgttataaccccaagctaacaaaggagcatggtatcaaaatag

SEQ ID NO: 8322 - DNA, 19206 bp, Oryza sativa
agctccgccggggacgacaccgcctctgccgccgggaattccgccacgctccgccgccgaccaccaccacccgtgtttcccttgtcggcgaggcaagaacgcgtgcgctgggcgacgagccaagaaatcgcgccgcccaccgccgtcgtcagctcgccgaccggagaggaaccatgggcagaaggaggcggcagcgcgcgagcccggaccagcgccgcgagcgctcgccggagaccacccgagcagcccatggcgaggtcgcaggcaagggcgccagaacgggtcgaacatgcaaccaagcctggatgctccaatctgttcgacgaaagaaggatgccactgcgtcttccacgtcttctgcgtcttctgcgatgcgtacaccaacatccggtgaacataacaccagttcgcctcaacctcgccggcgagcagtggtacatacaacaccctcacctcttcttctttcccttaacggaattgctaaaaaaacttttttttatccttgaattgtctcttggggccgttttggattaaaggcaaaacatgccataccaaaattttggtaacttaaataggaaatgtgctagtttggattgatgtcaaataattggtagtgtacatattcaatttggctatattctagaatcttcttcaccatcctactaaaatttggctttacattggtaccaaaccaaacatagctagctaactttgctctaccaaaaaaaataggtagtgctaaaatttacttagattttggcactaccaattaattggtagggtagagaatcaaataggcccttgattcttttttccattgccaaggagtcgaactcctgatcatacagtagaaagctcaaagcatttaaatttagggacaattgcgttcttaccctcactttcaattctaattatgattttacccctattttttagggtttgtgattttaccccagcttttttgaaacaaatcagccgtttgcctctactttggatggcagttaggtgggcccataattattgagtaaaaatatagaaaagagagcagaaaaaattatttatgaaatatgaaatgtccttcctacccctgagaagtaatcatctggagtctggctagccgtccggcccgtcccaactattccccatccccaaacctacgggaggcgagcaggcggcggcggcggctgcctgtagcgatcggaggcggcgacgcttattgcgagccgaagaggtgcgacgcgagcaggcgacgacgacgcagtgagctgggaggcagcgacaagccgacgactgcagcaggcggaggcgtcggaggctcggagcgtcacggtgatgcaaagcagccggtggcggctgaagcgagcgaaggcggcgtggccgcttcaacgagcagctggtaactgtggtgtcccctgccatgattacttcgttaaaccagtggcaaatttcctcgtataaataagttcagagcagattaatcccccccccccccctcttcctgtacacggggtctttttagtgagtattttatcaattgtgcatgtgagcttgggtccaaatgtctaatgtaatcccgtcagtttcgaggatgtgatagcgttatttctttgctccaatgataaacaaatgtagagtttcagaagcacaattctatatcgtgattcgtaaagatatccagatttcctttgcaatggtgattgtttgtgatgtttgctacaaattattgttgaaattttgtcgaaatcctgtcaattttttttctgaaattctatcggaattctgtaaaagtcattgctgaattcatgtcatatttgtcaaactttctgaaagttcgtaaaaaatttaggacggatttgaaataagcaaaattccattttgaaacatgtccagagtctatgcaagcatggctcctgtcgtaaaagtagtaggcgcatatatgcaagggtatacttgtcttcttaccacatatttaacaccgttaaccgaagctaacagaacaggggcaatcgattggttcatttcaaaaaagtagggataaaatcacaaaccctaaaaaataggggtaaaatcactattagaactgaaagtaggggtaagaatgcaattgccccttaaatttatgaccgttggattgcatcaagattcgtatgagagggaaaaaaactcaaaatttttaaatttgtgatccttggattgcatccagattcgtgtgagaggaaaattttttttcacagagatgcactagtggggaatagaactcccgatcacgtagtcaaaagctaatgatgctagtcaattaaacacaaatatgtttttacacaattgtatatgggtagtagttacaatgtaattacactccttttttttgcggggacaatgtaattacactccaactattattgtagtcacatttgaaagtttctcacccaaaaaacttgtggcaatttttaggtagtcccatttcttaaacagcatgctcacttttcatttgcacaatatatcattgcatgagattctaatctaaattacatgcattttagatggttggaggtgagctggtttctgcattcttagtcgatctgcacgcggactactgcgagaaatcaagtttgagtggccaattagtttgccactactgctactttcaaaattatgtcacaaaaaatctgtctgctagagaggaatggtggtgcttaaattttcctttaacattacattgctgcatttgttttcggaagaactaattatgcttgctgatttgcatttcagatgttgctccactggcataggaagcaccctaaagcagatcggatcccatgtaatcagaggaattgcggggtgatagtaagctctccccgtgagttagagctacacgtccacttctcccacgtccagcctgcgggttggtgggtagagtgatcaactgaaagttcggcatgtttttggattggttccttgctaactattggattagttccttgcttactattcttatgttaacaccgatatctgtaaccccttaatcataatatcataatttgatttgattgcgtactctaaatgtgttgaatgacatgcgcgtgtgactaaagtgattactgattagtatctcagcataaatatgtttgcacattccagtagtagccttaatatctgtatgggaatgggatcctctgacgtgaagtcagagggacgtggtgactaacatgtgggccccactgctcacgggcccacctgttagtgaccatgtcacgtggcagttcacgtttgaggaaccgcctccatctgtatgagaaataaagcaccaactaagcatcatttggcaacaaccaagattgtagcaacatggctgaatggaagtcacagaacagaatatagaatatacacaatgtgtatattacacaccatcagaatttatttgagtttgagtacccccgccacgccctgcttgttctgcttgttcagaattttggagttggagatgatagggcacacccgcccagcttgttctgttctgccctggcacacaagatcttttttcttttggacgaccatcgcatcaaatgcacgcaagtagcactcgtcatgaatcgactgtgttgatcatttttcagcatggtgggtttcaattggcaaggcaattaacctgtattttgtacaaattccatagacttcacggaagaatctcagccctcaaacacccttctagtctttgcagttgaagcaaaactttctcaactgaccagtctaaatgaaaggggcaagcttcccaatgaacagcagacgccagacagcttctctgatattttccttacacaaaacaaatcagccgaagcattggtaaccttaggagcatagtcaaacacctttatttttgcaattatctcatcaagcttcagaaggatgctatcatttcctgaatgttttccagctccagctgcaaaatggtgaacactgccattcagctccatccaactgcatcctttctccttcaacgtcccctggacttacattactctcctcacctccttaagaccttaacataattctagttgccatatttgataagagcacatgcgctctgccacgatgaaacaagagcaaaatcatgcttgatgaaacaagctaagatggtccatccttaactcctttctgcaaaaaaggactttcgctcagagaacaggagaataatctgggatgtgttatttaaactgataaacatggaacaatgggtgcacaataactgaagttataagctgttgctggttcgattttagccaatacagtgtaatgtgcataaaacttgtttagaagtttagaaaattacctatgaaaactgaagcttgagcataaggtttagccaatggataatatcttatgcaggccctaattctcagttaaggaatgggtccatctacagttagcaagggcacacactagcacaagcagatatgatgcgtagcactaaactaatacatcgattgcatatgtgtacatgagatgagttagtgtttgcacctgaacatcattgcaagtaaatcggaagtgtattagtgctaggaatcaaaactagccccattacagatttttgcccgttagcagcatgtaaagttaaaacgtaatttagtcaagatcaaatggtgaaaagaacacaaactggatcttgacgtggaaagactatgagaacctacctccttgaggactagtgaatcttaaagaccacgaaacaacttctgttcaagcttttttgttttctcactgtccgcaagctccaattccttctcataatccttcctagacagaccctgcgattgttatctagaatgaattaagtacgttggaacagaaggcttggtctctcataattcaaaataaaaatagatggcagctagaacacagtccatacctctcaatcttctatccctgtagttgtaaaatatgaagtacatggtgtccttcaagatactaaaaaacatgcttccacaaggcttctccaaattagcccaggcatcctgccgattgcagtcagagtctcagagttaagttattttagactctaagaagcacttacagctttgccattttctaataacattggtcacattagccttgtatattccactaattccctagaaagtggctatcacacaagacctgctgtttgcccttaagacggtagaaatttaaataaacataagaaaggtcggtacaaataaacaaatatggagcaacctaaccttctcattcacctttcagttctccaatcataattttacatataaattgtacagaacaagaagaaatatacacaactattatatccataaacaagaaaacttaaaagtgcttcttctaggcgaagttcaactttgtgaaactaggtgtaatccaaacaggagcgggaaagttggaccaaagctgaggagacacgagttcctctctgctgttatgtttcaaatcaaataatccaatatcacgacgcttattcttgaatccaaataaccaagcttcgtcatcatcagtaaaataggtataattttccttgagatgtggatattgttccgtgctgagacaaagtgattggttatgaccaagaaacaacacatgaccatccaggttattgatctctacatgttttttccccatagtatcaacactatatattttaatttccctagtataccgcacaaatgttgcatggtcagcaggcaagtcagcctcgtaatcctcctcaatgtcctcaactgacctccaaactagcagaagaccaccccatggagcttgcacaatgtacctactgtaagacaaacttccaattatcatcttcatcgtgatcgtggggccactgagatcaagtgtatggatttctccctgtgcagtcagtgcatacagtagaccatcaatgtagatgcagtcagaatagtgagagtgtgatggatgccatgtccacttatcatccccaacccttgcaaatgaaatttgaccagctggctcgtggatcagaaccacaatgcatccccctgtgaaagtatcagtaaacacaaaagccttactatatatgtaatcccgcagctcgccaagggcaaaaattgatggctctgcataactaaccctcgttgcagtgtgcagtgagaactcatacttgtggagagcaccagactcattgaagatgggattcacatgctccattgtggtaacagaagggagagctatctgttcccctgtgatcggattgaccaggtgcatctcggataagtcatcagctgtaatcaaccaaccaagtgaggacccaatcagaaacctactgcgtatgggtggctccgggagagtaatcttgtactccctcttctcgacaagactatagagacacacgacgctatcgccagcagattcagaggtgtatagcaggcacggcgtctgggacagtttatagatacctaggctgcgcaattcgttgtaggccgagagccaggagttacagaccgatcctgcacgcacgaggtcagggatctccaggagggcaaatatctccattaagatgtcctgagacagctctggtaaatttgccacaacactctctgccattgatggctgatcaccatcatctttttgcacttccttcagtaaactactgtgaaggggcgctaggagcttggattgtactactctgaagagtaggttgcacaaattcttgggacatctcgctagatcccctaagttcataatcctggctatagtactacagggcgccattggataattggagcagatcgagcccctcttgcaaggtgaaattcgtcgcctgcttgaatacttgcagagttggaacatgtgatgaagcaagagacgcaaggtatatacctgaagttacccaaggaaaactgaaacggaatttgttgtcctcaaaagagaaatccgactccggatcagacttgttcccgggaatccactctgaatcatactggctcacacggatccatattccgaatcgaggtcagcaaggaaaacatgtggagaactcaccgtcaagcgctgccgccgtgcatggtggggggcgggagtggatttgtgcgcggaggagaagcagccaccgtcaggccgccgtgcggtggagcacaggaaatccggcggtcgattttggccgccgtagcacagccaccgggggccgccacgcgctgccgtatctccgaggacaggacggccggcggttgaagcggcgacgactccgggccagcgtgctcgtcggcggagaggatgcggcttcgcgccgccgttgtcggcgacggcggcgggtgggcagccacgcgagtgtttccttctttctttttttctcaggttttctattttgcaagcgcctgcaaaattttaacaattttgctatatattttgcgataaattttctcaaaaaaattgacatatgtaaattaaagtataatcgtagtgtaattataatataacttgtatgtaacttttaaatatctcttcgtaatctccgtaacatgttatttcggtaaaataaaggtcatgagaacaaatcctctcacatatctctactgtaattttttttctttcttaccagaacaaatcttgtaaaagatctaacgattcaaaattacgtgaaacttatatacaagttacacggtattcacatttaagttataatataattacactacgattatattataattatatctattaaatttttagaagaaaatttgtcgataaaatatacaggtgatcccaaattttaatccatcagtcgattttgtcagccgttggatttgcttggctggtggatgcacattctggtaacttggttgtattttggcaggcccgttaacccgtgggcttgcattgctccacattttgccttctgttaaaatgtgtgtattcagatgcaattcggcataggtttccttgccgaatcgtagttagtctgtcttctcaggtacttgtattacatatggggtgttaggacgctaataaaaaaaaattacagaatccgttagtaaaccgtgagaaaaatttattaagtctaattaatccatcattagcaaatatttactgtagcaccatattgttaaatcaggagcaattatgcttaaaagattcgtctcgtaaattagtcgcaatctgtgcaattagttattttttagcctatatttaatacttcatgcatgtattcaaacattcgatgtgacagggtgaaaaattttgaaatgggatctaaaaagggtctaggttacacttatattagaacagaaagagtgatgtatagttaggggtggccatcgcgattcgcgaaagaggtggacggggagctcgtcgagttggctggagaaggcactcttgaatgtttcctagccaaacaggtcgagtggttgtatgtatggtgtagttgagcgatctaagccgtccaatcagttttgaacggtccagaatcgagaataattcaaagttgtttgatcagtttttttcaagtacaaacacggctcttcggtggcatccaaatgcatttgtttccaaaaatgaatcggaaaaattatagggggcctaagatcttgatatgtatggggtggcttgatctttcggtgagttgagataactacgatttaggagaaatattgacgatccgactacaaccgtacgagacgttgttatgttgtgccttagcgatcaatacacatctccgagagtttgttgatcttgctggtgcagatcaaccctattcctgcaagcaatcgagaacaagtaagaacaagatagaaagcaactgaattgctagatagacaagacgcacaaagatgaattgatatacgataaagtggggttccgaacaagcagacggacggtctagccgacacgcgtgctacaagcgaagtagcaatagctaaacttacaattaatcaaaacccaactaaccctgaaggggttactagctatttaaaggatagaggaggtcataagggcgtcctccctctgtttagggcacagccccccttggaccagggtcccagacgaagttacagacctataggcccattacagacaatgcagccccttgttttttcaattgccgatgactcggatggaatttgacaatgaggttggattcgttggaaagaggattccgagagctttccataaagtactcgtgggcccaaaacgtaggccatatggagatttggcgaccgtttgaattcagcactatcttaggaggccgaattggattccagaacgctgtcacgcccggaatttctatccaaaattctaaacgcttacatgtgtgtgaaccctcgtttaggaatcagccgaggcacacaataacaaattgataatagagtacaattattactctaattaataagcgaataaaatgtcattacagaggtagatagttcctctcaatcaataaagatctaagcagcggaaaaataagataaacggcgcagacgactccactccacaggcagcttgaccagggctacacctaatcctccacaccatcagcatcactgtagaactcctcctctgatgaatgattgcaaggtgagtatatgacatactcagcaagccatgcagcaaatatgcaagtgcacaggataacaaaggatggcatagtagggtttcatttgcataaacagcatttaataaacatttcagaatttaataaaatagttaagtagtaattaaacaatattaatccaacgctatacaacataccctgttgcataggcccaaccattctgaacaactatcccggctgcacagttctatctccaaaccaggaatataccattccaaaccaggagctaatcaaattattaccagttatagcatcttttattatggtgagaagtgtgaaactaatcacgaaagacattgttagacccgcccataaccgcgggcacggctattcgaatagttttactctggtcagaggtgtaccactgtacccacaagacacagccccacaacatgtcaccatgcgcctcaataccaccacggtacctcagaaaggagctgtgacagtacccctcgcacaacacaatccaccacagcgcaccattcctggatcataatcacccccttataaacaaggcatggactccccagcgacccccgtgggcttatctccgccacttctcagtctggtgccccgcaatgaaccatgctatacaaaaggtaaagctgttgcccacgctggcttgtggttggcacggttaatatctcacaaccgaaactcatgaaccggtccttaattgtcatgagcacgaccatcaaaaccatgtgctcacaacccaccattatcaggttttagttggcaaattaattaattaaccaatcatgattaaccatcatgagctatcattaagccatcattaaataatagtgagtcataagttatcccaatagtgtgctaatgtttctaagcatggctaagcaatcatatctaatatctagctgaaccaatatataaagcccaactagtcaagttataataacccaaggtatcaaggaataaagtaatcaagaacaaaaaggctataacaaacaataggttaattccacccaacgacattcgaaaataaatgcaatagttgaatagaaacaatagctttaaacgggatcaacatgctcaaagggttgtttgggatctgtgtgacttgccttgctggccttggaactcttcaaaatcttctcctgcaaactcagactctccggaaacgtcggaatctaaagagaaaagagcaaaatcaccaaaacagcacataaacaagcatgaacagtacatgtggatatttttaacatgtagatctcaattttagaaaaaattagagacttgaaccaactaaatccgagctaagatgaattagttatgaatttttatagattaaatcggattaaaacacttatatgggttttaattgaatgatgacgcaataatgaattattttttaaaaggaaaaggaaattattgcgtcagcggttagggttcgcggtggaccgggtgcacggcggcggctcacggaaacgaacggccgagatcgatcctatccacaacgaacggccaagatttaacggtctacgaccggtctacgacggacggcaccgatgacatcggtgatgacgtcatcaccggcggcggctcgggcgcgcaagctcgccggcgaacgacgacgcgacgccgcgaatggaggacaccaacacgtagagggcgacgtggcgaactcaccggtgaccaaaacagcggcagaagatcaacggacggcgacggcgtcgaggaagaagcggcggcgaccttcggcttgacgacgacggcaacctacggcgacgacggaggggtggacgagatcggcgacggcttggtgaccacgacggtgacctccccgagcagcgacgacgaccggagcgacggccgcgcacggctggagctgcggcggcgacggcagcgcacagctgcacggtgctagggcgctacagacggcggcgggcaatggcgagggtggcgacggatagcggagacaccgggggtccttttataggggcaaggaggcggcggcgaaggcccacggcgaccggcgacgcgatggaaggtttagggttcggaggagagagatcgatccgaatcgaactcgaattcacggatttccaaaccgaattggcgatcgattccaaaaggaaaaaaggtagagaagattccggggagcatttcccctcaaacgatttcaccggatcgggaaagatgcggccgaattggaaaggtggcggcggcgcggcgcggctagggtttcggtgcgaggaggacgacgagtccgacaggtgggacccacctgtcagcgaccgagcgcgcgcgcgcgggcggctgcgggctgactaggccaaagaggagagagagggaaggttttgggccgactttcggcccaaagccaaaagaggacttttaaaatattttccaatttaaattattcatgaaatgcaattccatttattaaaaatacttccttggctcaaataaatcccagaaaactctaggaactatagaatcaagcaaagtatttaatgaaattttatctggccccattttatattggaatttattatttaaaattagatcttctcttctaggcttttaaaatcatttctaataattccaattaaacaacaattcatctccatctctgcatgcaccatggccatcgtgtttatcttccatatgtagccccaaataagtggattggtcatgaacatataaacgcatacattatgaggtagtgtcgtattcttgattagattaatttggcacttgttatgaaacgagaccacctgtgggtatatgatatgatcaatggttatatccgtcgtaggcatggtcacattagatcttcaatatgctgagttgatagaagggaatctaatatgataattatggattgcttcttatatgaaatacagataaaacttgatgaatggatcgatcagtttgttagataataaaataaaatcccgacgtttagtttataaggaagaattaaatttttatatattactagcataaatgctcgtgcgttgcaacgggtgaaaacaattttaattgtgcatattaaatggtccgtttttaaagttttgtgcccgtcaaagaattaaacagctagtaaacacatgataaaacaggaccgacaaaagatactttggcaaatacgtactgtcaacacagatgagtagtaagatatattgggttccatgcatgagctatatattatacggagttgctagaaatatggcgccatatgctacagtcgactttttttcagccacttacgcagtagttacacctcatttacacctcacttatatatgtaattagtatgtaattttcaaatttacattacatatgtaattttaagacttacattgtaaatacactaaaattacatatgtaatttagggacttacaatgtaaatacatgccgactatttttttataaaaaatatagcaccataaatatagctacacccaataaaaattgatatatggttggtaaaggtcgataaatacaattgatatatggttgtacactaacgcacgcggccccatgctggacctgcagccggagcttggcgatcgaggcctggtcctaacataacatgcggaagttgagcaggaaacaagcgcgcggacgtagatatatcctactccctccgttttaaaatgtttgacaccgttgactttctagcacatgtttgaccgttcgtcttattaaaaaaattatgaaatatgtaaaactatatatgtacatgagaatcaaatgatatgaaaagaataaataatttcttaaattttttgaataagacgaatagctaaacacatacttaaaaatttaatggtgtcaaatattttaaaacagagggagtatatgcggcctgcgggacagcgggagttgaagcagcgcgcgcggacgtgaaggagagaggtcgatcatcaaaccgctccagcgggtcgtcgaagccgtactgcatggaaagcatctccgtcgtgttcgccggcccccgccaccgtatagtggccgtcgtacgatgtggcctgggtgacatcgatcgaggacggacggcgatgatgacgtatgaggcgtgtcgatcggtcgcgtcgcgtcgcgccggcactggctgtgatgacgcgctcgactatcttaattttgatcgatgccgctagcccacagccattgtctctacccaccagatgctagccttcatatatatatatatatatatatatatatatatatatatatatatatatatatatatatatatatatatatatatatatatatatatataggggcggagctagagtatactagggggtgtccaggaacccggtcaagaaaattttttagctatagatcatctattttcaccatgtatgtatcctctcaatacaaacttaggcacccgcatcagcttaaattcgatctagagtagaataatttaagtaagtggcaccaccatccatttcgttctagctccgccctgttaatatatgcgatcgcaaccgcagagcgtcagcgtacatcctaccacgccttcaccgacatgaacaccatcaccatcaaccagccatcgctgccgttgccttcttaccacacccatcaagaccttaattctctctgcttctcgatctatatagatctattcgtggcagcgggtgcatacgtacgtacatacaaaggagatattgttggtggaggtggagttggaagaaaaaacgatctgtgtcaggctcgtcctagaatcacaatcgatgtgtgagagcgcgtggctcgcgggaaatcgggaaccgctgctcgtatcggctgtaagcctcacctatacaggctgttgaaagaaaggggagaacgcgaccaagtgggcttagggtctgacgtgatttattccgatagatggaaaaaaattaaactatatcggcaagtttgcgattttttgtgtccgacacgatctcgcggtgacgtacgaaaagcctcgacaaaaacatcttaaatttttataatagtagagataaacaagtgctgtaaaaaatactgacatagcaacttttttttagagaaattgtaattatttaaaagtgtggtaggaataatccgcaatctccgcccgataatattagaatacaatatggctttaatgcttaataccacaatgtaaaatattttatttctattgacagcgcatagcacgacagtagcacgagctagtacacgttccgtgttacttagtacttcatttgacaatgtgtatgtccatgcatgttgcagaatatacatatactaatattagcatggatatatcagtatatgccaataatccaatatctacttgtcctttaacaacgtgatatatatgttggtcttgtataccaaagttactccatcttgacttttagatatgttgaaatccctcctttggtaacatttattcttttctcatatatactgcatgaattaaaaagcacttgtcattataaacaaaacagctcccctaaaaaaaatataaacaaaacagctgaattatatgagtagttactgtagaaatttagcatggttataggctcttttgtggaaataattttgtggttgacgacggtttacctcaggcagatggagccgggcaagagtagagaggcggcacaccacctacacacaagtcaatcatgatatgtacattagttaattagcactactcaacgttgcacttttaaaacatataaatctataaataaacaaagtcctagttagaactgagattttaaacttgatcatttggacattcgtttggccccgggctttgtacttccaaaatggacaaaaaaaatcgggtgtatcaaaattcagaaatttcgaacgaaacattttgaaatttaaacacattttgactgaattcaactaattttaaccagattcataaatatttttaaaaatctaaaaattttggatgaaatagttgcatgagaggggaggatcctaaattcccaaattttggaattttcggaagttttggaccgaaattttaaaccctgtattgggcctatgcctatctcttggattttaaacaagagagggagcccagcgcgcggcaaaacaaaaattcagaaattgagaatttaatttacggagacgagtgttatattattacagacgtagagtcaacttagatgattcgaaaaccgtctgcattggacttctgcacacgccacgccacgccacggcgcggcgcgttgattgattttacctttctcgttggcgcaggtggagatgatgtccgccggcggcgagaggcggcagacgtcgcggaggagggcgaaggcgcggtcgacggggatgtcgacgccgatggcgcgctccagggtgtggttcacgatgtggcacaggcacaccgcctcccccttcacgatggacgacagccccgcgcagcacccctccggcgccgccgtcgccgccttgtccttgaagaacggcaggcacgggctcagctccagcagcgacgccacgcacgtcgtcgccgccgcctctgcgccgccgcccgccgccgcgacgagcaggacgaggaggacgccggcggcggctgtggacttggacggcgccattctagctaaatgtggattagagcttgagctagcttaattagctttggttaattggagtgatgggagtgtgtgtagatgaggctaattgcttgtgtctatttataatggctgtgattaggacttttgctagctaagagtgttctaagctgttgtagtgaagtttgagctggatcaaacatgaaaatggtgtgaatgatcagaaaagtttgtaattagcaatgcttaatttccactgtttttgttttgctgttatgtcttcctgtttttttttttctgtgcctgccctgaccaaatttattaagattgagagaaggtaaaacattttcaacaaacatactccctccgtttctaaatatttgataccattgactttttagcacatgtttaacctttcgtcatattcaaaaacttttgtgaaatatgtaaaactatatgtatacatataagtatatttaacaataaatcaaatgatagaaaaataattaataattacttaaatttttttaaataagacgaacattcaaacatatttaaaaaaagtcaatgacgtcaaatatttagaaacggatggagtagttattaatattacatctcttcctatggataaacagcactttacatcgaacaaatggaagcatacacgccgggttggctgccggcattgcaattaaagttatttcttcagtttgagatatttgtaaatgttaatttgcaggaactaattaaataagtttgttggagcttctagaatgtagattaattgtggctatgtgatcgaaatattctctacgaaatcgatctaaaatgtggtgcatgcattgtgcgtgtgtgctgatttaagggattgtatcgtgggagcacaaaacaaatgccgttcgttggtttcgctacaacccaacttaatttgcatctattaagatagtgaccaacctaaactgattaactgccatcattgtttttatatgatacctttattgtggattttttttttgccgcgccgggacaaagatgcaagcggaattttgtaaaaagaaatttgaactgaaccaaggcggcacaacaattataatgttatcgaaagatgtatgttccctccgttacaaaataagctaaccttgtacagtgtaggtaacattgaagatatattcacaccgtacgagtttggtttatttttggacaaagagacgagtaggtaacaacatttcagaaattttagtgactgacccgtagtgtcactcagtgtatttggaactcatttgtgtggcaaaaacatttccgaatgattcagggttttaacccttgtgaccacttttcaatccaagtgcaaagacaatagaaaggtggctggtatgggtgtacctattcagtgatcgtctgtcacctttatttctagtggacgaccctttcattggatgccatgtgtcatggctaaaatattgaactgtcatttaaattattaagtattaaacttctgttaattgaaaatatactgaggccccgtttggctaatgggaaagggaaatcatttcccacccactaaaagacatctttaaattttaaccatttattctccttcttccatttaatcctaacccttcgttcatttcccaatcccaattccaccacatatttcccattatccaaatacaacctgagggttttaaccaaaattcactttgaactgtgtaaaaaaaagaattcactttgaactttgagattgtcaatctcaacttttcaactcggaaatgaatcaaatgattcgcgtttctactcaaaattgcaaacttgacttttcaactcagaaaatgcttcaacttcctactcgaaattgcaaccttaacctcaaagcccagatgtgtccaacgtgaaaacccaaccatattattctcaacacaaaaaccaaaaaatagaacacctaatccaagggccgactcatcgttgataatcgtaataagtatacttaaggttcctcatctttccatcaagtttaaatatcatatccctacacacaatactaaaatcctaaccccaacttacgaaactggactaaattaggtcctatgacactataggtggttggttttactgacgtggcatcctagttagcaaaaataaataaaaaaccatggggcccacgtggcaatgcctgcttcattcttctctcctggaccctggtgatggggaggcggtcgggaagaagcgcaagacgtagggagagcgcattcacgaaggcggggacagatgaggcggtcaaggtgcgggctgtcgccctgaggggtggctgagggagtcggaggcgggagaggaatggagaggtggtcggcgagcccatccaagctcaagctcgcccggcctccatgcgagggaggtggacggaggagcgtgagaggtagtcgaggcgcgagctactaccacgctaggctgccatagagggtagtcgagggaggggaaggcggtcagcaagctcgtctgagctcgtgctagcttggcctccgtgcaagagaggtggaaacgagtaagggagggggttgcgcttgcgcggttaaggagcaatcggacgatggaggtattgtgccagagtgcatgctgaccacggcaaccggttgggtccccgtgggctctgcccccctccccccccttcccccctcctcctatctcgaatcgaccgagcctatgacaatgtcgccggctatctcccacatggcgaagatgagggaacggaagagaagaaaagaggagaggtgaagtagaagacggcgtgtccacttcaagttaccagccctgatccaacggagcacgtcgaagcccagcgcagcacaccagatcagttaccagccaacaaataaggcccattttgacccaagaaataaagcccaattttgcccggcccatgcatgcacccccagcttccacgtagacccatggctgccaccacacccatatccacgtgcatatatgcttgccagctcgtcccttccccggcatccaaatcctcgtacacgccatcccctcgccatggatggcatggccaagaaaccgacgagctccacctactcccc

SEQ ID NO: 8323 - DNA, 109139 bp, Oryza sativa
  unsure (1)..(109139): unsure at all n locations
aaatcacagggaaaaaaatgtgtgcttgctcaaggctaggaaaatgtcaagacccttgtttgaatgccaccttagtttttaacagcattgaatgacaagcaggatatgagtctaggacggaaggaaatggtaaatacataagtggagctaaccagtaacaacccagcggtcagaacactgcaaatgtatcaaggtgcaattatgattttttactgacatgaatgaatttctaatgtggacttcaagctttaaactaattgggtatgacttccccctgaataactttaggagcagttaaatcaactaactttggtcaatagcaggttgctgactattattcatggtcgggggcctgtagttcattgatgggggaacttcatcaagtccaatttctcgttcaagagtgctcctgaactcccttgaaacatcctatatgcggaaaaaagagacacgttacatatgtatcaaggaatcacatcagacaagtcacaaaccaacctgtagctctctaatggttggctggaaagcacgcaaagtcttccccaaattcctggctacctgcatacaagcaagcaagtgagacctaacagttcgtaatgatagaaaggttggcaggaagtacatgctcattttcattcacagtaaaataaagcagaacaacaacatgacatatttaaagtgaagaaaacaacaacataaaatatttcctgcaaggctttttcttttctgtatgtagtgtgtgctttcaaacctttgcagaaaacctaccacgatctggcagtacatgcaacaggttaagaaactataggcgattagaatatggtgctaatgctgagggtttagtgaagaattagctagaataggaagccggacaacagcaaaaatatgatgtccaggtttgttgggaaagagtttacctctgctagtcctttgggaccaaagactaacagagcaaccactccaatgaccagagcttcgggagctccaactccaaataaagaagcataaacacccgttccacgacttgttcttttgctctctacattgaagaagtcaaagaaacacaaaggctgtgagatgcctaatttggcaaagaattatggaacagcacgatacgaatacaggcatagtaaatatagtaaagggaatatccttcatccagctatataaagcaggaaggtagatgggcagttatagcggcgaagacaaattagatgggtataagaaatcctgatctcttcctttcctagtctttagctttcctgtttttcatacaaagatggtagtgtgttgacgtctaattccagcccaagagaaaatttgtagatgaggttaggaatggtagttatggaaacgaaggaagaagtggcgagcagccaggtgatcccaggcattttcccgagcttatggtgggcagcagctgagcctgagcagcacaaggacaaaaaatgttgaatgccgcccaatttgtgcactgtatagagcttgtgacaagagttgctatttccatccaagatatgatgaatacttttgacggatagtaatacaaagaataaggagtacaactaaaaggtaattagatactactactaaatgaatccaaacaatcaaatcaatcaatgaatcgtctgttggttgtgggagagtacccgtacggcggcggcggcggaggaggaagcggtggtggcggccggagacgaaggataggccgagcgtgcagtagggctgagcgagcgtgagcctcctcctcctcctcctctgtgaggaagggaaaggggaaggggaaggagtgcacatggcgacgcacggaggaggtcggagtagcaggccagcgacggccatcgccggcggcgggcttcgaattcgattcgattcgtagggtatatgcagctcactcgcaagtcgcaccgcaccaccacaacacaagaagagggaggcgaacgatagagggagatattgcggcggcgcccgacaacggggacggcgtaagggggaggcggaggtggcggcgcgaggggtggcagaggcggcggcgctcggtggcggcgccggagagggagagggagcgggcagagcgagagggtgcgagcggcggcggataaggtttgggttagtgggtgttattttgccaaaaaacccctactcttttctcattttgcagagcggtcccttttcgcccccaaatactgtttgtaatggcctatatataattacagaaaatcgaaggtctttttcgaaaaattatcgacccacttctcccatggctgggagtactaaattaaacaaattgggtgtaaattgtgaaacgaattttttaagtttaattagtccatgatttgataatgtggtgttaccgtaaatatttactaataatggattaattaggcttaataaattcgtcttgcagtttgcaagcggaatctgtaatttgttttgttattagtctacgtttaacactttaaatgtgtaccgacatacccgatctgacatgtcaaaactttatactactcgatctaaacacaacctaaaatttaaattcctgtcacatcggatgtttggacactaattagaagtattaaatatagactaatgataaaacctattttataaccttgaactaattcgcgagacgaatctattaagcctaattaatccatgattagcctatgtgatgctgtagtaaacatgtgttaattatggattaattaggctcaatagattcatctcgtaaattagctatcatttatgcaattagttttattattagcctatatttaatacttttaatgaaggccaaacattcgatgtgacatgtactacaatttagtccttatatgtgaagttgtggggagtcatctttcttggtctctgcctctctggtgcttctgatggaatattgacgaggttctatcaacgagtttcctgaagtaacaatgtggaaatcagttttctgctttaatacacattttaactcttatcgctagatatttaatatattactccaaagaaagcagttaactgtagtgctaacagattaagaaagagaaaccggttaacatgaaaaataaacattgaagatatcttggtcggccgaattacccctgaactatcgtggtcagccctgaactatcgtggtcagccgaattaccccctaaactcgaaaaccagacattactcacaacgaactttcaataccggacgaattacccccctcggcccaatccagagcgattttgtcctacgtggcgtacgcgtggcaatccagtcagtattttatttaattaaaaaatgtgggtcccacctgtcatactcttcccctcttcctctctcctctctctcttctttctctcttacagggcagcgcgcaggggtgaggaggtgggcggcgatgcagggacgggcggtgggctggaggaggtgtagcgccggcacctgccggcggtggtgtcggtggtggagggtgccgctgcggaggccaaggcggcacgaggtgaggagacggcggcgagagatgaggaggaggcggcctcgctgtgcggccgcgccgccaccaacagaaacctcgccgcggcgcgctccgtcgcccacgcggccacgccgtcggcgccaccgtcatcaccaacgaacacgacgcaggtctgcgcgcccgctgcagcctcgtcggatgcgtcgcctccccggaagacagcctcgccgtcgatgaaggtgtcggcagtggagggcgccgccgcgcggaggccgagctggggcggtcggctccggcacgggaaacggaggcggcgcgagacgaaggagggtcgccgagggagctcgacacggcagcgggatcgtcgattccttcccgcgagatccgtcgtgggctacgcgcacaccctcaacgcccctgccatgcccgccgccggcctcggggtctcacctgagccgagaaggagagagacagagagatacacacagagagagaaagagggacgacatagcccgctggccgcctcgcctcctcaccgcgcgcgccgcgtgcagcgccgccgcgccctccccgtggaggactcgtctcccgctgcctgcctgagctgagaaggaaagagacacagagagcgagagagggagggacgacctagcccgcctcctccaacgccttcctcggcgccggcgccgcgccatcctcgcactctgctgtcgacccccgcacgccgaccacccgcctgctccaggtgcgtcgtcgtcgccgccgcccactgcctatccacgtgcgctggagagagagagagagagggggggtagaggggaaaaggggtaatgacatgtgggccatatttttttaatttctttttctgattggatttccacgtcggcgccacgtatatgccacgtaggataaaaactgctcaggattgtatggggggtaattcgttcggtatcaatagttcgaggtttaatatgtccggttttgtggtttaggggagtaattcgtaccgtcgcaatagtttagagggtaattcgtactttttccttttagtgatgaaattttcatgacatcataaaaatttccgcccaaacaagccatcatataaatttacatacccaagattttgactgcttatctttattctcttgtacagtgcttgctgccaccatcaagttcatcattatcaggaccaacaagatcaacaaaggtaattctgctagtctgtgagctgctgaagccatttgatgagcaaccctgtaatttggttgaacaaagtaaattcacaagataatgacagcatgtatatatatttgctgatcagttagtggaaactaatagaattgaattgactaaagagcatactgattttttaaatgataatactgacataactattgcaataagagaagttaaatatagctggttatgaggtctccaaacaacagaagaaataccagaggtttaatttaccttgctccatgcttcaatgacacaagtgaatattatatgagaacgtgaacttttcaagttcatactggtggtgccaacttttctgtttggaaggccctgtaagaaaaacaagctcagacaagctatcaataacgcttgagcaatggtaggcttcaattcagattttaatctctatagaggagaaggcagtgactcagttattagaaggacaacatgaaacaaatagtttcgaaagagcatgatacaagtagtaatatatgcgatcttaacaaaaatacagcttgttatcaagacaaaggtctttgtgactacagggtagatcaagcagaggtcctggttgtgatcctcatccatgcagaggtgaaattgaaaagcaaagaaaccctagttttaaaagcaaaaccgaaaggacaatttctttctgctactcttattgatcaaaattgtcccactgatgtgcctatagaggaaaaaaaaattttcgggctggttttgttggattactccgtgccataaaaggataaagaagattttctgaacaacttgacaaatgccttgctatgtttgctttatttatttattgttttgcgaactctccttgctattttctgacagaaacttgcagattagtgcagccacttcctgaccaaagctgtaaagcatcactggctacaaagtacactgacaatgcaatgaattgaaggtcattttgattataccttcatcaagatctgattgacgtcctcaaccgttgactcatactcatcggtcaagttctcaacatggacaccattgcaagcattctctcttatctagaataatggagctgaataagtttaatgcaatccattagcaaacaccatatacaggattagaatatacctaaagttacgctgagatggatccaacaggtcattaatctactcattatatacctggaaagcattgagcaaaatttgcatcatgtcagatatagaaaccttgttaaattaactaaattcagaaaaaaaattcacatctagatgcacttttcagttcaattaagaacacgcagatgagtcagtactcagtactcacctcaagaaacgagcactggcattggtagcttgtctgcttctccggtgagatttctcgcctctgtaccaggaataaacagaattgtgattatatggaacaactagaattttagaattttcaggatataccacccaatacgcactgttttccggatttatcacccaattcacactactttcagaatacactactggagtgtgaattttcttcattccgggccactctgtctaaccaaagctacacatcgtcagttcatcccactcgcgccgttgcccacacgcatctggccgccggcgagctcgtcctctctcacaccggcgagctcctcctcccccacgcgcgcgctgtttggctgtcggcgagctcgtcctccccacaccagcaaagctcctcctcctccatgcggacggcgccatatatgcgcgcggacggcacgaagtagcagcacgagggtgacctctggcgagctcgctcgtatcgtccccaagctcaaccgctgccgcaccgggctgctgccaccacgccccgagccatcgccggtccaatctccgccaccgcagcctcgagctcgtatagagctttgccaccggagctcgacgccctctggcctctgccctccaccgctgctcccttctcctccggcccaccaccacgtacgccaatgacggcgacgaaccagcgacggcgcggctgacgcgggcggcgatggacgggcaatggcgaggctgacgcgacggacgggcgacggcgcggttaacgcaagcgcgagcggtggcggactgatgacggtggcgccgggaggacggaggatgatggtgtgactgacgctaggggatggagtggcccggaacgaagaaaattcacactccattggtatattctaaaagtagtgtaaattgggtgataaatcctgaaagcagtgcgtactaggtggtataatctgaaaattctcatggaacaacaggtttaatcaaatttctcccttaagccttggatttgagcaacgagattctggaattcgtaggatttgtgcaagagcatgcagaattgcaggaagcttagattcaacccgaactcacaacggtgggccgcgttgaggacggtggaggcggcagacgctgccaactgccaactgccaaggcagggggctatggcgacgtggcgaggagtcctcgattccgtgcggcgcgcatggctcctcctccacatccgccggcgcacagctcctccttggtgttcgccagcgagcacggctccacctgccatccctgtcgtctccgccacgtttggctccgcgccacgccgcgcccacgatgccggagggaaggagagagagtttagtactactccatatgacatgtggggcccatgttaatttttaattttttattttttattggattgccacgttagcgctacatgtataccatgtaggacaaaactgttccgatctgccacgtgtacatatataccatgtaggacaaaaccattccgatctgccacgtgtacacgtaggatgaaaaccattctatattgagtagggggtaattcgtccggttttaaaagtggttttaaaagtttagggtgtgaaatatctggtcaaaccgtcgggatccaaaaaacacgtatcgacgaaacaaagtgcatctaaagcactcctctctcaactaagtgcacctaaagcactcctctctcaactaacgaactatgattgaaacctcgaagtaatccctctcaactaacaaactatgattgaaaccttgaagtaaaccctaactttttttcttcgtctcaacccctcatctatttatataaaaacttgtaaaacttttattaacaataggactcaatcccttaatttccaaacctatacattttccgaaactacagccggactgcttataaaccaatcaaactcctgcgcgaaaccgactgcccgtcgatctccgtttcctgtcaacacacgtgcgcctcctctactgaagcttcacgcatgggccatctcctccacgcgctgacccttcttccaatgggccagcaaatcaccaagcaggccgtcgctcgtctgggcctcctcctgggtcggttgttccagcacaagccgacgccaacacaacagtatagcacacgcaagtacgcagcacatgcatgcaacgagacatgcatatgcaccacgctacagtaccatgagtactgtagcaaccatatactccgaatttcctcaaccaatttccttcgcgaacaccgacacttgcatgcacacctcgtgaagcctattacgaagatttctcccacacgatgtccatccaccgtatactatatcgtatccaacttcgttattcggtatccttgaccgtctggacctcaactcctccctgagtttagtcctgatccccaccgttgaccaaagttgatcgacctctaagaatcctgactctagtcaccttctcatatggtattccgaccgcactagacctctactcctctctgagcatagtcccggtcctcaccattgaccaaggctgacctcaagtcacgtgcacataatcagataaaacaatcgtttctgggtacagatatcacaacctgacccacattagtcacacgcactcacaccaacatccacacatcttttcaaaatcaattcattgattaaatcatttgtaaagccaatttattcatcataaaatattaaacatgacaatgatttcacaatctcccccttgatgaacatattggcaacatcaccaaaatgcaattttgtatttttgaaaaataaaaacaaaaatcacaaaagtgaaaagaaaaactctccccctttttaaaagaaagaatttctcccatcaatttataatcaaagcacaaaatcgactatttttacaatcaaaacaattcaattctccccctttcaaaaagcattcattttgcatatttctccccctttgacaatgatttcatcaagaatgcaaaagaaaaaaaataataaacaataaagtacaaatgcaatgatgtcatgattgtcacttgaaataaccaattttttcttttctattttctaatttttttcgagagctttgaagtgcaccaaaagcaatccatgatcgtgtgttgcaagacaaagaagataaattaattagccagttagcaagcatgcatcataatataaacatgaatcaaagatattacaattaagcttaaattagcaataaggattcataatttcaaatgatttataatgcaatatattcacaagcacatagattgaaaaataaacactatacatatatacctattacatttatcactctttctcaaattaactttagtacaaaacaatcaagagaatttttaaacttttttttgagcctttttgctcactttttttctctcaattattccgggtatgtccttgtcgtcaagactgtttccaaggattcggcactcattatttttgctcacatcgaatatgtatttatcgtcatgactatttccaaggattcggtattctttttttttctttcatagatattttttattctcttgcacaatgagcaaataaaagctatttgaggaataacaattcaataaagcatatacataagcatttataaatcaatccatatgctatcatcaatattgcatattttattaattcaagtaaaagaattagtatcatgcatcatctcacttaaaagcaatatctaagccttatataaagactaaaacgcatacaagctaacattgcaacaaatatacctcaattattttgctagcatgcacaagaatatactagaggtataaaacaaagctcttcttttttttatttttatttattttcagaattaaaagcaatgcataaaaataaacatgaatgcacgaaaaagcataaactccacctcaaattaacctctaattctccccgaagaaaaatcaagaagaaatcaaagattttgaaaaagacatccaattgccaatgatatcaccaaggttctcatgaattgacatgtatccacttgtattaacaaaaactactatctcaaacactagcatatgaaaacctaataatcaagaaagtagaacaaaattatgtcaatccaaaattatcttgatattaccttgaaaagcactcaccatctcaacgttgaacgcacatagggagtatgccaccaaaatacctacgaacaagaaaatgtcgaggcctccatgttggggttagaaataaaaaattttggaatccaacactgagtcacacgaccagtagaaccaataggtacatatgcactaacaaaatcagaactaaacttacctgaaaacttaccttgtcgtttcacaaaagtccgatttgaattacgtgcaaaatcgcccggaagccggtttgaccaccgttgtccctgcggtctgaccgggcctggcatctagtctgaccaccggttcaactgcgatctgaccgctggccggtctgaccgactagtcagtgtcggtctaaccgtgctcctcgaaccaaaacccgatttttgccatcgtcgttttgcaaaagcaatttctctttcctttttctgtttacgggcaagtcgaaaacaaaaactaaccaaatgtgcatcttttccacaaaaagaacaaatataattctcacaacaagtttgtaaagtagatggttttgaaagatttgtttttgtttcttttaaagttctagaaagagagggcaaaattccagcagacttaaaaactgttttcttagcacttggttttctcaaaatttcaccatgttcagtcacactcaaaacattgggatgatttttggtgaaatagttatgaacatcaaaaccaacacccctattgtaactagtcaccttagattgatccaaaatcatgttgagctgtttcttaccatcagaaaatctttgcaaagaacttttcaaataagaaacttctttttccaaattagcacaattttcacaatctaccattatacttttgcttttacaacatttggggcaagaaagcacttcatcagatttcacaatattttccatatgctcaaccagtcctaaaacatctttcaatttcatctcattcaaaaaacactttgaacaattttgagaaaccaaaacatctttgttttgtttaatcctttttgcacctaaaacattgaacaaagaacttgcagaaaaagtaactttgtattttgtcaaaatgttctttgtcaaaaccaattcatcaacaacacaagcatgcaaagcaaatccaagaccaaaagaagactccatttttttttagatttttcaatttcatattccaatttcttgcaattaatagaattgacatctcgcaatgcattaatttcagaaaataaaacttcacaagatttgcaatcatcatcattaggaatcgaagattttaatctatcaatgtcagcattcagaatctcaatagtgcaatccctctcatcaagcatattagaacatgttttaagtttctcagcaaatttgaaagcaatatgttctaattgatcataactaagcttttcttcactatcacaattagatccatccacattaatttacattactatcagattcatcccactcaaaagaaaattgtgagctttgcaattattttcaaattcattttttaaaacaacagtattaatttgattaggaattacataaggattagaaacttttctccaaatattaagatcataatgtaagattgcatcttactacaccaataacaaaaatccgttccatcgaaaacatggggcttacttataaacttattagccattgcaaaaactttagatcggtaaaaatctaaagaagaaaacgagctctgataccacttgcaggatcgaatactaactattgttgtattttcttgcctttttttttctgcaaaattgtgtcattctgtctattcatcttgcattttcctgcataagtcgacgtgttctatctattcatcttgcattttcctacataagtcgacgtgttcgtgccgtgggaacatgccatgacatgccagaatacttaagtcgacatgtcttaagtgctctctttaatagtagttttgattttctatacgtaccatgccataatgactgttatgcagaaaacaagaagatgattaggtaggatttcgttttctggccttttccagcattgtgccgttatgttttttttctatctttgttcaggttgaagttttgtttccctctagctgcattttcctaaattctgcattgtcttatgtctatgttgaaaagtacctattactatattttctttaacaaaattatccaagcaagtgctaaataaatatgagaattgctattactacattacattgtattctagcacacctttagggcccctttgaatcgtatgaatgaaaaaatagaggaataggaaaaacgtattctaacaggaatgtaaatgcaaaacagaggattgcaaaacgcaggaaaaacaggaatgaccgtttgattgaaccgcaggaaaaatgcaggaattcgaatgttttcaagaggttgaagctcttgctaattttcctccacaaaatctctataggattgcccattccataggaattttaaaggatatgataggattcaatcctttgtttcaaatggcttcattggaaattttcctgtaggattcaaatcctctaaaattcctatgtttttccttcaaatcaaaggggccctgagtttctttatcataaaaattaacattgtattgttcatcatgcttggattagccgccgaattacatttctaggtgtggctggtggggttgtgttgctaatctatgattaaggtcattttttttatgattattgttagcagtgtcactagatgtttctattatggcagtgtcactagatgtttctattatgtagacacgacgtattgactttttgtctgcctgacattccgctcaaatgatttagacatgtatttagcatcaacctatctaagtatcacttgattgtcagtgatttatcacactgccctagtagtagcaatataagtgggaaattccgctacacgcataaaatccatatttattcccacttgctaatttatagaattgtgataagcggaagaaataagcttgcccacccacttacatcttttaatgtagtatggtatagctatgttataaccacaccggctaaaaaaatgcatatgccgctacctactggatatatttatattggcttataggttgcatgatatttttgggaggttctagacttatattattcttaaatatctttgaagagggttctagagagcatgtctagcacactgaggagtatatcttagttgtgttatggattaatagagtacactaacagatatgggtaaaagtacatataggtctctaatgagttttggattgttgacgacaagaccaattaatggattgataggtttattgaggataagtgaatgtattagtccctattgtgattctgataatgtataacgacatctacaaatgaaagcaacattaaaaattaatatcgtattgttcgtcatgcttggattagccgtcgagttacatttataggtgtggctggtggggttgtgttgctaatatatgattaaggtcgtttttttcaggatcattgttagcagtgtcagatgtttgtattatgtaggcacgacgtattgactttttgtctacctgacattccgctcaaatgatttatgcatgtatttagcgtcaatctatctaaatatcaattgattgtcactgatttatcacactagccctagtagtagcgatataagtgggaaatcccgctacacgtataaaaaccacatttattcccacttgctaatttatagaattgtgataagcgaaaaaaaataagcttgcccaccccacttgcatcttttaatgtagtatgatatagctatgttataaccacaccggctaaaataatgcatatgccgctacctattggatatatttatactggcttataggttgtatgatatttttgggaggttttagacttttattattcttaaatatctttgaagattgttctagagcatgtgtagcacactgagatagttgtgttatggattatgtagtatactaaaagatatgggtgaaagtatatctaagtctctaatgagttttggattgtattagtccctattgtgatattgataatgcatgacgacccctacaaatgaaagcaaggttaaaactctcaaggcatttacattattttttattttgaattcgagtcataggaaatgccacactatggagaggtgttcgagtcaacgctgacttttgtgtctgctcaatgttactttgatctttagagagagacgttgcgcaacacccacatgggaaagatggggttcttatagcttccatattggaacttctgatagttgaaattggaatctccaatcatagctctatgcctattgtggagggacgatggaaagtcccggtggagatcattggaagttctgatcagtgctcctcgccaggacagaggattgatcggaagtttcaatcccctttctcacaatatgcgaagtgtggattaaagttctgatcaatctaatcaaaacctatgatattcaaatatgtgagtaatgactaatttcgcggtaggtcaagtatttaaatgtttccatccactctttggaaggttagctttcaacctttcagacctatcttggatcatgagtatctgttgatgcgaaaacacgatggcctcgaagatttgcttaacttcagtgtaggtccaaagcttcaggttcagggcatgccagttgatttgatcctgcaaccaataagatagactatagcaaacattagaagatgatagccaatcagctgatgttgtatctgtggggacacccgataaagtcatggtgcccccacgaatacgtaaccgcctaggatgttcaattatgcatgaaatgatataaaagcataaacttcgattatacattacttaagtcacttagttcacaacacaacataaatacaaaccattacatatatggcctataaatccttatttctacaaacagataaactactagactccaccacaggaactgcctgatcatagaatgacctagaaaccatagctgtcccatctaacaagtcaacgggatctccacaagcatcttcctcctcatgatctgaacccatttatgaatacaaaaggtactcaacaagacatgcttatgatagcaaatacaataattgcaatataaaacatgccatattaagagcaggaaggtttaaaccctaaccttaacaattatttcatagagcctatcttaattatcatttgatataaacaacactattgaacatttaatcttaaaaataataacgggcataaaaatataaatgttacttataaataacttgaatagaacatcaagtaataaataagttgaccatattaattaatagccatttagtttaacttgtggccacaatctggtatacccatagacacatctccattaactgggagcacgtcgtattcgaatactctacgactctgcagcgtctgcccagctttacccacacgatatccacaggctgaaaagtaacaaggtgtaatattgctccatatatctctcttttctgcttagtaagttaaaggatgctcgggtcgttactcggagtgatccggtccgaggtgtgtaccaacctacctccgcatccacttaccattgttcgttactgggtggacagcccagaacttcatgggcccatagggcagttctaaactctcgggcccatcaagcccacatatataaatcatataaacataaaccatgtcactttgcttcacacttgaaatctaatggccagtacaccgaaaggcctatagaagttcaatcaattggagcaatatacggctaggttcgacaaattgatcgtgtggatgggcgaaactatgtcattcttattgacacaagggggctgattattatatcaattttaaataagaaataaccataaatatatccatatattcaacacgaccataaacaggtccataaaaccaaacacatgaactctatcatgtgtaccacccactcacaagcggtgtcaacagttcttagcatatagctattaacaattccataagcatgttttcatatgcgataataatatccatattaaaccaatagcatgctaaataattaacagtttgttaagtgctcctcaaattttatcctaagcgttttagactctaaggctctttaatgtgtccataatagcaacagaaaatataatgcaataatagcaatataatttagaagcattcgtgcagtctatcatactccaaaggacaagtacggtaccaaaataactcactaactactgggattaaattgttcaagggagggtgcatgtcttgcaaccttcgggctcgatgtagtcgtaggaccaatgttagcgttttctatttatgcaacaatcaccatcacaataaataatagaaaaacaaagttaaacataacaaatggtatcataaagtgcaacgatgggtggaaaggattttaaagatttaattttagggatttttggaatttcggtgaacgacgaaccctaggggtaaaattagggtcgcgtcaacggttgctcagattgcaacgaaactgacacggatggattcgggataattctatgagtttaaaacaggtctcggattttgattttgaggtcaaacggatggtcaacataataggaaaagaaaaagggtattttctgatttatttttcaataggataatctaattttcttttcttctctcgctctgcacaggaactggccggcatctccctggcgccggcggtgaagatggctggttttggacaagggggcgccggttttgcggtctccagggtgcggcgactccgttcccgtggtcggcgatggcgaggctggcgacggcggccaggagctggaggcggcggcggcgactccggcgaactccggggtgggcggcgggcctggtgagcatcaatggagtgagatgagtctcagggtggcgacggccgaagctagggtggcctggagcagcgcgagcaatgcagccggcggcggccgaacagggcggtgactccgggaggcagcgccggcggcactccggcgacgggctgagggggaaaagagaggggaaagggagtactcatcatggagattccatttttaccatcaatttcagagggttggcgatgtatgcgacgaatttcggagattcttttaatggcgccggattagggtttcggggattttttcccccgacgattgagtccgcgggagttggggcggattcgaggaggtgaaagaggttgaaattgcggttcttttgcctccggtcttgtcacacccggaatttctatccaaaattccaaacgcttacatgtgtgtgaaccctcgtccaggaatcagccgaggcacacaataacaaattgataatagagtacaattatcactctaattaataagcgaataaaatgtcattacagaggtagatagttgctctcaatcaataaagatctaagcagcggaaaaaaaagataaactgcgcagacgactccactccacaggcagcttgaccagggctacacctaatcttccacaccatcaacatcactgtagaactcctcctctgatgaatgattgcaaggtgagtatatgacatactcagcaagccacgcagcaaatatgcaagtgcacaggataacaaaggatggcatagtatagtcccatttgcataaacaacatttaataaatattttagaatttaataaaacagttaaatgataattaaacaatattaattcaacgttatacaacataccctgttgcataggcccaaccattctgaacaaccaatcccggctgcacagttctatctccaaaccaggaattaaccattccaaaccaggagctaatcaaattattaccagttatagaatcttttattatgattggaagtgtgagactaatcacgaaagacattgttagacccgtccataaccgcgggcacggctattcgaatagttttacactggccagaaatgtaccactatacccacaagacacagccccacgacatgtcaccatgcgcctcaataccaccacggtacctcggaaaggagctgtgacagtacccctcgcacaacacaatccaccacagcgcactgttcctggatcataatcgcccccttataaaacaaggcatggactccccagcgacccccgtgggcttatctccgccacttctcagtctggtgctccgcaatgaaccatgctatacaaaaggtaaagccgttgcccacgctggcttgtggttggcacggttaatgtttcacaaccgaaactcgtgaaccggtccttaattgtcatgagcatgaccatcaaaaccatgtgctcacaacccaccattatcaggttttagttggcaaattaattaattaaccaatcatgattaaccatcatgagctatcattaagccatcattaaataatagtgagtcaaaagttatcccaatagtgtgctaatgtttctaagcatggctaagcaatcatatctgatatctagctgaaccaatatataaagctcaactagtcaagttataataacccaaggtatcaaggaataaagtaatcaagaacaaaagggctataacaaacaataggttaattccaccccatgacattcgaaaataaatgcaatagttgaatagaaacaatagctttaaatgggatcaacatgctcaaagggttgtttgggatctgtgtgacttgccttgctggccttggaactcttcaaaatcttctcctgcaaactcagactctccaggaacgtcggaatctaaagagaaaagagctaaatcaccaaaacagcacataaacaagcatgaacagtacatgtggatatttttaacatgtagatctcaattttagaaaaatttagagacttgaaccaactaaatccgagctaagatgaattagttatgaattttcaatgattaaatcagattaaatcatttatatggattttaattgaattatgacgcaataatgcattatttttgaaaaggaaaagggtattattgcgtcagcggctagggttcgcggtggatcgggtgcacggcggtggctcacggaaacgaacggccgagatcgatcctatccacaacggacggccaagatctaacggtctacgaccggtctacgacggacggcaccgatgacatcggtgatgacgtcatcaccggcggcggctcgggcgcacaagctcgccggcgaacgacggcgcgacgacacgaacggaggacaccaacacgtagagggcgacgcggcgaactcaccggtgaccaaaacagcggcggaagatcaacggacggcgacggcgtcgaggaagaagcggcggcgaccttcggcttgacgacgacggcagtgctccggcaacctacggcgacgacggaggggtggacgagatcgacgacggcttggtgaccacgacggtgacctcctcgagcagcgacgacgaccagagcgacggcggcgcatggctggagctgcggcggcgacggcggcgacggcggcgcacggctgcacggtgctagggcgctacagacggcggcaggcaatggcgagggtggcgacggataacggagacaccgggggtccttttataggggctaggaggcggcggcgaaggcccacggcgaccggcgacgcgatggaaggtttagggttcggaggagagagatcgatccgaatcgaactcgaatccacggatttccaaaccgaattggcgatcgattccaaaaggaaaaaggtagaggagatcccgggaatcatttcccctctattgatttcaccagagaaggaaaggcgcgtccgaatttggaaggagacggcggcgcggcttggttagggttcggatgcggcagcggcgcgaggtagacgaagactaacaggcgggccccacctgtcagcgggcggacgcgcccgcgcgggcggcgctcggctgcgggccaacctgggccggggaggagagagagagaggtttgggccgactttcggcccaaagccaaaagagagatttttaaaactttttccaatttaaattattcatgaaatgcaattccatttattaaaaatactttcttggctcaaataaatcccagaaaaatctaggaactatagaatcaagtaaagtatttaataaaattttatctggcccaattttatattgggatttattatttaaaaaaaatagatcttctcgtctaggcttttaaaatcatttctaataattccatttaaacaacaatttatatatttaggatttttagggtgtgacaggtcttgagccttttagtggagggacgaaggagatacggaggcgggaaactggaggtgtcacggcggcattcttctgtcgttcgtcctcgtgtgtgcgcgtgcgagtgtgtggcatcatgcgtgggctggcacgagctgggcgcaaggcggcacgggtttggcgcgaggcagcaggagaagagaagaaggaaaagaaaacagagagagaggggaaagaaaaaggaaagaatagaaaagaaaataaaatagatggaaaaagagaattaaggtaaaattagagaaaaagaaaatatggggaaaattaaaataaatagtatttgaattgttgtaggctttaaatggttttctactcgggatagaattgaatttggatcaaaaagaattgttcggaaggtgagatgcacattgcaaccgaattaaacaagaaataaacactagaaacaaacatggaaaataatattttaaataaactactaactcgacggttataattttagagaaccaaagaaaattaaatcggttttaaaaagttgtcaaaatttagggctgttacagtatcgtatcagccgatgcacgaatgaatcgggtataggtgaataggatgctactcatagactagctttagattgaatataactgtaaacagcttttctttaacaggaccaatctcataggtcgaacctaatcgatgtagcataagattgaagtcatttattatacaattatataacctaaatagctagccgatggacatatatttataaactaggcccaacataactacaatcgactgtagagataaatgacttgtaattactaatttaatctttctcttaaatacaagcaactatgatagatcggacataatcgacacaatattaattgctgatagccaagatcagacaaattaataattatatggatttatatcatagccggtgaagtaacttaggtgattgaagataatcaaatttagattaaagaatataaaatttaggttaaatctatttaacaagctgtaatcccaatagatcagacctaactgagaccgcacggaattgatggcaagtttaatagatttaaaggtttgataaacttatataagatgacagatataacacattaagcgaaagacaacttgcaatcttaaagcaaaacaattatacaggtaagatcagctgaaactcgatattacccctaccgacaatcaatgagcatgttaattcttacaacttcaactacaaattagtaggtcaaacttaattgatgcaaaaccaagttataattgaaattataaggtccaaacatgcttttgattgtgttaacgaccaaatttggtaatatcagtatcggagatgaagatgaaatcgaagcagaatcgaagataggggttttttcggaaacagagtaagaatcggctggagtccggatcggctacgactgggatcggctaatctgagttggactggttaagtaatacagccgattccgacaatatgacccgtgtgcgagattgggtttgagttgatgtgcttcaagatgattgccacgcatggatagagtcctgagaaggcaattgtatctattaattaggatattttatgtaaattccttagagatatgttcgggcaaaagtctgccgcaaagacttacaatatcttagagtttgttagagataagagtcgtgttcaatatggacatatcttgtattcctcgggtataaatagaccccgagccctatgtaaaaaaaaacacaacacacatccaatacaattccggcgcatcgccaccttttgctttagttttatttcgacgagttcttgctttcaggttgagctgcaccggtttcgatcttcaacaagaggtaaaactcgtcgtggcgaattatgttcttagggattagtgcttccatcttcatgacattctaatctcgtttatataattcgccgagttatcatatatcttatataatctctagcaatatcgctatctaacccacaatcggctaacatctattaacagacggcagccgattgggttaaatgttgacattgatctagattatataagatatctaccattctatgaatcttctagtagcttgattgtctagatatcattcttcttttcatacttaatgctgcatcaattgagtttgatctattgagtcgtgcttagaatattgatctctagcctgccacctagttgtcgattagaatagcatcggagtttcagccgatcgtatctgatttaactataattatttcagtttgcttcactgatatgttaaatctgccctttatgccaagatattgctgtatttgaatatattaggcgtttgcttgatattctatgcctgttttaatatcctgacataaggtagtatcggggtatttgccgatacatgctagatctatatgatcggctatgctgtaagcttatatagtcttgttattagtatatatttcggtctaagtgattcattctgtctcggcatggcgacgatctatcccagtcacttgatttaagtatatatcgagataaggagtatatatcgctaacatctacagccgatcaagtaggtttagttttcttccttatttattcacgattgtcgatcgatgcacagatgacatcggctcagatataaatgatatgtcatcggtaccaaaccgatcggctatcatttataggtttaactatggttcttttgtctttatttcttgttgattgtaggatgaaatcaactggcacgctcatacatccgaaggcaagttttggacctgcactggagttaagcagatctcccaggcctcgtgttttttgtcaacacgcttttggcacgcccagtgggacctgattagaagtcaggcgttagttcttcctcatggccgagaaacaagcaccactaccatcaagcccaggctctgttaaaggcaaattaccgaagccgggattgactgacatcattgatgacaatgtcctgccgatcgatcccgagaaatttacgcctgacaacaagcaggagtttgaagcaatgatgcagcaagcacgggatcagtatctgagctcgttcatgcaaacccgcaagggaacgctagttcagaagtacaagttaaaactggttgctgatagccctggaaccggttcttccaaagatagagaagtgaaacaagctccagatggctcagctcagccgaacaacaagggtgctaccgggggttctataggaaatcaaggcgataaccctcaagaagtgcacggagctccaggtgatgctgctcaagggccgcaaggaggaaatcttaatcagaatattgagctagcacaagattttttcaacaactttcaagattgggttgattacgcggtgcatcatgctttgatcaatcaatccggggtcttagtcaatacaatgtcgaacatgaataaaacgataccactaattcagccggtggtacagccgatccaacaacaggtcgtgcagccagttcagcaagcaccatcaacgcagtagcatctccaaccaatctagcagacaccgccaaggcaacggcttcagccgatccaacagactccgatacgacagcaggtcgttcagccgattcagcacctggggtcggccaatgcatcggctggatttgcagcacatggggggcaacctgtgcagcagtttgtgaatcaagttatcccagagcatttggttcatcatgcacaatcggatggcaccgtggtacctcagatggttcctgagcacttggtgcgcaacattcagccgaatctgcataactaccaagggggtaacttgagctatcagtatcagcctccatccccgcaagcccaatatcaaccagcgggatcggcccagcaacaattcgctcatcagtttggtcagttcgagcccatgcagcagcaaccacaaggagcagctcagcaacgaccatgggctgatgtcattgctgatgtaatgagggagcaatttgggctgagaccaaaagagactgggagtttgtatcggcagccttatcccgagtggtttgaaagggttcctcttcctaatcggtttaaaatccctgatttctccaagttctcaggacaagagggcgtgtcgacttatgagcacatcagccgataccttgctcagtgtggtgaagcatcggctgtggacgccttgagagttaggatgttccgattatcattatccgggtcagcttttacttggttttcatctttgccatatgggtcggtcaatagttgggccgatttagagaagcaattccacagctatttctacaacggggtccacgagatgaagttgtctgacttaacggcgatcaagcaaaggtatgatgaacccgtacacgagtatatccagaggttcagagaggtgaggaacaagtgctttagcttgagtttgaccgatgcccagttagccgatctagccttccagggtatgattcctccgatcagggagaaattctcgtccgaagacttcaatagtttgtcgcatctgatacaaaaggtaaccttgcatgagcataggtcggctgacgtcaggagaagctccaggaaggttaatcacgtttgcccgtatacgtatggatcggacgatgaagacgatgattctgagatagctgcagtcgaatgggtgaggagcaaaaaggttataccatgtcaatgggtgaaaagtcctgggaaggaggaaaagtatgacttcgatatcaccaaagccgataagattttcgatttgctactccgagagaagcagattcagctccctcctagccatatgatcccatcggctgaagttattaggcaagaggagatattgtaaatggcataattctgggtctcattctactaatgattgcaaggtctttagatagcaaatccaggtagccatcgaaggggggaagattaagtttgacgattccaagaagccgatgaaggtcgatggaaatccttttcccgacaacatggtacatacagctagtcaagcagccggtggagctaagattattaacaagtatcaaaggaagtatgataagcagcaggcgaggcgttatgaagagaacaacaatggtttcgatcctcattgggattgtgagttctttagattcttctgcaacgaaggaatgaggttgccatctattgaaaactgtcctgggtgcagtgacgtcattgagagctcaagccgaccacataatcagggtgatcggccaagacagacaagacttcctgttcatcaaagattgggtccgatgagtcaagatcatggtcaagaagatgaagggactaggaagaatcaatggtgtccctctggtatttacacaaaaaatcagaaaaggagggtccagagattgaggagcagggaacgttttcaagaggttgaagagggaatcaatcatcggctgaggaaaccaagaccaaggcaggtgtggcgtgttaagaatcaagctcctacagccgatgatgctgcagccgatgaagcgaagaggttggcaaaaggaaagagtgttgttacagcaccaatcaacatggtctttacgctaccagccgaatttggaatcaatcaggccgatgttgatgaagtagaggaggaatcggccaagttggtcctgtcaccagagcaagcggtattcgaaaagcccgagggaacggagaatcggcatattaaaccattgtatgtaaacggctacgtcaatggaaagccgatgtctaaaatgatggtcgatggtggggctgcggtgaatttgatgccttatgctacgttcaggaagctgggtaggaatgctgaggatcttatcaagacaaatatggtgctcaaagattttggtggtaatccatcggagaccaaaggtgttttaaatgtggagctgacagtcggcagtaaaactattcctaccacgttttttgtcattgatgggaagggttcatacagtttgttgcttggaagatattggattcatgccaattgttgcatcccttcaactatgcatcagtgcttgattcagtggcaaggtgacaagatagaggttgtgccagccgacaggtcagttaatgttgctaatgccgatttagctctttgggagatggatgaccttgattgtttatctggaaaagtctgggatggagattttctaaaagtatccgattctgatatacagccaatcgaagatggagaacccaagctattactttgagggcgttgtggagggttcagatgtttacgctaaggatacagtagatgatctcgatgacaagcagggtcaaggttttatgtcggatgatgatttggaagaaattgatataggcccaggtgatcagccaaggccgacattcattagcaaaggtttgtcttcggagtttagaaccaagctgatagagctcctaaaagagtttagagattgcttcgcttgggagtattatgaaatgcctggactcagccgatcgatcgtcgaacatcggttacctatcaaaacgggagttagaccacatcagcaacctccgaggagatgcaaagccgatatgcttgaatctgttaaggctgaaattaaacgattgtatgatgctggttttattcgtccctgccgatatgctgaatgggtttctagcatagttccagttattaagaagaatggcaaggttagggtgtgcattgattttcgagatttaaataaagcgacaccgaaggacgaatatccaatgccggtagccgatcagctagtcgatgccgcgtcagggaacaagattttgagttttatggatgggaacgcaggttataactagatatttatggctgaagaggatatctataaaacggcttttaggtgtcctggtgcaatcggtttatttgagtgggttgtcatgacttttggcttaaagagtgctcgggcaacatatcaaagggccatgaactatatatatcacgatttgatcggctcgttggttgaagtttatattgacgatgtggttgttaaatccaaagaacttgatgatcacatagccgatctaagaaaagtttttgagagaaccaggaagtatggcttgaagatgaatccgacaaaatgtgcttttggtgtatcggctggccagttcttgggatttcttgttcatgaaagagggattgaggtaactcagaggagcattaatgcaatccagaaaattaagcccccggaaaataagaccgagctacaagagatgatcggcaagataaattttgttaggaggtttatctctaaattatctggaaggttggaaccttttacacccttatagcggttgaaagccgatcaagaattcacttgggggcagagcaacaaaaagctttggacaatattaaggaatatctcagttctcctcctgttttgattcccacacggaaaggaataccatttaggttgtatttatcggctggtgaaaagtcaatcggctcagttctgattcaagaattggaagggaaggagcgagttgtgttttatcttagtcgacggctcttggatgctgagactcggtattcccctatggagaagttatgcttgtgcctttatttttcgtgtacgaggttgaggcattatctattatctaatgagtgcactgttatatgcaaagccgatgtagtcagatatatgctgtcgactccaatattaaagggatgaattggaaagtggatattttctttgactgagtttgatcttcggtatgaatcaccgaaggcgattaagggacaagctatagccgattttattgtggaacatcatgatgattcaatcggctcggttgagatagcaccgtggactttattctttgacggatcggtacgcactgatggttgtggcatcgacttagttataatttcccctaggggggcatgttttgagtttgcttatactattaaaccatatgcgactaataatcaagctgaatgtgaggcagtgcttaaggggttgcaattactcaaggaagttgaagccgatactattgaaatcatgggggattctttgctagtaatcagccagttggcaggcgaatatgaatgcaagaatgatacattgatcgtttataatgagaagtgcctggaattaatgaaagagtttcggctggtgactttgaagcatgtatctcgagaacaaaatcttgaagctaatgatttggctcaaggggctcggggtataagccgatgatcaaagatgttaaagttgaaattgcggcaatgtcagccgatgactggaggtatgatgtgcatcagtatttgagcaatccgtctcaatcggcttccagaaaattgcgatataaggcgttgaagtatacgttgctgggtgatgagctctattatcggacgattgatggggtattacttaagtgcttgagtgccgatcaggctaaggttgcaatcggtgaagttcatgaggggatttgtggtactcatcaatcggctcacaagatgaagtggttgcttcgacgtacaggatacttttggctgacgatgctggaggattgtttccgatattataagggttgtcaagattgtcagaagtttggagcaattcagcgagcaccggcgtcggctatgaatcctataattaaaccatggccgttcagaggttggggaattgatatgatcggcatgataaacccaccatcaagtaaagggcataaatatatattggtggcgactgattatttcaccaaatgggtagaggcgattcctttgaagaaagttgattcgggggatgctattcagtttgttcaagagcatataatttatcgatttggtcttcctcagactattactatggatcagggttcaatatttgtgtccgatgaatttgttcagtttgccgatagcatgggtatcaagctgttgaattcttcaccttattatgcacaagctaatgggcaagccgaggcgtctaataagagtttgattaagttgatcaagcggaagatttccgattatcctcggcaatggcatactcgattggccgaagcattctggtcttataggatggcttgtcatggatcgatccaagttcctccttacaaacttgtttatggacatgaggctgttttaccatgggaagttagaatcggctctcgacaaacggagttgcaaaatgatttgacagccgacgagtattacaatcttatggccgatgagagggaggatttggttcagtcccgattgcgagcccttgcgaaggttactaaggataaggaacgtgttgctcggcattataataagaaagttgtgcctaaggatttttcggaaggagaacttgtctggaagttgattttgctgattggtactcgtgataataaattcgacaagtggtcgccaaattggggaggaccgttctagattcaaaaggttgtttctaagggagcatatatgctgcaagggcttgatggtgaagtttatggccgagctcttaattgtaaatacttgaagaaatattactcgagtgtatggattaactcgtgatcggctactaatgtcgatacatgatagccgatgtgtgtacatcgccttgtgatggccgatattattatatcgcccttagttgttttataatgtaatcggctgaggtttgccaattgacaatggccgatattgttatatcgcccttagttgttttatagttttatcaatgctgttgacattgtaaaactagggggcatagatctgttacaatgcagtaaatatagtgcaaaattttttgagcaaatctcacagtcatactaatcggcacagaaggatgttaagggatgaagaatgtttagccgattgcagaagctctaagtcctattacagtaagattactgcgataagtattgctggatagccgatatagctttctgcctaatctgctctacttcctctatggcttgagcatcttgcgcatcggttgcaggaataacttttaaggacttggtcagttcagcaacatgcttaatagcctatttgagcctagctttctgctcttcaatggactgggggagatcggctagcttcttgcgttccatatccagctcagcgttgcattcttcaagttgtgctaagagatcaatcttgcgagcttcaagccgatcaatgttagatttgattggaccttcagataattgatcgagcttggatttttcttcatgcacaagttgacggttggcttggatagtgccctcgatgtccttacgttctcgctgttcggccagtcttaatttggctttctccaacttgaattggtgctgctcaaggtaaacagctggagtaaggacatcggctaattcatctgggattaaggcttggatttcatgcagccgagccctgattggaccatagtcgactaccaagctatctagcgatgatgcttctagccgatccaagatacttcttagagttttcttgacatcatcagataaaggagccaatgctttgcttgtgacatcttcttctccttcgtcaagatagtctttgatgtcaaaagagaaaagatcggctaggacctgtggtgacaatttagaagcagttagaggttaaacaattatagccgatttggatgcttattaggagaaacttactgggatagcaagagcggctagttgttcttcttcttcaacatgacgacatcctacagctgatggggtccgatcgcttgatgcttgttgaataggaggggaaggaggctaaaaatagataggtgttatataaaatcggtcgagattaactaatgaaagaaataagattattgtaccggtggggctggctcagatgtcattggagccgatttcttcttcacagcagccttccttttctgcagttaccgagtatgtgagcaatcggccataaagtgatatgattacaaaagtgattagagaaggttgcttactattgtaaaatgagttggagcagaaggagttggaggggcctgcttaggtgaagccgatggtgttctttcaatatcgcttacctcggctgcggcttgatcaacatcttctccgatttcttcttcatccagagcttgttcaatggatggatctagggcaggcagatcatcagctggtttagctttctttttgatcttcttctttggagccggggctaaagcatctacagccgatgatctggttttccttttcttaccggcatcggctggttctctgataagcccttgaagaagagctgaagtcttgggggcatcatagccgatgacaggaggagatggcccacctccattaggaattaagcctggggcgtaggtgatatccctgccacgttgctttgatgaggaggggaggattctgttgcctacaaattaaagaaacaattagttaagataaatcggctaagcggtcattcaaatgaaatcaagtaaagttaaagacttacttgagggacaacatctggaaagaggtctatcatgtacattgaagctggttggtggaatagatgcaacttccattcaccccaccatctatcaaagtttttgctcctgaacattgctagttctatgttttcaatgctgcctagagggggtcctggaaggttgagcagccgatccatcatcaaggttgatgaaatttctcctcggcattggatcttgtcagcaaagaataagccgattgggagttggcccattccaagctatctagctgaactcatcaggtgatagaattcgtaaggggcttggatgtttcttccttgatggacgccgactggaagaatgcatgggctgattgcagctgtgaagacttctctggatgtttggaatctttcatgattaatgtcttctaatctgaaatctgatggaagctcgaggtctgctgaatcttcatagggaaaccaaactcgagcatctttttgaaagccttcatagaagctgcaaaaccaatctttgagcagttcggctgataactttgctccagcatcggccggtgtggatgcgtattctccatataacgtacatcggcgatgagtgcgttctttgttgtcctctatgatcggctctaatcttggaaattcagcttctgtgacggatagccgattgacgactttcatgactattagattcaaccaagtctgcagcagccaccatggtccacctgctatgactattgagccgacagctaacttagccgaagcattgttcagcatttggtacaagtagccgaggaggattttgcctaaaggaaattgtttctttgcttccaaagcttcggctacaaactgccagttggttgtaggaccacagcttaatctacaaaagagaaatttctctagccacatgagcaaaaaggccacatgttctcgaggggtgacagaaccctgacccatgtatgctgttacatagcctgaccaacctcctatactcttggtcttaaagtcatattggttttttgtgttcagactcatggggttagccgatgaagtgacatccagacccgtgatcataatgatgtctatgagagttggggtcatcggttcttggttgaataagaaggcgttgatggtgttggaccagaaataggaggcggctgccattagaggttcatccttggctgagtttgctatggttaggttaagtgcttggccgattccaatttcgtcccaatgaactcttttgctagccgatatgcgcttgaaccatgtaatccaacttttctcgggtgaagttttttctagagatggccaagatttaaaggtattcttccaatgacctagatctggattggatagtctgaaaggaatcctattggtctcaccgatgatgaactcagtggggtcgaggttgccgactaggccgagaaagtagtggttttcatgcgacaaggtgggaattgcgaccaaattggagagatgctacaagttcaaagtaaccgagaaaagaaagcagtaagaggcgagagaaaactgatccaatgatgaaaaaggggatctagctgatggtaacttacctcagcgtattcggctgatggtgcggcggatggactggcggagatcgacatcgtcgtaggcggagatctggccggagatgaagtcgcctagggattgccttgcgcgtcggagggatcgccggagagagagagggtaaaagttttgcttaagcggggaaaacggaagtcacggtgtgagatctcggggataacggttagtatttgaagcactagagtaacaatcgggaaaatgttagagtgcgaaacttgttcggagtcgatacacggcaaatccggaacattaccaaatatcccggacttggggggcatgtgttaacgaccaaatttggtaatatcagtatcggagatgaagatgaaatcgaaggagaatcgaagataggggtttttccgaaaacagagtaagaatcggctggagtccggatcggctatgactgggatcggctaatctgagttggactggttaagtgatacagccgattccgacaatatgacccatgtgcgacattgggtttgagttgatgtgcttcaagatgattgccacgcatagatagagtcctgagaaggcaattgtatctattaattaggatattttatgtaaattccttagagatatgttcgggcaaaagtctgccgcaaagacttacaatatcttagagtttgttagagataagagtcgtgttcaatatggacatatcttgtattcctcggatataaatagaccccgagccctatgtaaaaaaaaacacaacacacatccaatacaattccggcgcatcgccaccttttgctttagttttatttcgacgagttcttgctttcaggttgagctgcaccggtttcgatcttcaacaagaggtaaaactcgtcgtgacgaattatgttcttagggattagtgcttccatcttcatgacactctaatctcgtttatataattcgccgagttatcatatatcttatataatctatagcaatatcgctatctaacccacaatcggctaacatatattaacagacggcaaccgattgggttaaatgttgacattgatctagattatataagatatctaccattctatgaatcttctagtggcttgattgtctagatatcattcttcttttcatacttaatgctgcatcaattgagtttgatctattgagtcgtgcttagaatattgatctccagcctgccacctagttgtcgattagaatagcatcggagtttcagccgatcgtatctgatttaactataattatttcaatttgcttcactgatatgttaaatttgccctttatgccaagatattgctgtatttgaatatattaggcatttgcttgatattctatgcctgttttaatatcctgacataaggtagtatcgaggtatttgctgatacatgctagatctatatgatcggctatgctgtaagcttatatagtcttgttattaatatatatttcggtctaagtgattcatactgtctcggcatggcgaccgatctatcccagtcacttgatttaagtatatatcgatataaggagtatatatcgctaacatctacagctgatcaagtaggtttagttttcttccttatttattcacgattgtcgatcaatgcacagatgacattggctcagatataaatgatatgtcatcggtacctaaccgatcagctatcatttataggtttaactacggttcttttgtctttatttcttgttgattgcaggatcaaatcaactggcacgctcatacatccgaaggcaagttttggacctgcactggagttaagcaaatctcccaggcctcgtgttttctgtcaacagattgttttttaggtgatagatacactaaacaatctaacaaagagcaatctaaacgatatcggcttattcaacgcgaatcaaccgataaggataaataacactatttaacttagattaaatagcgtatatgataaattagcacttgtatcgactggtttagagtgtcgaacttaaccgatggaaaccctagccctgccgatacaagcaactacagacggaactcatctcttgtcagagatcgaacttaattgatgcagcccaactcaaagacaagaactcatcgagaaaaatccttaccaacacaactcaaacttcccttaaggataaagcaaaaattacaagcacagtcgaactatacaaaaaaagaaaaataactgactccacctaattaatagataaatcaccttgccatattctcctcgaactcagcctctccttgacacaatatgacaaactttccccaaccaagtctgactagaaatcgacttctgaccattgtccatcttccgtcagctacctccgtaatctagcttgcaactgatgtactccagccgatactgctttaccaatcttaattagccgatgcaacgttctaacttataatacgaaacggaggtagtactaattattttaaacctgaatattagattaatatgatttttctaaaagtaacttttctatagatttttttttgcaaacaatacatttttaggagtttgaaattcgtgcgcacgaaaaacaacataaatcttctctcaatctctagcgaatgaaaacgcccttagagttcatacataccaccagccaaacaaagttttctatacatccatcatcttctatacaaacaactacatgtatatatcctttgttggatcaaactcgacctggattagagaaatgaactacgagcaagcaagagcaaacacaccctacactcctaaacacatcgccggccacgatatagccagcccatggagtcgcattgccatcgatcccttcgatatgcgtgtgtacaaccccacgaattaagtacacctggccggctgcgtttgggctagctcagctcagctgctctcgatcgatcaggtggtgtttggatccagggacttaactttagtctctgtatttagacactaatttagagtattaaatatagactacttataaaactaattagataaatgaaagctaatttgtgagacaaattttttaagcctaattaatctataattagataatgtttactgtagcatcacttaggctaattatggattaattaggctcaatagattcgtaacgcgaattagtccaagattatagataggttttattaatagtctatatttaatatttattattaatatctaaacatatccgatgtgatagggatttaaaagttttaatcccatctaaacaagtccactcggccacaaaagacaggtagctatagtgtccgagtgagtgagagagagagagaaggcacctgcacgcacgagcgggtagcagcagggaggcagcgactggcactgcgactgcaccggccgtaccgcgcgcgcactcattgcgacgactcctccactgtcgctatatgtgttacatccgttatatttggtgttagatacatgtttgtgtttgtaaaacggggggagtacgtaggagtagtatgaatgatcaacaggttaaagatgaaatgaggaggcagaaaaaaaaaacaaaaaaatgataacgattcaaagttaattgctcctacttctttttgtgggcaggaaaatcattcccctttggcattaaaaataaggacaatttgaaccatgccacataaattttacaaaatttgtgatatgccacctgatccacgtatcattgacttatgtgggtcctacatatcattgagatacgggtggcatatcttaaattttacaaatatagggtggcatgattccaacaaacccttaaaaatactgtgcccacaacgctttgttcactttagagcttgatcacgtaaaacacattgtaaattatttttccaaatccggtctccgtattcacgaaacggacgtacacggtcaaaacatattgtaaatacacggcaacaccaccaaaataatgatgttgtagcatgcatgcatgcgcgtcatgttggctcgagccaaggcattcgatcgtatatggctactgcatgggattcactacatactctagaacacatgcataccccactaaatagggctaaatcgaaagtgattaattgcttgaagattcctacacccaggccgtgtttagttccaaaataattcttcaaacttccaacttttttatcacatcaaaactttcctacaaacacaaacttataacttctccgtcacatcgttccaatttcaactaaacttctaatttttgtgtgaactaaacacagccccaattccttctcctcatggcagtagcgacagagctatgaggatgttttcttttttttttggggggggggggggggagggggggtcatcaccaacgcggttagctccttccctcatctattttcctccaaaaatttctccaaatttactttgtgtatgtactcatgcttatacccctggctacccacatgaacatgcacataagagcatctccaacagcctctctattgagttgcatgcaccgaccagttcaacccaaaagcttaactaaggtgggcaatccactttatattccaacactatctactcaactctccaagctaaaaatttggcaaatgaaccaaatacactcctccaacagactctccattcaactctccaagccaactgcctctccatccaagcccacccactggccaatattggccagcctcctagtctagctatctctccagctctcctctactcgtgcttctctcctctccctctagctccactgccacgccacatttttgtcgtcagggtcaccgcggcgccgcctctccgtcaacggcatcgttgtgccgtctctccatgttgccatcgtcgcctatgggaggagcgtcatcgtcgtctccttacaccgggaggagcgccgccgtcttccccctccttcctccgcggccgtcatcccccgagccaaggagcgctgatgctatccacatctcgatctgccaccagcctcgcctcatcactccgtccaccaccggcctcgacgagggagaggattggagagaggggaaggaagaagaaagctcgagaaggggaaagaaaacacgcctgtctcgcgtggtcgtcgtcgcgagccgctgccgccaccatcgctagccgccgccgccccgtcgtcgctgcgcacggcaaccgtcgctgcgcccgaagactgctaccccgccgtcgccgcgtgcggccacactgccgcaagcaaaaaggggattggggaagagagggagcaggataatgagaaagaaagtggtatagaggctgacatatgggtcccgctgtcatagactcagaatagagaggatgaatggagaggctgttagagaaaacaatgaatttgacttgctaaattaaatggagagttagctaaatatatatttgaagagactgttggagggcaacatatcctatgcacacaggccctcacgtgtacacacgtgcacaccaactaaaaaatgtcaccaaaaaatctagaaaaaatcatacacatacttttaattgtattacacctagagttaaaatcttaacgtcaaattcattatattttagccgtaacaaaaaaaacaaaaaatctgacaattttaaggttgcaattttgtcagaattttatcttttttgttattctctatgtagaatgaatttgaagatgcgactttgcacgtagatgtaatactattgaaagtacatgtatgaattttcctagaattttttatgataatttttagttggtgtacacgatgtgtacacgcgagggcctgtgtgtataagatacgctcccctgttggagatgctctaattaagatgctagacccatccatgtcgtccttttcccatagatgctttcactagctacttaattatctaacagcaatgcatcatgtacgatgtttgatggtagcatatatatatatatatatatatatatatatatatatatatatatatatatatatatatatatatatatatatatatacacacacacacacacacacgtagcattgctagctctacctagctactccctccgtcccataatataagggattttgactttttacttgtactgtttgaccatttgttttattaaaatttgtttgaaatttttatttattttatttgtgacttactttattattcaaagtattttaagcacttcgtttttaatatttacacaattttttttaataaaacgagtgatcaaacagtgcaaacaaaaagtcaaaatctcttatattatgggacggagggagtaccaatcttctaggtagctagtttggtacttcctccgtttcaggttataaagacgttttgactttggtcaaagtcaagccacttcaagtatgactaagtttataaataaatataataatacttataataccaaattaatttaattaaataaataattgaatatattttcataataagtttattttgggttaaaagcattattattttttctacaaacttagttataaagcaatttgactttgaccaaaatcaaaacgttatataacctgaaacggaggcagtagtacgaacatatctgcacaaaatgccgactagatgcatgacatgtactacatatatttcctgtcgtgttggttactgtactgtctgtacattgcaatataagacgaatttatttgtacttcattttttgcaatttgcagcaataggatatttatgcagctcgatcgatcacgtaatccatgtagcactgaatgattttcagaaacgtgtcctgcatataatgttcgcgtacaggtcatgcatggcccacgtacagattcacaccacatgaacaaaatcttgctctagttattacacggtcaaaggcgcccttcgcccccaattgcttcatgcatgctgcggccacagtaaaaactactgtttaattaattaaataaatagtatataatccaaaaattaaattgatccaatacctgctacattatatagtacaggttaatatgatgctagctgttcattgatctggcctgtcaaaaatgaggtgctcatcttacatggacccttgagctaacaccctaaatataaagctgcatctatctatctgcagctatagaatggcaatgtgcaaataaaggatagcttaattagagcaagaataatagcaagctataagaagactaaacgagtaaatgatgaggtggataagatatgagaggagagagatgagaagtaggttgtaagcttacagccggcttagacacaggaactaagaaaatatataagacagacaggtggaccatatatttatagtgaagaactaaccactatatgagtgagctgagagatatactataaagatctatacaatcagcagttgggtgtattattagcctgactctgaattggctttctgacatgaacagtgaagctacacaaaagctatggccagtataattcctaacactagctagggcaatgtgttggccaaccaccatgaccatgttccatatagtatatgcatgggccctacccctgaaattcactgtagacacaagttaacaaaactcaggaggactacacccatgtggtagggtcctccagtaaagaaaggtgtagtgtagctgattttgatgaccaagaatttttcatttgtaagattcctttcttcctagctatagctcctctttgtgcatgatcatcttctctcaccttagaccatgggcacaatcagtgagatgtatggcccccatgtgtctggaggaagagaggcaggagaaatgccattctagaggaggggaggagcaggtgtgaggagaagaaatgataatcttttcaattgagttagtagtagagatgactagacgtgtacttgtacaagtgtatgtacagcaaagaacactgcatgcatgcatgcatgcatgatgtagaagaaatgataggattgcatgcatgcattcattcataagtgtattaaaaattaaatctcatatggtccatgcagtatagtttaagggatcatatagcaccgtcagtatgtccttccaataaggataagaacgcatggtctaattccttggataatattacactcagatttacacacctcttgcaattaatgcatgagttcagagtttggtgttggcaaaatcaattcccccttgcacaattggtttatgcgccagatacatttttggattttaatcgaacaagctagtggtaattaccatgtggattttgtgatgcgattattattaagacgttgtaaaaatataaatcattagttggtttagtttgttattaattacatgaccaaaaattaaaagaggatttagccatgcgatacggtgtgctaaattattcaaggatctaattaagatggcgtactaattatgaaaaagccgcgcaaaatgctcaaattaaggcgagatatcaaattatcgattaagaagaattatagaaacaaaatattaacaaaaaagcacgggaatcttgtatgatgcaaacactatacatgtagtagctaccagggtttttaattttgaaattggattatttgctagggggccaaaatttcggtaatttcggaaatttttggcagaaattatttgaaattttgactgattttgaatgaatttgaataaaatttgactaaattcaaaaaatataaaaaaaggaaaaatttcgggcgagatgtgagcatgccagtgggggcgaaattaccgaaatttcaaaccctggtagctatatctctgtcccaaaatataaaatatttgagggagtagggagtaaaaaccataatatattctacgacacaacatgcatagatggatccaaatgcgtatgcttttcatggaattgtctctgcacgcgtcatcatttgatcgaggtagcaaaacgacgacgatgggggagagagatgttgttttccatgcatgttcccggggagagagagatgttgttttccagctgaaacaatgtacgcttgcatgtacagtactaactaattaagaagatgagaataaattaacctctacagctctactagctaattgacaccacttggatgaaatttgtgcgttctcaacttaaaaatcaatctgcatttgaactcaatttctttgtgttcttttctaagaaatgcacactatccatacttgtaaacagtatgatttttacaaaaactttgtatatatcaatttcttagaaaactgcattaaatcaaaatttcaactttataatagtaaactcattcgtctatatcctcaaatagttatcacaaaatcattcgatcattcagccattcaactattaaggggagaaaaaacatgctattaccttcgattttgctccaagattcgtgtcatgcatgttaggctgtgttagctagaagaagttcccatcaggaacagtgatcatggaaaacggagcagtccattagcgtgtgattaattaagtatttgctaatttttttaaaaaatatggattaatttgatttttttaaaacaactttcgtatagaaacttttttgaaaaaagcacaccgtttagcagtttgaaaagcgtgcgcgcggaaaacgagagagaagttggaaaagggggcgtccgtacacagccttagatttcttctccagtgagttcgccgtcgttccttccctaccgtcacccatgttgttaaagttgtattggcttaccaggtaagaaactactccagcattgattgtttattacctgctttattcccacattgtggttgctcttagtgggctacttcttacgtacttgcgtccaaaataaattaatcctgggtttgaactggatacacgtatgaagctatgctcaaaagcgacctctcagctactcgacatttgcatgaaccataaaaccctagcaagctagatacctagctagctactcaagctcaatccatcgactggtcgtttccattattgaactactccaagtgatgatactactgcaagtagggtttgttgaagagttaacatgcatgcaaatccgggcaaaaagcaattaattaaatcagccggcgacggcaatagtactgagagatcgatgtgatcgatcgttaatataactagctgaaatcccgcgcattgctacgaaaatttagtatgataacaataaaaaaaatacgtgtaagatgataacatcagattaaataagttaatgtggttcatgataatttaaatttaaatagcatgtagaatgatgatttaaatataaaaaagtaaagtggtatgactttattaaagaagaaaagtagggagatagtttgaaccgtatattaatcatctaaagacaaaaacaattaaggtggtatggcttaattagagaaaaaagagaaagttaatttgaaccataaattaatcatttaagcactaagtaagtgatgatgaactatataagtatataggatatcataaaacataataaagatatacattgaaatattatgtaaattatgtgggatgataatttaacatgcttgcatttaaaaagctcttaaattacaaaaactataaaattatagataatatagcatgtttgcatgatgtttaaatgtgatgattgttagtggatgatgatgtggcatttttgcatgttaagtttaaggagttagtggtttataactttataataagataggatacaatgtttgatatctgcgatcgattgataggtaggatcagtctcgatagcaagttaatttttggttgatgaaacgtacatcgatttggtcgatcatgttggaaccaagtatataggagtacatatatagcttccaaactctaggttttagggcagggataggtagcactcactggtcgtttcaaagtaagtttggtgaagagtctcacctagaacaattttacctatttatgtttacattaaaaagtattttgtcaactaattggtttgttgccacatgttgccaaacactgtcaggcccttttttttttcttttcgaaaaaggttaccttactatcgtaagcttttttaaagccgttagatcaaatccaacatcacgcaccagccattcactgagcctattttgtaatagtgtaattcatgtagctttatagaaactcccctatattatatttctataaacccatataacccattgggtcaattgacaatgctttaagtttcgcaaagactacagtgtgctatatatatatatatatatatatatatatatatatatatatatatatatatatatatatatatatatatcaatgtatttttaccgtaaactaaattcgatctgctgctaatatgtaagttgtgaaacatataaagctcaacactagagaaaatcttcgtagttgaatatatatgatttgtaatatagacaaacacggaaaattctcgaccatataacaatggccaaccatgcagaccctgctactatgggatgtatgagaagaacaaccatcactagtacttactccactctgttcatcctataaggtgtattttgaaattcttttaacggggacatatcttcattaatgttttcctcgtccctttgccctcttggtcaatatatacagccatgaacacagtcatgcaggcaaccaataaaaccacaaggccacattactccctccgtctcaaaatgtttgacaccgttgacttttttagtacgtatttgaccattcgtcttattaaaaaaattaattaattatttattcttttcatatatgttttatctacacattataactactcctacattgaaaagaaaaaaagacagaaacaaaattacaacaggtgcttgctatacattgggtatagtcaattgggacaccatcacaccattgcttccacctatttgtagctacctcattcactcactcactcactcccacacactgcagccagctgcagctgcagcatagcagccagactcactctcacacagtcacactactactagactactactactcccagcaatcacatcctctctctctatctctctctttcaaaagcgtgtgtgcctgtgagcctgtgactgacgacggactgtctgctggcacgcacgagcgggcgcctgtgcgtgtgtgctccgacctgcaaatcagagaccagatcgagccccctggccggctgcagctgcctccttgcttcctctagctcctggagtgaggagagctcgccattgctgtctgctcaagctctctagcgtagctagacttctccggcgtgtgcttggctgctgctagctgctagctggccagtcttcctctcttgtccgccggcgagatggtggtggtgggcgccgtgagctgctgccggagagggagttggcggcgacgcgccgccgccctcgccctcgccgtcgtcgtcgtcttcgccgcggcagctggtgagtgcagagatggcagaggcgagctagctctcttgccagctcttcttttcatgcgtgcactttttaatctgagcgtctagtcttttgatcttctgcatataatcagtgattacttgctctagctctctctttttccttcacctttttggtgcttttctttttgtctgaagaccaaattaaccggatctttgattaggttcatcagaagcttgttaactgcatgcaggttgattaattaatctagctacaatgttttactactttacatataacattagagtggtagctatctctggccaggtcttctctctcaaggaaactaccttaaacaatcttaaaaactgaaccttaattaaattaagtgttcttctctagtggttagttttttttcttagaaattcttgtggttgattagcatgccgtctctactctcttcatgtaccgaatacaaatatcgagaggcttatctctcaaatggtaacatttttatttgcttcccttctctcttgatgaaaagttttggtgtagttcttgcatgcttgcaaattaaggtccatatatacattctacacccttctctctgctaattacttttcgtcccatcacctagcaaatacactaatataaggcacctcctcagagactaaagtgtaattagcccaaaagctaattaaattgcaatataattaacaatttcaatttccttgttgcatgccattgatctttagtttcctcacacttgcaacatcctagctagctagtgaaagaaagccaccaaggtcaggatctcttaactttctcattaagctgtacactcaatcatatctccacacattttcaagatgcaaacctatattaatttgcttcttaacacacacacacactctctctctctctctctctctctctctctctctctctctctctctctctctctctctctctctctctctctcatagtctcatattctcatttggtcttcaccaactagagcctttttctcccagcagtgtagtgtgctggtgcccacacgatggcactgcacgctctggtccagaaaataatatataacacgatcgacctactaatataatacacgacatcagctttagtacagggagagaagaagaaagattctgcaagagaacagcccatgcaaggccaatacacgtacaatccacagcccaattaatcagctagctagccacaaatacatttttggtctcacctgcttaacgtttaggacgccgaccatatgctccaatctccttgagatcctagctagctaactacccattctaattagcaatggtcaccacgaatgattaatgtagagtatgtaattaggagatttttcaagggttctttttgctgtattgagaggcagatgtctcttgttgtattaattctgaagtatttattatttattaaatctggaaataacatatatatatacatcgatacatttatacatcctataaaaatactaaaacacaaagtctagagctttgctagttgagataagtgatatgaccggatatcattcatgccgtaaaaagagtcgtatttttaggcgtggagctaataattcgaggtaataatctggtggtgaagtagttgaaaagaacgtacttgcattatattagtaggtcgtgtattatattagtaggtactatttaaaaaatataactattttatatatggttatattttttatagattaaatagtacaaactgatcgagcaaaaaaaaattcataggttggttttctacgtacggattcatcgatgatccactgttcattgtaaaaaagaacattaaaaaaatatatcaatatagttatatatgctttcagtaaagtttatactaacaattaaccatatatacatgtatgcatgctacagttgccgctgctgcaaggaggccaatccgtgtactacggagaccagcagcagcagcggcgcacgtgaggagactagactcgtcgtcgtcgctgatgctagcgaggaggaccaacgcggcggccggcggcggcgacaacggcgacgtccggcggcggcggctgatcgggcccgggtcgtcgccgccgacgtgccgggcgcggtgcgggcggtgcgcgccgtgccggccggtgcacgtggcgatccagccgggcgtcggcgcccagtgggagtactacccggaggtgtggcgctgcaagtgcggcgataagctcttcatgccgtgaccgccgccgtctcgccgccggcgaaccacgtagcgcggcggcggcggcggcgccagccatggctgcgtggatcgatcgatcagtagcatagttttgaaaggggtgtagtagtgtgtaaaagagggggaggagaaagtaatttaagttaaaaggttattttgtggtgattataaactagttaattaatcaactaggtcgatcttaatcttaagatggtgtactgatcgagttgatgatgccggtaatgtctgtaaatgtgaaatttaagatctggattttaccgtgtatgttcttctttttgatttatctgatttccctttttcgactagttcttttgcttaggtaatttttcactttgcattcttcaggttgtaggggttatactgtgtcattgtaattgcaaattaagatggacaattatctgtcttgtgctcttacatcacgcgattttctcatgatattggactaggcaagagtttcctagccgtctaaaagtgggtgagaattgaagagagaataattaactaggggttcagcacgaatcttaaagcatataaggccatgtttagttctaaagtttttttttccaaactttcaactttccatcacattaaaccttttttacacacacacaacttttctatcacatcgtaccaatttcaaccaaacttccaaacttcaatgtgaactaaacacagcataagccgtcctaaattgacagttgtacttaaaaaaacagaatagttcgacgaataacaagtattacaaaatatatatacactgagattttactaataaataaaccaacctagctaaatttacagtatactccctccatttcatcatattataaatcactttgatttttttctagtaaaaaagattttagctaaaacaccaaattagttttagtagattattataggatgtctagattcgtaatgttaggatgtgtcacatcctatcgtgggtttgtttttttatggaacggagagagtattacattaacatgttgcaggagctcatcatagagctaaaataccaaattagttttattaaatctagcattcaatatattttaatattatgtttgttttgtttcgaaaaaactactatatttcttataactttgtcgaactcaaaaaggtttaattaaaaaaataataaaaaagacttataattaatataaaaaaggaggaagtagaatattatactatctacttcctccgtcccataatataagggattttaagtttttgtttgtactgtttgaccactcgtcttatttaaaaaatttgtgcaaatataaaaaatgagaagttgtgcttaaagtacttttaaataataaagtaagtaaaaaataaataataattctaaaatattttggataagacgagtggtcaaacagtgtaagtaaagataggaccgagggagtagttacaagtctatttggactgacaacgtgaaagcaattctcagctgttagaagtctggtgaggtcactcactctgatagatcacatcatcacatggatgcacggagtactaaaatgtcaggacgatgttatcctgaaacttcaggctacataaccccatgatactaggagtacagtgcctactacccgtacttcagcatcgatcatgcatagaactctctcatattcagattcattatattagaatgtgtcacatctaataaaaaaatttatatttagttgtggagaaagtatatgcatggactttctttttttcattttctatgcatagatcgatgcatggtcatatgaagttcagcttgcattagcggcgaatccaacagagtttcaggctatgtttagttggatctaaagtttggattttggttgaaattggagataatgtgattaaaaagttgtgtgtgtatgacaagttaatgtgatggaaaaggactgaagtttggatttaaactttgcatctaaacacagcctcagtctttcagagtctgagcaaatcttgttatgctccctccgtcccataatataagggattttgacttttttaacactgttttgcccactcatcttatttaaaaaatttgtacaaatataaaaaacgaaaagttgtgcaaagtactttggataataaagtaagtcacaaataaaataaataataattccaaatttttttaaataagacgaatggtcaaacattgtaagtaaaaagtcaaaatcccttatattataggacggagggagtatttgcaatgaaaattgtctccaaatcttccgaaaacattcaaattctattgtatactctttccatccctaaatataagggattttggttggatgtaatgtatcttagtactaggatacgttatatctaactaaaattctttatatttagggacggatggagtatctttctaacgagctcagacgacaatagggtcgctgggcggtggatccgccaatccaatgcatagtttggtcaaatacagtaccatgtacattctactttattgtacttgtctagttcttggtccaaatatatgaccagtatttcttatattttggtacgaatattctatattatatatgatagagagggcaataatatcaatggtttggttacaattgttaccccgcgctgtttgactggtaaatggagaaacaaccaagcaaggaaaatacaaaagcttgtctgtttgctcatgattaaaaattttggcttggaatgaactccatagtcttctccaggatttgacgtctatgcatggccaggaccgggacccgggttcaaagctggcccctgtaaccctgcaagagtactcctccccagtccaagccacatctctacactttattcctctcttccttttcttacttttctatcttctttcactactctcactcaccgaccaaatataatgttcaacacctgcttccttgcatccttgttattcaccggattaattttataaaatcacacagtaatgactctgattgattgagctaccgctaacgagacatgaaaaataagcaaagttatacaaaataattaacatgtactctctccgtacactattttttaatgtttcataatataaggtatgcatgaatgtatattattaactagaacttttttcccactaaatttattttttaaatcctccatacttaagatcgttaattctattgtgtatgcattatatttatttgggtgatcaaaattatgaggtgataataattatttgttgatatttgggttaagggtggttgagcgttatattttggaatggagggagtaaaacctttatactactactactagatatttaaaagacaaagctaaaaaatagactccaacaaacaaaccatcgctcccctcccatcgaaaaataagttttatgacttagatttctgcggccaatccatatcctatgaaattctgatgtctcaggcccgttcgatttcttacttgagagaggttttcaacgcacgtaaaacgagaaagcttattagcaaataatttaattacgtattaattattataaaatcaaaaaaaatgaatttatttgaattttttaaatggcttctacatagaaaccatttataaaaggatgaagaattacgtattaaaaaataatttaattacgtattaattattataaaatcaaaaaaatgaatttatttgaattttctgttaacagtttgaaaagcgtgctaacagaaaatgatgaagttaaaattgaagttatagagcacacaaactgcaagagtaaccacaatatggctaacaccttttggctataaaactaaggactttttttggatagcaggagattacataacaaattcaaaaacataattaaaatctaattaaaaaaaactatgtttcagaggactcttatgatgggtcgtatccaaattacacatttcaagacaaacatgatgaaagcagctgactatattacttagagccccactccggtgctttctactcgtagtagaaaataatctgaaccgttgatcttatttgatcggagggttcaaatctatttctactccaactacatttaacggtagtagaatcgtagaggggtatatttgtccaggaaaaaatatttacggatgggtattttcgtcctttttattctttaaccttagctgcactttctcctgtctcgttccagagccaacgccatccctaacctaagccgaggcgaagagaacctcgcagctccttcctccgccgtcatcgccgcctcggacgacctcgcctgctccgccgcatggtatatgttcagattgggaattcactggaattaataacattaattccatagcggtaaagaactcgatacgattaaaaatataaaccgcaccaattgtaaacgggatagtacgggaaagaaacagcaagtgcaaacggagaaaacaaatcacgttaaaacaggataaattgacgggataatagatggaaacggacggatcgataatgggtggaaacggggtaataggggaaagaaactgcagtggaaacggagaaaatggatctcgtacgaacgaaaaaagaaaatggatctcgtacgtacggaaaaaaaagagaaaatagagaaaacaacatagatgaaaaacggaaagtcccggttgacatacggatagattctgacaggaataatatggttggtccaaaaaacaaaaaccatgtactccttccgtttcaggttataagttgtggttgaagtcaaactgttttaagttggaccaactttatattcatagaaaaagtagcaacatttttaacccaagacaaaattattatgaaaatataaataatttagtattacaaatatctgtagctctctttagcaaaggctgggatgtttattccattatctaaaaaaaattattattattatatttatctataaacttagttaaacttaaaacaatttaactttgaccaaagtcaaaacgtcttgtaacctgaaacagagggagtatttttttaatccacccggtccggataggctggacggattctggtgtaaccagttttgtcataaaataatatttctgcgcacaagcaagaaaccacgtgtttttggtcaacccgtggatccggacaaactggacgaattccaagagttgtaaccattattgtgctaaaatagtatttcccctttgttctatgtttacaatacgtaaaaaccacgagttttattaatcgacccggttcggacagatcggaccgattccgagcgtaactaattttgtcctaaaataatatttctcctttattctatatacacacaagcaaaaaccacatgttttttaatcgactcgagggtccggacagaagcggacggattccgagcattgtgaccaattcctaaaatagtatttctcctttgttttatgtgcgcaaaactaaaaaacacttaatttttaatcgatccggtccggacataccagacagattccgagcgtaaccaattttatcctaaaataatatttctcctttattctatatgcgcacgagcgaaaaaccacgtgttttttaattgacccagtccggatagaccggatggatttcgcatgttgtaaccaaatttgtcctaaaatagcatttctcatttgttctttgtctacaagacagactggacggaaaaccacgtgttttttaatcgacccgatccagacagactggacggattccggacataaccaattttgttttaaaataatatttctcctttattctatgtgtatatgacaaaaaaaaccatgtgtttttttccaacttggttcggacattcccagatgaattccggatataaaatacgatgtgtcctaaaatatatagtagttctgttatagtataaatttcgtctcaaattgaaaccgagtttcattgagtttaaaaactttaaaccagttttcttgtcgttgtagcctaccttatcctacgccacagacacgttctttttattttttttaattcgacacattttttttattttttttaccggacgtgtagtcacgtacatgtgtgcgcccctcatcaacacgtccgtccggcccagaacgccacggcctaattgcgaagagaaggagcaggcttgactatgggacccacctgaagaaataagtgccaaatctaccccaaactaatttactccaactttactaatctacccttaaaaataaacggttcagattaattatacttgtagtatatactacaagtaaaaagcatcggagcgtcgccctattacttatcatgttgccatcccatgagtctctctgatctgtgcctagctgctccaatggctatatctttttggcctttctgttccatccatgtttgcacagatataaataatctcagagattttatatgcaagaggcttgttgtggcagctatagctatagctagctatatatccacagtgtcacacactatacacacccctgtagacgagtaaactgaaacaggagatgggtgtactgatcaaaaaaaaaaactctaaattcttgagcaaagaagagacaaggcgtgcagatcgatttctcctcccatttcatgcatgcgtgcatatgtatgatcggccgatgcaaacacaacacgctatccataaaaaccgtgcactcatgtgtggttgcttcgaatgtgaaagtgctataggtgtacaactttaggatatctcctgtgagattcatcaattatatgtgagcagtgcatatatagtatagtctcgctacgatactctctactggtagcataatataataggctatgtacgcatacacgcacaccaaataaattgtcgaaaattggctcttgggcgacactctagttggttgctataacacatagaattgtttaagtaaccgcacgaaaattcaacacatttgttacaatactatcgaagactcttgcatgacgctttaattggttgctagaacacagaaaaagagttaagtaacagtaacatatttgttattatatatagacgatagagaatttcatagaaggcacttgaatacaaaactaagctattttctagaggttgctgaatagtcatgtgtacaagattataagatagccgctagatattatatttggaattctgcacatattctaccatctgaattaatgcgaacactcgctatcaactgtaagtagggatggaatgatgctgcaggatgcacataataacaacctgtcaactgtacccctgcaatactcctccctaatagcaaggttaataatacagccgacctgttagctataaggttctttgtagcattctctcagcctaccatataatagttagctctttacaattaatatatggcccacttgcctctctcatagagttttttggttattgtgtctgagccggctgtaagtttacagcccgtttatcctctctctcctctcttctcttctccacatcagcatttagccggcttatagcctactattatacttgctctaacctgaaactgctgaactgcatgcagtgtcgaaaacttcaacatccttgaacagatatactaccagctagctttacaacatcccatttcaacctggtagactggctatgtctcacactgattccaaaatggtcactgccaaaacaggaggcaggagctgtccgatgatcagctgctccatgttactgcaatactagtagtagtataagatggcatgcatctgatcatcatcatggtactcctgtctttctgaatgaaagatcattcactattcagataggagtaatatcataaggagaggattagaggggttgaaaaatagtgttcgcccatggcatagcataggtcagcaacccaaccccacagactccaacaagatcgagggggttgtttggctagcagcatctttggaaaaaaaatatcaaaatagttttgtcatttctgaagtaccagtgtacttcctcagtttcacaatgtaagtcattttagaaatgacattttccacattcatattaatgttaataaatctagatatatatgtgtgtctagattcattaacatctatatgaatgtgggcaatgctagaatgacttacattgtgaaacggaggaaatatatttgtattctacattttcttctccatactactacaagtaaaggagtacagtatatctttttgttgtttgtcatgtgaggttcaagggtacagggtacttgccctgcagccgtaccgtccttgtgaaaaggaggcacacacatgcatattgatacttgtgagatactgtgcatattgatacttgtgagagatactgtgtgccactactaactttctcacagacacacgagacaaagagatacagatggataccgctggggatatattgggttgtcgcacctttttcgtgcagcttacaagaaatatatatcggagaaatctagccgtcctaataggcaattaatcctataatgcagagtcctattaaaaaactaatccgaatatattatgggccaaaattcagataacatatttaacaggcaaaatgggctgaaactaaaagatcaagacatatttttcggcacatgatgaaactgatgaagatgaaagattttttgcgcacgtaaacgagaaagctattagcacttgattaaatggatatattttatattttaaactaacttctatataaaaagttttcgtacaaacgctaaaactaacttctatataaaaagttttcgtacaaacgcaccgtttagtagtttgaaaaacttgctaacgaaaactgaggtaaagtttgtatcttaatgagaaaagaacggttaaatagactgaaaagatcaaaaccgaaaaattcggttaattagtagttcgatctcaactgctaactaattgaattttatttgatcagttcagtcaccaccatcgtttaaccgaattagatgcgctactgaacatgtaaatagagtagggctcgatacggagtggttcaatagattagctcaattcctgaacatgcgagtgataaataatgccaggattcaaagaaaaataagttcaatggctgcttgcatgtatggagatcaatcgatcatcacgtgccatcagctggtatctgtcgccaatccttacatataaactacggacgcggtgaacgccaattcgatcctatatatctaaattattggtgctagttaattagtcaatggcgcatctgtaagaaaaaaactttgttatctagctaaatttatgtttcctataaacatgctccatccatcctaataaaaatcaaatcataacatcacaatgagtatataagaaaataaataaaatacccttaagtaggaaagttgtattcatgaatgagtaggtgggggtattgaaggcataaaatttatcgatctgcaaaccaataatagatagaaaaggtagtatagtttggaggacaaaatttaaactctaaatgttaatttattttggaacggaaagagtagaatgtgaatgcacagtgaattttggcagtcaaatctctgatggtactgagaggagactgaagtttctggtaaacaaaaaagacgtgatgataatttgttatcctgactcacgtctcactaactgaaatgatctttggtgttatttctcatggggtggcaagggacgatctagggagtggcagatcgttaaattttctgtaaaataaagggcatatgtctccccgtctgaaacatcgaagattaactttctcgactttcagttttgaatatttggttggacaatttgccagaagtttaaagctgcagtggcaaggcaagcctacatcatagaaatggagagaggcctctgaaaactgtccttatttttgcacggtcaaatgggccaatctatgggctgtttcttgtaacagacgaacatgaatgggctggccggcccgacaaatgaataggcagtcccatattatttctatcgtctgtgcagtgtagagatgcctctgatcacgacgtcgccgacctccgcatacttctccttgccacgagtgtgtgtgatcatcatctggttcgttaattgtttttttttttgagaaccatctggttcgttaattgagaagttgaattccaattccttctccttaatttatccgctctcttttcagtatcagtatgtgttcgattgattcttttgtgtcaatgtttggttggttcttcgtgagatgaaattagtccaaacttgcaacatgtagaggtgagatgaatttagttcaaaattgtatcctgttttaaaagaacatacttcctccgtttcacaatgtaagtcattctaaaatttcccacatttatattgatgttaatgaatctaaatagatatatatgtctagattcattaacattaagaaatgctataatgacttacattgtaaaacggagggagtataaaaagagcttcatgggcttttgttttcttctctgaactccctcacgaaaagcccttgccacgtggcccagcatcgggacgtacgtggctggcttgcacggtggctgcggcggaggagtccaccatcgccagtgacatcgccgtcgccggaggagggtttacattacctctactaaatttcgagccctattagtattatgatttttgataaattttaactgaatttactgtttaaccttcgaaattttgatcaaaacttaatttcgagccatgttgaaacatcgaaatttcacgaaattcgaccggttttcgtcggaactgtgaacctgcaccggagtaccaaagtggcaagacgtgatctgcaaaggcagaggatgctgccgtgtgaagtggccaagctagctttcctggtcaaaacaaaaaagtgaacaaaagctagttacaacacctgcatgtatatttataccataaaaatgggaaaacgagttgaacgagattgcacgcagttacaccggagaggaagaaaaggttgcaaaattgttgcacccaaatttggggggagtgacatgacacggcaggggaaattccgtgaaatgttacacagcaatgtgcacggcaaaatttttgaacaagttaaaccaccctctgcctacctagatttagggttatggaaaatttaattcattttccttcttgttttcttgtaccagttcctttcaagtttgtgtgtgatctcagagtttttttttttggttgttgaatgatcattggatatgagtcagcggtgagagcgagaggttagttgggttcgccgcgtaaatcaggaaccatgtagctcaagactaggggaagatgttgaagaagaggtgattggaggtgggcagatggaaaaactttgagcaaatgaggaaaaagcataaatactacactttggtcttgcatggtgaggtcatggcaatgtggcatacaacaaggatgacacaaaacaaagttgttagtactgaggagtgaggatgcgtccgtttgaagcacaaaggataaatatagctcattttttatgcgtacgtttttcatagaaatgttaatttaaaaataattataccgatccatttacaagtttagaatgcttaatatcaattaatcatccgctaatggttacaccttatcttgcatatcttcataatattctctttttcacctcctttcaaaacacaccctaaatatctacacaatttgctattgttttatttcttacacctgcacatacttcctctattaaggccctctttgtttagatttataagccaacttataatccgaaaagtctaagcctaaacaaacaagtggcttttttcatttggcttttttgaagccataagacaatctaacacttttaagccaaaagctaggttggagaagcttttttgacttatttgacttaggacaataaatccaccggcataaatcatataagccaataagctgacttaaaagtttaatccaacaaacctataaacctaaacaaagagggcctaagtatagtatatataagtagcattagtcagtggcggattcatgcttaatctatgggatcggttgaccctagcttttccaaaaacaccccaacaaatcatgattctcgtgtataattttttttaaaaaaaatagagaaatgtcatcacttaaatataaaccagtagtaattgatctcacattgtaaaattccctggtactagtactacttattggtatcttgaacaaattattacctttccccaaacaatagaggcgttgtaggtctaaaattcttgatgaatgaattccaggctaaaatgttggctaagcatgtgaaatataagatgaattttgagctaaaatttgtcatgctaatcgtaacttaagatgcattggaaataggtgtaagagcggttcacaagagagcgtacaggttacttcctatgaggattcgctctaataactacataagttattgtagcggatcctctttacttgtggagtaataagtagttggtgatacgtgttagccacgaggcatatattctataataatacagtgtcttgtttcgattgtaaagtgaatttgaacaagcacaatttctaaggtgaatttggataaacacttgttcagatatatcctaaaaggttgatttttttatttcagagaaggagggtataaggatatttattagaggtatttcatcaacaaaattaacccacatacagcacagtaacaattttatattgagtttattattacaaagccaccaaccagcatatatgcccaacgatttcgctatatctcactcgaaagattttttcttatctctcactcaaatttacagtgtgttttcttgtaagttacagtgtaattttttaatcttcacatgtaagttttaaaatttatattggatatggtctttttcttgcagatatggtaatttagtgtctattatggtatttttttaattgcttttatattttactgtatttattagattttaattaaaaattaaaaatctgtgtaggtactccaactccgtgtgcccaaaaatgagcgtgagcccaactcgccacaatcctccaaccacccctagacacgtgtccagagaatctctaaccgatcagtcgaagacgctccattacactgacaaattggccccacatgtcagtgactgggccttgctcgatatatccgcgccatggcttccgctgtgcagttgcttttgcttcgtctacctctcgccgccgttttccccccaaaacccgcgacgacgaaaaccctagccgtcgccggaatgtcgaaggccgaggccgccgccgccggcgacgccgccaagcccgacccggagatgggagtcgcgggggagaaggaggtggttgcggagaaggcaccggcgaggaggaaggtagcggcggaggaggaggacccgcggctgcggtgggcgttcgtgcggaaggtgtactgtatcctggcgctgcagttcgccgtcacggcggcgatcgccgtcgtggcgtgggccgtccgccccatcccgcgcttcttcgcggcgggctccctcgcctcgtggctcgtctacctcgccatcctcctctgccccttcatcggtctctgcggcctcctcctcctcctcctcccttcccttgcttggttcctcgatctctctttctttcttccatggtggtatctgattggggttttggggtttgcgcagtgctgtggccgatgctcaagtacagggagaagcaccccgtgaacctgctgctgctgggcctcttcacgctctgcgagagcctcaccatcgccgtctgctcctcgaccttcctcggtatacacgccaaatgcgctctccatttctctcctccccaaaatgtctccatttttctttctccgaagaaaaaggtctccgtttttttttttttttgggggggggggaattgtgatgctctaaacgtgggtgattgactgatttgagatgcagttgggttcggatgggtaaattttatggctggttcttgggccaattgattgtctccgtgtgatttggttctggacttttggtgggattggcgattcccaggagttctttctttttctctctcagtagcattgttgcagggatgtagctgctcgtgcattattgaacagatcagatgtcgtgttttgtgattagatggaaaagttcgaggttgttttgctgtggagtgtatttggttgtagtgttgcgtactgttgtatgggtaggaccatcaggatctggaccacttgctgttcctattacctgggagattatgatatttgttgctatcaggtgtcagaattttaattatgaatgttggctgttgactactccagaatgttggctgtgcattatattgtggttgtttctgatcgagaccctgattagatttttatagtcttgacacatgttttataagtggggttagtggtgggggtggggatgatcttggtggtcaactttctttattataaaacgcacgcactgcttggaaacaccatacacgatgccttttcccatataaaatactaccttacaagatcaccattcttggatatctatagtgttcagtttgttaagaagaattttctatcttggtttttctggacaacctctacaagctgcccatctaactgcttgcaactacctgttgaattctaagtacattttcaattactgttttctttcttgtctgctgtatcacttaaccatcacattttcatacacactatgtattattaaaggttagtctgtaattctgtatgcactaaccagtttatacacttccatttcttagattctggctaatcagtgtactactgttcagtcaacaaatttgttgctctctctcttgcatggttgcagccttgcaggggatgtacttcctccgtcccaaaataagcgcaaccatgagtttccgtgtccaattttgaccgtccgtcttatttgaaattattttatgattagtatttttattgttattaggttataaaacatgaaaagtactttacgcgtgacttatgttttttagtttttttcaaacaaattcaaataagacgaacgattaaagttggacacggaaactcatggctgcgcttattttgggacggagggagtagttggtagtgcattattgaacaaagcagatttgtgttgtgttttctggtgggaaggaaacatttgacttttgaggttattctgatgtggagtatatattggttgtagtgttgcatattgttgtatgggtaggaccattatgacctggaccacttcctagttcctattacctgggagattatgatatatgactatgttgctgttaggtgtcaggaatcttaactatgttgcatattttggttgctgtgactgactgaccgaggtcctgattagataatgatagtgttggcggtggtggggatgatcttagggtcagctttttttgggataaaaaacaaaccctgatgtgccaacaccatacaagatgctttttccctcaaaaataccatacaaaagtgtttgttaagcggaattctcaattttgtttttttttttttggacaacctctataagttttgcatgtaactgttggaactacatattgtgtgctgaatttattttcaattactgttttctttcttgtctgttgtatcatttagccatcacatgtttcatattcatactatattattaaaggatggtctgtataccctgccctgtttaaatgcttccatgccttgaaaattctggctaattagtgtgctactattcagtcaacaaatttgttgtggtagcactagtaggatgctaagtttcctttgtcaagattaagtcccctgaccccttttgcatcatctctgttttttttttttactctgtgtttgtgatggagcaagtggctcctccagatctacttgcagaaacctccgctgggcttcactgcgttgagtgcttggtcgctatgttttatatcatatattgagattgaactgccaaccttttctatcttctgtctttattggcaattgaacaccatttttgttatggcacaaccagggtttcccaaaccgccggggccgaggttaccgcgccctgggcggtaagcacggttaccgcgcggtaaccgtgaaaaatcttacgaaaccgtgcaaaatttatcaaaaaatcaaattattttttaaatttaaggaggttaccgcggtttttctattaccgtacccccgtggtaaggccggtaaccacgcggttaccgacggtaatgtaaaccctgggcacaacacatggcttctcattttgagtgattgtagatttcaaagactgcaacccccaaaacacagaacttgttctttagatctgagctagattacatggatgatttccttgacacctcagagagtttcttgttacttcctgttacttgcaaacaagattcaaatactccttcagaatgatttgtgtatcctcaattgaagttcacatttctttgctcaatgctaacaggtaaagtggttctgcaagcagcaatcctaacggcggttgctgtcatcggcctcaccattttcacattctgggcagcccacaggggccatgatttcaccttcatgtatcccttcctggccgccagccttctggtgcttctggcatacctcatcattcaggttatcttcttcttccctgctcaacctgctccgtttttcttttcttctcaagtgctgtctaactcattgtgcaattcaccgtgacccggcagatctgtttccctctggggagggctggcatgacgatctacggctgcctcgccaccgtgctgttctccgccttcatcgtcttcgacaccaatcagctgatcaagcgccacacctacaacgagtacgtcatcgccgccatctcgctgtacctcgacgtcatcaacctcttcatggctcagctctcgttctccatctaagtggcacgcctgttcttacgcccttcaacggttgtccagtacatggtggttcttacagctgaagaaacttagttacatttaccttacctaccatatcctacactactatatatgcagcgagaagtcttgcagagctggagactctggacctgtaattacttaatcatctctagctatgttgcactgtcgttgcgctgatagcacgatagatatattctggtacctttgagacatgtttgcagtgatctgcactacatcggtttagatctaatcagtggagcgaaaaacttcaatggagatgttaatttctcacaaatcacttgatttaatctgggccatgatcaagcaagcatctatcatgttttgttggtgtgcttgttgctcttgcatcttgccaatcagtctttgcatgatgcatcactgtggtctgtggacagaacttctgaagctgttactggcttgctgctgctgatggtggtcagatcttttgaagagtatggctggtgcctggtgtgatagttagcgcagcattattatctactgatgtgcacaagatcttctactgctaagtattttatttctatgaaattattaacatacactgatgatcacatgaatgaaacaaaattcctactgaaaaaggggtgtaaataggaaaaagaaaacgtctcctcaatatgggaaaagaaatctctgcctgtctctctattattgctactagctgtgctctgctgttcatcctatcatgaaggaggagaccagcacgaggaggaggtggagcagcacgccgccgccggccggcagaagggaggaggcggcggcgccggacttcttgacggtgaacgagaacggcgccggcggcgccgtccccggctgcgacccgttgaacatgctgatccccaggccggagcagtccgacccaagcgaacctgccaccggagaagaagaaaaacatcagtcgccggcgacgagctaggcccggcattcatccagccggccggccgcaggataagatttataaaagtttttgaataaggcaaacaatcaaacatgtttaaaaagtaaacggcgttaaatacatgtttaaaaagtaaacggcgttaaatatttagagacgaagagagtactaaatatttgtgcaattagcatttatttcgttgcgaaatgttttattgttaaaattattttaagcatgatttatatcttatacatttacatcatttttttaaaataagatgaacgatgaaacgtgagtcaaaaatatatatcatctactcccaaaacgaaggaagtattgcaaattaaagctgatgcttacactgccggtagcaagggtaggaggtgtcgttgagaaggttctggaagccgtcgtggcaggcgcagcggtggccgaactccgacgacctctcgcagctgccgccgtcgccgcagtactggaggaggcaagctgcattcattcaggcaacaatcaacgacggcgagaattaattaacgccatgatcagctaaagctaagaacagtttaatttgacgacatgatggtggtgattaatcttgtgggttttgagtgcagtagttgagagattattacggtcgtagatggagaggttcgtcagcgacggcatcgccggcggcggaggaggtggcggtggcggcgacggcgacggcgacgacgacccgttctggcacgagtagttgatggtgcctgcgaggaggaagagtcaacggtcaaactcttctctgggtaatcactgttctgcctacgtggcactacaagtcagtccagcgtgcgtaactacgtacacgtggcaactctttgtgactttcactttgactttggggttaaccgagcagtaaagcaattaacagcttgtactctgcttctggaatttggacttcttgacacgataagattaccgtaggcacgtactataataacgttacaacttactacttcctccgttacacgatgtaagttattctactattagtcacattcatattgatgttaataaatctatatctagatttattaatatcaatataaatatgggcaatactagaatgacttacattgtgaaacggagggagtaactcgtttgttctttcaagaaaaaaggtgaaatttaactcatgtttcatgagcaacttaatccaaacatgtggtggcaaagtccacagatgcagtttggacctttgttgcacgccgtttgaccaataacaacacaagttgaagtgtccattcaatgggtttgactatggcctcgtttacttcccaaaatatttttcccaaaaacatcaaatcgaatctttaaacacatgcatagtgcattaaatataaattaaaaaaaattaattgcaagtttgaaaggaaatcgtgagacgaaccttttaagcctaattagttcataattagccataagtgatacgataactcacatttgctaataacggattaattaggcttaataaattcatctcgtggttttcagacgagttatgaaactagttttttcattcgtgactgcaaccccttccgacatccggtcaaacgttcgatgtgacacacacaaattttattttcgccaactaaacaagccgtatgttagaggaatcttcccacatactcctagtacttagcaagctaacatttttatatttgttttttaaaagccataagttaatcatacacatttaagctaaaagtttaagcatcttattatttcctatttgaagtacacgtagaactacaccattgaacttgaggcttaaagcgcacatcgagatctctaaacttggtttattgtatcatttcgatccaaagcgtcgtttgacagtggtcttacctacgtggcacgccacgtggacgatgacatggtgtttttttttctttctctttttctttttcctcctattcttttatcttcttcctccactagagctacctcgagctcccccgtgtcaaagaggccgaagaagagagaaatgaaagaggaagaagagagaaaaaaaggaataataataataatgtgccatgtcgtcatctacatgtcatgtcaaatggacaagaccacggtcaaatgagactttggaccgggataatataataaatcaagtttagggacctcgatacatgctttgtaagtttgtggatctaaatgaaacctgcttacaagtttaagaaccgcaagtgcaatttactttaaaaaaattaggtacattctattctgtcacttgggacataaaaaggtgctatgtctgaaacatcgatgcctataaaaggagcgttaattgtaaagctaggatagtcgatggtggagaagctaatgacaacgttaagctatgatgagcttttattagctatcagtaggtttttattaatttcagataatggattaattaaaaccacgtgacctctacgtccaaacaaaatgtaacttgacaaaacctagtattatatggacagtttttagtagccgatggccgtggtgtttgcattaaacctaagcgaacacctctgcacaatcgatgttcacgtggttaactattcaaatatgacctaaatcccgaaccaaccgttaccacgaaattcagttaattaaccaaatattttcctggttataatcttcagtgttataacatttttcccctgatataaaacttcgcactatggtgcgggtcgtttcggaaaaaaaataaaagaaactttttttcagcccaataccatcgcacacacaaatcatcaaagagattaattgggaaatcaacaaatataggtaagtaaatcttgagaagagatgaaatgaaattacagttgggtatgacacatgggaggaaggggaactgcaggttgccgaggtggtagcggctccacccggggttgcacctgcacgcgaacccgaacacgtagtcgctcgactcgctgcagctccccatcccgcacctcaccttgctgcacctactcccatctccatctgcaaccaaccatgcaaccaagcagcaattcaaccaccaaaaaattcagacaagaaaaggagagaggaacacccatcgatcatgcactcaattagctagcttgcagtactattcaggcattcagctgctcactttgtgctcctgctccatctggcagcatggcgatcatggcctgcagagaaaccatcacaagaactaatctgactctgctgcacttcatcgtctctaatttcagagagttcagagagagagagagagagagaaggaaggtaagctttgtttgcaggaagataggaggatgtagtggcgacttatatatttttggcgtgatgtcgatcgcaatggcgcttggaactaaattaagactaaaaaagaagactgcacctcaagttataccgtcagatttgacagagaaaaaaaatggtcatcaccctaattaattgggcaacatatgcgtcctctccttgcttgtttcttccagaacatggagacgtaggagcaataatctgtgtgaaatgtatggatgaaactgtcttaggtcaattgatgtccatacttgattaattattaattgctctagttttgcattcactccaggccagtgccggcctggaatttctttcttccgtgtggaaataatgaccgagaaatacagataactgaacttttctttttctggttcattgaatggaccaacatttggtggcttggtgcttgctgaaatataatacctggctgctgttgatgctgttgctggtgcaatgatgtggcgtgtgttctttgcttctcgaaggttgaaaggcttgaagcttagagtcaacctttgtgtagggactttttcatgcacctactaaatcatgtctaaaaaaactttaaatctttttttccgtattatgattgtacgagtatatgataaaacagtattttcagtgttgggcttttcaccgaggcttagcttcgaatttttatttatttttgaaatattttaatttttattttgaaaacaaacccttcaaaacctaattccaaaatctaaactcttttcttcaacaccacctgtgacgtgacagttttattttaccacccaaccaaaacaatgttatcgctactccctccgtctcataatataagatataagggattttgagtttttacttacaacgtttgatcactcgtcttattcaatattttctgaaattattaattattttatttgtgacttactttattatctacagttctttaaacacaacttttcgttttttagatttgcaaaaaaaaaattaaataagacgagtggccaaacgttacaagcaaaaactgaaaatcacttttattgtgggacggagggagtaaaagatttagatcgggaaatagtaaggtttagtagtttttttaaaataaataaattccttagattctctttctcacatgtcggcctcggctgtgtgtagtgtaccgaacagaacatttgggtgtagttattatgttctaaacttgtctaaaatttggctaacaaaattaataaagacttgcatgatgaacaaggaatcttgtcagttgccacaagtgtgactacagaccaagccataaccagatgaccaactacagaccaagcccaggctgcatagtctcaagtacaccaaaaaaatacattcagatgtgtcagttgtccggacccatctttcccttaaagttggaaaaaagaaacaatacctttttttttcaaaaccatatcatttgcaattgcattttatcaccaatcccctacaacaaacttcccaacatatttcagctcccgcagcccatataaacaaaccgggataaaacacacaatatcacagaacctaaaagaagagaaaactgaagaacaaaactttgtcatggtgtctatgtcagttcatgttctgctgaagacaatgaaaaccctttctttttgttcctttctttcggaaactgtgcagaggaagaagatgccaaatcttccagcaagctgatcaagctacaaagagggagtccaccgaagggacctgcgtcctgcagcaggggcagtctggttggatggccagccaggggaggacgcactccgagtggtacttgtgggagcagggtagcctggtgacccgctggtgtcgctcccgcacttcgtcgaggcacacagcgcagagatcggccttggaaagtgtcctcctcatctcgcggcggggggcttttcttgttgatggcgcctccagcatggtcatcgaatgtttgggagtaggcctgggttcagtgggcagctgaatctgctgctcttgctggttgttctgttgtctggaggttgtgctcccatctcgttcgcgaaatcgcctgccccacctgcgtacgtaactgattgttagctcacaggaatatcgatattcagtttttgtcgttttgctactccatatcgaagcaggaagatgtttatgaagagaacacattgatgatggatgagaaaatgccaaatctttcaaaaagaattcaggcaagtagtagaaaaaagggtattgcaaaaaaatccctgaaccctcctctggaaaatggagatgtctggttagtgttcttatttaggtaaaaagtatatgcggaattaaccaaatcaattgagaaccaatgctacccaaatctgataacagctatattattctatatgcattttcaatttcaaacatctgataacaaaagctacccaaatcaattaaccaaaaccaatcacttgtgacaggtttaccattcatgccagtggtaatcccaaaaactagtaacaagatagttactacattttatatgctgaattgattactataatttgtgactatacccataattggttgtttggttaatgaagaccaggtcggatctttcaccggtagttttgtcaattttaagccaagctgcacaagcaagaagccatgatgtactgaaggatgattctatttactgaacaatccagaacccatgcagacgctgtgacgtctaaatcacaaatacgcgggaaaaagggcacacgcctttcgcatgcgtgtgcagccgttggcctaatttctggatagtacccaaaacaatcaaactgaaacagtgatggcgtaaggcatacatcggcaaattccctgtgcatatcattgtgtggcttgatctaacatgtggtagttttcagaaagcagagacatcagatggtgccatccaactagtttggcttatggctatacaaaataagatcacccacatggattaatcataaaagacgtcgttatcagtgggtttgcaggaagcttaaaaaaactaggtgattctcaatagcctcgtatcttgtcttgggaaaaaaaaacaaaggtgttcctatatcttttttttaaggaactaaaagtattctatgtctgaattttgctagtacacatggaattaaaagtattctatgtctgaagtattgtggaatagctgaatgctgaaattaagcaaagcctgatacactgttcatatggaattactcctatgtgataatatatagcttctagttgaatccaagaaactggttgatgaaacaatcagatcttggctcccttcttgccatcgaattcaagaaccgaccgatcctctcccccaattcgagcagaagtaaaatatattagccatgtagaacgcgatctttttttccacgagtccatggctggatctcaacacaaagaaaaggggaacagaaatgaacagggaaaagagggcacggatgagggggattcattcacctcgagagagacgacgagggcgcggccgcggcgccccgcagcttctcctcgagccggatgcgcgccgccaccgcggggctcacctcgccccctgcgcccgcccccgcctccgcgctcgccaccgcctgacggtggtgctgctggtggaagtagttgtagtgcccgtggtggtgctccccaaaccctgcccccgccgccgccccgtcgccgtggtagtgcacccgccgccgcctcgccagctccacccccggaagcatctcctcctcgtcgtcgtctcctcgatggggggttggtgggtgggagagagctcggagaaatttctcccggcgatttataccgagggcgcgcgatggcggaggaaattccgcgacggcgacgagaaagacgacgacgacgtgacgtggggtcttggaagctgctaggaagcagcagggttacttggggaccttgaggttggggtggtgaaattaccttttcgcccttggcatgatatatcctccatgattatccatccatgcataggtttgttgctagtagcttatacatgttttttttttaatatcttgaatctatgtttggtgtcttaggtgagatggtgtttgtgttggtatggatgatcgggtgatataaattatatctggtgacgagaacgggttttggattggctggctggttacttgacgtatcagcgcatacaaatagagtagttaacggaaaactgtaggggtacggtaggtgcgtgcaaagttgctttttccgccaatattgaatgtacgtaggacaaaaccgttgcataacaatatagatctaagcggtcgtttgagtgattaaataagtgaacatatttagagtttttttttcttttgaaacgatgacatcatgaaattagaaccgtctgcgtcgagccatatagtagataagtttccctctagttaaaacaggttgtagtagtgtcattacttgcaagtaacaactattgaagaaggtagataaatcagggctagctttcttggttaaagagacaagtttcttatgactgaaaataaatgaaaaaaatatgttgagaagtcttcgcagttcacataatagaattaaccacaagctatcaaatctcactagatacggagatcgtttatgcttctggtgtaataataattgtaccctcatttccattgtgagtgaagaatcgtctttgtattaattagtttaccttaagaaacacttcaaaacatgtcttatattgtatttatatgagtcgataagttatgtatctacgtttctcagagcatatcttaacaccataccttcaaatttttatctaagatgtcaaccaacatctaaagggttattcggattaatgccattttaaaccataccattttttggtgaagttgtcaaatatatgcatctatttagttcctcaccgaactctaataaatacataagaaatcctacgaaagcttggtgataccgttaaattgtcaaaattttggctacaccaaaattatttgttaagatttattttagttataatttgaataggtcctaacaccgggagtaacactataaagagtttaagacattcggtttcaaaaaaaggaaaagaataaagagagattccgatatgcccagctaaagcaacggattccagaaaaccagcttcttttcatctagaagtatcacgagatacttggcaccctgtttccaaaggggcaaaacggtcaagccacatagtgtcacggatgcttcgcagcagcttctccagaaaattccgagagcgcatgaaaaaaaaaagaaaaagaaaaaagaaaggcgaaaccgatatatatgcacattggatggacatcgtcatggccttatcaatcgatgatatcgtgacgttgataataccgagtcagaggttcaggactttgaataataggaacgaaaaaaaaaagaataaaagaaacataagatttgtatagaaatataattgcaaacacaggagaaaaaatatataggaatgaccgtttgattgaaccacaagaaaaacaaaaggatttgaggagagataaagatttttaaataattattttcatgaggttctaacttatgttagtgtgtagccgccgggggtactatttggggacaacttgcatgaagaagcctccaaaacttatatgggaagagacattccataagaaatttataggttttattcctttgattcaaagggttatgtaaaaaaaattctatagaaataaaatcctctaaaatttataggttttattcctttgattcaaagggttatgtaaaaaaaattctatagaaataaaatcctctaaaattcttatgattttccattaaatcaatggggccttctcggttggcataactagttaaagtaaaagtataaaaaaaattcgaatgttgattctaagaaaattttaacgtaatttttttaacattaacttttgagttgttacgaacaaatacataaaagttttacctataaattgtactccctctgtttcaaaatatttgacaccgttgactttttagcacatgtttgaccgttcgtcttattaaaaaaatttgtgaaatatgtaaaattatatgtgtatataaaagtatatttaacaatgaatcaaatgatatgaaaataataaataattacttaaattttttgaataagacgaatggtcaaacacgtactaagaagtcaacggtgtcaaatattttgaagcggagggagtatttattagggaatacaggtagccggtgagactcttcttacttatgtatggtatcggctggttcccgattaatttcggttgttccaatcaagtctattgaccggaatggctgaaattgatgtcacttgatcgatctggtaccattcttctaaccaactaggtgaaaccccgcgcattgctgcggaaatttagtatgatagcaataaaaaaaataacgtgtaaaatagctagataacatcagattaagtaaattaatgtggtttatgataatttaaatttaaatagtatgtagaatggtgatttaaacgtaaaaagtaaggtggtatgactttatgaaagaagaaaagtagtgagatagtttggaccgtagattaatcatctaaaggctaaaaacaattaatgtgatatgacttaattagaggaaaaaatgataaagataatttggaccatagattaattatttaagcactaactgaggatgaaccatataagtatataggatattataaaacataataaagatatacattgaaacattatgtgaattatattggataataatttaacatgtttgtatttgaaaagctcttaaattataaaaactataaagatatagcatgtttgcatgatgtttaaatgtgatgattgttagtggatgatgatgtgtcatcttgttagtggatgatgatgtggtatctttacatgttgagcttaaggagttagtgagggataactttacagtaagataggattccgtcgtcgaatttggtttaatcagttttttagaactatggtttaatcaattccttaactatgtttagctacgaagttatttttgtctatgccatatattgggccggtactgaccggagtgagatcgaaattgacataccggtatacgacttgttgttctacaataagtgatccttctaccgaatatggctttagtcgatttgaattatgtttaagtgtttaactattaagtaacacatatatatgtttttggattaagtgtttctctcattactaccatcgttgtcaaatattattatttcgcatgaaattttgatgaattgatgttaataatagatttatgatgttgtacggccagtatagtgtcattcccgtgaaggcagtcgaaggggttactggtatgtcaagcggcgtgcacgtcagtagtagagccatgtggatgttgtcgttgtggcaatgccgtcgatctcatccattaatgttgtatgatttcatttgcaggattgtttttttagttctaccacccttactttcttctaaagggatggttttgttctgtaagcatgtgtttgttttcgggattaggtgggatgggataaaaccatccctgattttggggttgggatgattccatttacttgtttggtttgtaggataggacaatcctaatttttttgtttggttgaagggatgagcgagagatgggatgggcgccgtttgctatcaccatcagcgagaaagaggagagtgagcagagatgtgtgacgacagccttgtgggagctcagcgggtgggcggatgagtgcgacgatggctagcggcgagaaggagtggcgcaagattgcgagcaggcggacagacagaggaggagcacggatgggcgagcaggggtgcagttggaggagcacgacgatggccaagcaggcggaggagcgcgacggctgtcgcgcgggcgaaggagcaagctggcggcgagtaggtagaggacgcggatccgcctccaccgccatccccaccactaaatccgccgttgccaagccccccgcggtcgctgagcccctcgcggtcgccgtcatcaagcctcccgcggccgccgtcgccaagcccccgtggccgcagccgcggtcgccgtcgccgagcatgccgcggtcgccgtcgctgagcccgccggtgtctgccgctgctcctgagggcgagtagggcgagcgcgcaggccggccctgagctcgagcaacgcgtcgtcatgccgttcgctcgtcccaactgggacgagttcatccgccagattttcccggatcggttggtcctggatctgagagggatattcctctccagggaccaacccatcccactcacccctcaaccaaacaaccccaaaagtgggttcgtcccatctcatcctatcccatccttgcaaccaaacgcaccctaacatctttggttgtagacattgtatcggggatttcatatcctctgaaccctgtctttcatctatactccctccgtcccataatatagcaacctaggatgggacctcatatccagattcgtagtcctaggataggtctcatcccatcctaggttgctatattatgagacggagggagtaatataatataatataatataatgagttcttaaaaaaaaagacattccactccttagagccaaattcaaatggcctctaaaataaatttgacaagctcaaatggtctctaaaattttagatcactcaatgactcaatatgatatatctaatttgatcataggttgctatattttgagatgaagagaatatttttttttcttcatccatttgcagttgaccctatactcaatctgatatatctatcactctatgtgcctctatcctaaaataaattacttcggtagtaactcttatgcacgaacatggacatatcaactttcatacataaaaataaaaaagaaacaatttattttttaagacagagtgtgtacactaaaaaaaaaagctcacagagattggcattataggtgccggagcagttaaaaccggcacctataatacttttcccttccctacaagttaaaaacacataaaaccgacaccttgagtaattataggtgtcagttttaaagaaaaaccaacaccgtatcagttttttattcaaaatcgccacctagaatttattataatggcggttttgtataaaaaaccggcacctatatggagccgagccggcgagccggccttatccatccgcctgtccttttattagtcgctcggtcgctcctgtctctctctcgctcttgctctctcgcctccctccatcgctctctctctctctgtggcaccggcggcccgatggaggcagcaatggcggtggcccgtcgaggtaggcacggcggtggcccgggggaggcggcagccccatcgaggtaagcgcggcagtggctggcggcggcgcgccctcccctccgctggatccggttggaggggaggtggtggaccttggggacggccgggcggtggtccggtggaggcggtggcggtggccgcgccctcccctccgcgagatccagccggagaggaggcgacggaggcggcacagcggctggcagcggacctcagcggaggcggcagcagcggctggcggcggccgcgccctcccctccgctggatccggatggaagggaggcgatggacgtcggggacggtcgggcggcggtccggcggaggcggtggcgccagtagcgcccgatggatttttgaatgattttgtagttcttttagatgtttctgtgatctgtggatgattttgtttctgaatatgtttcgatctgtgatttgtgagggtttggggatggcgcaatgactacgattgtgagttccggcttgattcgagccggctctttttttttttttgctcgtgcaaacctataggtgccggctctattttggtataggtgccggttgtttttattggtgccaaccaataggtgtcggttggaaaaccggcacctatagtcggttcccaaccggcatctatcatggctcttgtactagtggtataggctaactgcagttaattactcggtggtttcgttatttgtcctaaccatggaccattgggtctccatcgccatgtcactgtctcatatctaattggcatcttatggatttatgatgctgagatatgtgaacttccgtgtaaactctcgatggatcgatgtgaaagcttcaaggttttgagcaatagattatctaagatataatggccgagctgattcattcagagtctcaaaattaaatgtttacttggcctattaggccaccacatcaatatgaaatgaatctatgcgtagacaatgcaagtcagtacaaaagcacatgaaaattttggacagaagttaaaattgtactacctctttctcaaaattaatataacaacttaagttatgattttggacataagatatacgatcaaaactcattatatttttgagatggaggtatagtatgatttattgttaaaccaagaattaattcattaaacacggtgcacagtgcacacagtcacacagataagagtacgtactgatatcgacttgattgtcatttaatttacataccgctgaaaagatcatttacgctgattaaacatgcacttcattgtgtaattaggggtcttattatattaattagagagtagaaattggcgagacctccttaattatggcgatccgtataacagcccatatatatggcacgatcgcaggccgtctgtcagagcccaaaattagtaatgggccgtaattttaaatggcgatatgctaattccctctcttcaataccgtacctacgtacacttcatcactgaagaaattaaggaaataaagaatgcttaccaaaacttaaaacggaaaattaaatgttgacctccgatgtttagatcatggtaacaagcgcgttatcttttcgcttatgtttatgcttattagctaaaatttaaatttttaacattaaatttggagctgattttgatttttttcatcaaagtttatttttcagcctttgcttttaagtcgctaaaaacacgtatatgaatgttttatttacaaattatgtttcgtttgcaaatatgttatttggtttattccttgtgtagtctgcgcatatgtgtgtgttatgtggaggattatggctgtgttcgctgtagcatgttcccaactagaacaatgcgcacggaaaacggaacggttcattagcagcacgtgattaattaagtattagctaattttttttaagaatggatcaatatgatttttttaaggaacttttgtacagaaactttttgcaaaaaaacgtatcgtatatcgtttaacagtttgaaaagcgtgcgggcaaaaaacgagggagatgagttggaaaacctaggtaagaacacagcctatatgtgctcgtgctccacgaaacacgaaaacgaaaacatgtccatgtatttccttgtaggattgcaatatgattttagtataaattaaaatactataaggttgttgcaaaactcatagatttcaaaattgattggtatcgtatccaagaaattaagtgtcctctctataattgtttttcgatcaatagttttggggacaaatgtgtggtgcggtaagtcagtagcaccattccttatttactccctccgtcttataatataagagattttgggtggatgtgatatatcctagacaacgaatttggatagaccgggacggagggagtagtatttacaccccctaaatctttaaaaaattaatccaagtatacaaaataaaccaagtatatgtggtcacctatttcacttacacgttaaacttattagataaaaggatttctgttgatttgataaacctatacaaccttcccaccgtctcatttctttattgggtaatttggaaccatgccattataattttgcaaagtttgagatatgccatcggtatctcaatgacatgtaggatccacatgagtcaatgacattgacatgtgggtcaggatggtatatctcaaattttataaaattataatggcatggttccaatttttcctttatttatccaccgtagcttaggctgctttcggcaatagcagattgatgctttctaatctaataaataatgtgtgttttttgcaaaaaggtttttatatagcattttttaaacaatcatattaatccatattttaagttcaatatgattaatacttaattaattatgtgcgctcatggatcacattgttttacctaactggtcaattttctccttttatctcctctcaagcatataacacaattaacatttaaagtcaaactagtaaaatacccaaaaccctctcaaccatccacgaggagacataaatagcacactccaaaccgcaataccttaggaagggaatgtttggtagagattgaactcctaaatttaggttgaagagttgggactagagtggagttgtggagcagcataaacccagcttcacctctctagatcattttgtgagagagctccacccaactcctccctcatttcaggtagagctaaggacctgtttagcacatagctggagctcagctaaacagtttcagctccacctaaaatggaagcggagctgagtggagcactcgcataaaataaactagagagatgtgaaggtggatttagacaactccacaacttcactacagacctaatttctgaagctaaagttagaagttagagctctattaaacagaccctaaaacacagttggactaagaaacgcttgaagaaaggaaaaaaactgcaatatcttatttctcttgtcaccttcaccaattttctttccccgttggtttgccacctcgccaaaaaaaaaaaaaaaaaaaaaaaaaacagaaccctctcacgtgtggatccaccgttggattggaatggaaccccctcgcgactccgccagccgttacctcgtcctcgacacgccatccttttcctcccccacgtacaaaaccccccctctccccctcgcgctgccacgtatcgctctccctcctctctctctctctctctctctctctctctctcttcgccgcgcggcggaggcgttcgtcgcgagctgtcggcttccctcctcgcgcccgcggcggctgtggccatggaggtccccatctccggcggcggcggaggggagaggttctgccacgcggcgcaggtggtgggggcggacggggagatggacggggaggcgatggcgcggttcgcggcgggggcggggctcctgggccgtggcctctcctacgccgtcgtctccatcgtcgggccccagggcagcggtgagagaaccttaccccctccctcctcctcctcccacgatcaccagttcaccacccctccatctccatgtagagagcagagtagtctgttagtacttgatgcttgttgtgtggttgatgggatatcgagattggatgacgctagtagcatattctgttgcggaagtgtttttaatttttttttgcaccgattttttactggacatgtttgttttggtgatttggataataatatggtagttgaaattgatgtcgggaacatctctgatgctgatgctttgccttgttactctggctagggaaaagcaccctgctcaaccaactcttcgggacaagcttcacggagatggatgccttgaaagggaggtaaacatttacattgctgctgcccaccgaaatgcatgcgcgctgcttttcttgtttgctcttcgattgcattcaatcggttgtctcacatttggagctaagatgatggattctgttcctgttttgtttgtttggttgttgtcaggagccagactaccaagggaatttggattgccaaggctgtaggcattgagccgtttactgttgtaatggatttggagggcacggacggcagggaaagaggagaggttgagtgttatgtgcttttattataataatgtttatacgaataaaaaaccttccataccatgtttccttttgtaagattctgagtacaactcttccatgccatttctaactgcgtaaaatatttgatgttttatcttgtggttaattagtagcagtagtcctgtgtacctgagtatttaggctgtggaaaacaaaaaggttgcttttctagtacttgctttatccacatgtggcgttgtctcccttaataagttttttgctaggaccttagggccttatttccaaaatagttgccatgtagtgggtgtcattagaactcggcctgcaatgagctgtaaatgctgttattgttgttgtagtacaattacttaatcaccctgtacagctgattcatgggagcatctattagaaatgcaaggaagtcatgcattcatactaattctctacgcattcctgttcaatacttttagctgtgatttctagcatcaactctgaatatctgccgctgtcatttttacagtaaattgtgacatctcttttgttaaagtgatgctctatatctttcactttcagtctatcaatctctgtgaaccgttcatttgtgaagctacatcgcattcggtcctcatccaaattccatctgttatgcttgcaggatgatacagccttcgagaagcagagtgccctttttgctctggcagtatcagatattgttatgataaatttgtaagtttctatatcgtttgatacttcattattggcgaatataacgttaatgagtcgggagaacttcattttgcttttctcaaccttcttatgtggcttggtgaatatgccttttataggtggtgtcatgatataggacgagaacatgcagctaataggcctctgttgaaaacaatatttgaggtagcatccgtctcagtgacactaatcatgacttttgtctcagttacatattttaatctattcgtttttctctttctatttgaggtattgatgcgtttattcagcccacgcaaaacaacgttgctacttgttattcgcgataaaaccaaggtttggacagtctcagagaaaaccaaataaaatttacaaaatatgttcctcccatttcttgggcagacatccttaactggtatgagttttttttttttattgtctctgcagactccactagagtatctaacccaagctctgaaggaggatatccagaaggtgtttatgtcttatgttttgctcagctgcctttcctcattgccacactaaaggttttaccacttcttctgttcttacagatatggaatgctgttcgcaaaccagaagtttacaaggaagctgcactaagtgaattcttcaatgtcagtgcttaggttttctgaagtggaagttgcatatataaactgatatatatatatattttgttatataaaggtggaggttactgctctgtcaagttacgaagagaaagaaaatctatttaaggagcaggtaaaatacttattttttatcctgtaccacagaatgttctttctactaattgcataatcacattcaccgcagaatgaaacttacaacttgcaagcgtgtcacttcaatggagacatattgtattgttacttacttctattgctacaggttgggcaactcaggcagagatttattcattcaatcgctccaggtggtctagcagctgatagaagaggtgtgattcctgcttcaggtttttgtcttagtgcactccagatctggaaagtaatacgggaaaacaaggatctcaaccttcccgctcacaaggttttttgtgcctttttggtgcttttgattgtgaacaactaaatacttgcattataatcattaccaattcaccactccatgaacttagttgcaaatcatatattatattttatctgttccatatattctgtagatcatggttgctactgttcggtgtgaagagattgcggatgaaaagctcagaagtttcatatctgataaggtagcgtgttctcattgttgtatctatacattattttatttaattggtaccatgagaattaactattcatctctgcagggctggttggagctagaaacagctgcaaataacttgtctagtaccaggctttggaaagaagcttaatgctattcttgatttttatctatctgagtgagtgatatgactaattatccttacaatgttttcaagtattaaagtgtttctgttcttgcttaacatgtccattgacctgttagttttattttctgctatctatgactaattatcctatctgcagcatgtccattgacaatgtatattttaatggtaatctgaaagaatggatattcctttgttgttcttatttatgtttcttcttccaatggttttggagttttctttttctagtaaatagactatgtttggggtcatggatgccacaaagtaaaaatatagagttcttagattgcacatgtaacaaatgttcatttatttttattcggagttctgacagtcttaacttaacattttcctgcaggtatgacacagaagccatgtactttgatgaggatgtgagaaccgctaaacgccaacagttagaatctgaaatcctaaaagtgagttactcatttctatgttactaattccagttatggcttagagaaagtagtttaaccagatgatggtgtttggttatgaagattacactagtcaatgtaggaaaatgtttgtttttcttaataattcttgcttgttcatgacatttcaaataatggattgctaatatgcacacatacattcgaagaaaggtcctataaatattttaggcactctggataattacagtgataattgcatatatgactattataatataaaaatttggctcttactaattagagaggatgacatctgtcagaaaaatgtaaatcgactgttttatttgtccttatttgatcaactggtctcataaatcttgggttttgcagcacacatatgatgctttcaagaaaatgttagaacacctgcatcatgtggttctgaacaaattcaaaagtgatctagaacaatcattaaggagcggtgagggatttgcagcatcagctcgttattgtgtgcagtcatcaatggcggaatttgatgctggattgagaggtaaacaaaccacggctaagatttattgggactaaaatatttagccatttgtcaaatgtgacatgcatgctgacctctttctgctgtcatttttttgtcctgcaaatccaatgctgcaaaagccaaatctccatagtttggtgctcatttgatagttttattgtcaatgaatgtctaaaccatacgtcgactagtactatgagcctttgcttcttgatcttgttttaagcctcttgtgcttgctcctgccaaccatattgtgtatgtttttcaaataatagtttattcattcagattatactagaaatacggcaatgttcaacataagtaaattcctagtagtttgaagtaatgtgatttgaaactcatcattccttaaatctttggtttacgatacatgacatcaagtccctccattgtcatgcagatgctttggttaagcatgcagagtgggacacgacaaaagttaggagcaaactggagcagcatatagaagctcatgcaacatctgttcggggtacaaaactggctgaactaaaggctaattatgaggttatttttcatactcagtgcacggtttattattgcaatttcagcatgttcctagaattccccatttcatgagttcttacggtggatttttaaaaaaaccatcctcatgcttggaccttttgttgccgcaatgttcagaaaaaactcttggatacacttgctggacctgtacagtcaatcttggaaactggtgaaaaggactcttgggcatgtattagaagactttacaggcatgcgactgaaagtgctattttggcattctcagcttccctctccgagtttgaactagaccagacaactatccgtaagatggtcatggaattaagagaacatgcaagaagtatagtagaagagaaagctagagaagaagctgggaacgttctgatgcgtatgaaagaaaggtagaatctgctactattatttttggaggaaaacttagcaaacatatcttgacttttcagggatcacacttaccatttttggaacatttatcttatctctacctgtttaattggactctaggttttccactgtgttgagccgtgataaggattccatgcctaggacatggaaaggaaatgaagatatacgtgcaatcactagagaagcacgcttagcggtatattctttcctgttgatcaatattgcactcatttatcctgatctatgctgtagaaacatgatctatgtatcaccttcccactgcaggctttaagacttatgtcggtaatggcagctgtacgtttggacgataaaccagataaaatagatcgggctctaacgactgctcttttagatggaggaccgctttcacagaaaaggagtattgaattcacatctgatcctcttgcttcaagcacatgggaggaggtgctgacacttagatttagaaatttatgatttagaagggcaaatgtgatgaataagtcgttaacatttttaagtctgtacaggtgtcagaaaagaatacgctgatcacaccagtgcagtgtaaatccatctggaggcaattcaatgcagagacagagtatgctgttgcacaagcaatttctatgcaggtatatttctgggccatttctgttcaagtgggccatttctgctcaagtgcttatccagtatattgcataacactgatttattttgatcaaatggataggtaaaacataactgaatttgttgttttcttattatgaagagtgaaccatgaaccctggcctgctaatttcagaggcgggtcttcaatgcccttaaaaaaatactaaaagaagtgataagcttttcatgaaatatgttctttttgtccattatgtgaaactccatttatgatatttctatctgattgttggtgctctgtgcttaccaaattttcttccaccaggaagcacacagacgtagcaataattggctgccacctgcatggactgttttgcttctcgcaattttaggttacaacgaatttatattccttctaaggtaatcatctcaatgaagtagctttcttatccttataaacgcataaactgagaaatccgaacttgacggttaacatatgtaaccactaaccagcatcttctctctgtttatgaactcttggacaggaaccctttatatctgctggggctcttcgtcgccttcgtagtatcctatgctgcatggttgcaatatgacatcacagcctattttcgccatggcacggtaatattctacagaacgcgtttcgcataaattacatcccagtgcttttttatcaaagtcgctgttgctagaaaggagtaaaggggctggatcaccttagctggtttcatcaggcagaattctgctcttaatttttattttagataatggataaaaatccggcctctatatccacaagtggatatacagagccaaactgctcttaaatttctatctagtgcatttcagttcaactgaattacacggcatgtattcaaactaaatctcaaggatgttctttcatatgcagctctcaggtcttctgactattacatctgggtttctccccacaataatggacatcataacagcagtcatcaacatgagtcacaaccagaagagctcctcgcacccgcctcgacatcgtcccccgcttcatcctcaaagcttcaggaaccaggcgcagcaacagtctcaggctcaggtgcagtatcaggctccaagttcactgtcatcatcctcttcggtgggctccaacagcgatgacgaatcctgaagcctcataaaacatccctgtagaagacacgttccagtctccaggaaggactttgtataaaagaaaaaggaaaaaaaaaagaagaaaacttgatgtgtaatgtactacatacactgtgtgcatagctgtgagcagagttggtgatagctgattagctgagcagcataagttcctggataaaccaactgtatgtcagtatgtgtagagatgatggatggaaatgaactagatgtcgaactaaataccggagtaatagtaaatttcttcttactggttacttaattacagccttgggtttgtctctgagttcatgcattctctttctgaaaataaaaatgtctgtccatgccatgacctgcatatacatcacaatgactccatagaaccaaactaactcgattcacaggagcatcttcttccaccacacgcaatgccgcatccctacatcattcagtcagttcagtttgataggagaaaacttcactactgttatactgaattactgatgcatgcaaggatctttactggtgtgttaaacggattgatacagtaacagaactggatagagttataaacttgctcgcttgtgcctgcagctatgcaccagcagcacaaattctgctgcagctgctgcagaagtcaacccttccaagcacccctctaattaatatagatacattggctaaatatgttcaatgaaatgtctcactttacccaaagttactgtaatttaatttctttgcattaagcagtaagaaactaccgcatcatatggcctgaaactgacactgacaaacctttcaaatgtattgttctgttctatgttaacattaacagaggcatagagctttcccaagataaattgctgacttgagatgccttctagttagcagacgagttaattagtactctaatactactaattatctacctgtacaatttcgttttcctggttacatggacatgtgtgccgttgcagttactgtaaaattgccgtcagtttcagcatgttgcagccttgcaggacaggaaattatcagaatcaacagagatcatgcaacatcttatgtctgctgctagccccaattaataatactgtacagtgatgttgtcacgctagcttgatctggacttctggaatgatcataattcaggattaacaggaacttggcggagaacaaagcaatgcattttctcaagcagagtaaaagtaatttctcacaacattggaaattccagattcattccgtcatctctccagcgctagcttacacatagccctatcatttttatacagcttatctaccattttcttaaaacaaattatttgctttacacggtataaaaaaagtacatattagggtggcatgattccaacaaacccttttttaaaactactttattccaccgcatcacttagaccactcttttttagctatatgttattttcaaaatatgtaataatttacgaaaataattcgctcaataatctaaagggaaactattttaatccctcgagaggatatcccctcgttcaaatttaacttctacatttcgtaatgaaaaaaaaacaaattgaaccgcagctagttaacgtatattcagagtcaaatttgtttttttcgttgcgagatgtgaaagttgaatttttacttgcatgtttatggagtgatatgttacatgttaatacattttctcgaattttttcaattttttttcataaccatttaagtgacatacaaacaacgagagtatatccactcgagggatcaaaatccacttcctaatctaaatcaaacaaataccttactcaaagggctctcactttatttatctcttctttttcgcgaacgccactttatttatctcatacatacacctcttccaagcacaagtgtactgcaacaaccggatacatagacatagtagacactagctagtatatatagcttccaagtctcccccagatatatagaagctctcctatcggagagagccatggccatctatctcctgctcaatttattcctctcccctccctcgcgtacacattcgtgtgtgcacgcgcgcgagcagcacagcactagctctaggtcgatcgaccatggaaaccctagctagctataccctacacccggcgaagcagtatcttaattacgttacctttaattacactgcctggaggatggcttcggcggccaccgtggcccatccatggcggcgctcgtggcagtctcgcatgcaccgctgcctctcgtgccactcgcggtggtgctggcattgcctccggcagtggtcgccgccatggccgccgccgccgccgtggtggttgtcatcgtcgacgacgtcgtcttcctcctggcgcctgtacctgcagtcctgcatgcattgctgcctcttccattggtcgtggtggtgctggcatcgcttgcggcagtgttgctctctctcgccgccgtagttgtggtcttcttcctcgtcgacggcggcctcttcctcctcctggcgccgccactgcctgcagtcttgcatgcattgttgcttcttccattggtcatggtggtgttggcactgcttgcggcattgctgatcgccatggccgtcttcttcctcgacgacgtcgtcttcttggcggtgatggtacctgcaatcttggatgcactgctgcttcttccactggtcatggtggtgctggcactgcttgcggcagcgatcgccgccgtggttgtcgtcttcctcgtcgacgtcgacggcggcgtcttgttggcgctggtggtatctgcactcctccatgcattgttgcttcttccactggtcgtggtggtggcggcactgcttgtagcaggggtctctgccatggtggttgtcgtcgtcggcgtcgacctcctgtcgccggtggcggcagtccatgaggcagcgctgcttctcccaccagtcctgctggtgctcgcactgctcacggcagtccggcctggatccgccatggccgccgccgtggtggtgctgctcgtggcggcgccactcgcactgcctcatgcactcctgcttccgccacggctcgtcgcggtagccacggcactcgcggcggcactccttgccgccgccgccgtgcgtgttctcgtcgtcgtcgtcgtcctcctgctgccgctggagacactgctcctcgcactccctcagctgccgctggtcctgcccggcctcccaccggcactgcttcttgcaccaccggagctcctccttcgggtcccgccgaccctcctcctccgccgccgccgccgccacggccaccaggagcagcccggcggcgagcaggaggagcgcgccaccacctttccacttcacacccatggctagctggaagaagctagcaacaaagcaccgagatagtagtcgtacgccgtcgacaggtggtggtggggaatggcgttggaggaggcggaagcgggggtgcatttaagctcggcggagggcggcggcgggggggaggtggcgaggcgacgtgtccgccatgggctcatgcagcgagcccacgtcgcgcgcgggggaggggggagggtggtaggtgtgagttggcgggtagcggcggcgcgcggtgcaactgctacgcggcgggcgcgacgccgatcgggtcgttttttggggggggggagtaggtggagctcgtcggtttcttggccatgccatccatggcgaggggatggcgtgtacgaggatttggatgccggggaagggacgagctggcaagcatatatgcacgtggatatgggtgtggtggcagccatgggtctacgtggaagctgggggtgcatgcatgggccgggcaaaattgggctttatttcttgggtcaaaatgggccttatttgttggctggtaactgatctggtgtgctgcgctgggcttcgacgtgctccgttggatcagggctggtaacttgaagtggacacgccgtcttctacttcacctctcctcttttcttctcttccgttccctcatcttcgccatgtgggagatagccggcgacattgtcataggctcggtcgattcgagataggaggaggggggaaggggggggaggggggcagagcccacggggacccaaccggttgccgtggtcagcatgcactctggcacaatacctccatcgtccgattgctccttaaacgcgcaagcgcaaccccctcccttactggtttccacctctcttgcacggaggccaaggtagcacgagctcagacgagcttgctgaccgccttcccctccctggactaccctctatggcagcctagcgtggtagtagctcgcgcctagagtacctctcacgctcctccgtccacctccctcgcatggaggccgggcgagcttgagcttggatgggctcgccgaccacctctccattcctctcccgcctcggactccttcagccacccctcagggcgacagcccgcaccttgaccgcctcatctgtcgccgccttcgtgaatgcgctctccctacgtcttgcgcttcttcccgaccgcctccccatcaccagggtccaggagagaagaatgaagcaggcattgccacgtgggccccatggttttttatttatttttgctaactaggatgccacgtcagtaaaaccaaccacctatagtgtcataggacctaatttagtccagtttcgtaagttggggttaggattttagtattgtgtgtagggatatgatatttaaacttgatgaaagatgaggaaccttaagtatacttattacgattatcaacgatgagtcggcccttggattaggtgttctattttttggtttttgtgttgagaataatatggttgggttttcacgttggacacatctgggctttgaggttaaggttgcaatttcgagtaggaagttgaagcattttctgagttgaaaagtcaagtttgcaattttgagtagaaacgcgaatcatttgattcatttccgagttgaaaagttgagattgacaatctcaaagttcaaagtgaattcttttttttacacagttcaaagtgaattttggttaaaaccctcaggttgtatttggataatgggaaatatgtggtggaattgggattgggaaatgaacgaagggttaggattaaatggaagaaggagaataaatggttaaaatttaaagatgtcttttagtgggtgggaaatgatttccctttcccattagccaaacggggcctcagtatattttcaattaacagaagtttaatacttaataatttaaatgacagttcaatattttagccatgacacatggcatccaatgaaagggtcgtccactagaaataaaggtgacagacgatcactgaataggtacacccataccagccacctttctattgtctttgcacttggattgaaaagtggtcacaagggttaaaaccctgaatcattcggaaatgtttttgccacacaaatgagttccaaatacactgagtgacactacgggtcagtcactaaaatttctgaaatgttgttacctactcgtctctttgtccaaaaataaaccaaactcgtacggtgtgaatatatcttcaatgttacctacactgtacaaggttagcttattttgtaacggagggaacatacatctttcgataacattataattgttgtgccgccttggttcagttcaaatttctttttacaaaattccgcttgcatctttgtcccggcgcggcaaaaaaaaaatccacaataaaggtatcatataaaaacaatgatggcagttaatcagtttaggttggtcactatcttaatagatgcaaattaagttgggttgtagcgaaaccaacgaacggcatttgttttgtgctcccacgatacaatcccttaaatcagcacacacgcacaatgcatgcaccacattttagatcgatttcgtagagaatatttcgatcacatagccacaattaatctacattctagaagctccaacaaacttatttaattagttcctgcaaattaacatttacaaatatctcaaactgaagaaataactttaattgcaatgccggcagccaacccggcgtgtatgcttccatttgttcgatgtaaagtgctgtttatccataggaagagatgtaatattaataactactccatccgtttctaaatatttgacgtcattgactttttttaaatatgtttgaatgttcgtcttatttaaaaaaatttaagtaattattaattatttttctatcatttgatttattgttaaatatacttatatgtatacatatagttttacatatttcacaaaagtttttgaatatgacgaaaggttaaacatgtgctaaaaagtcaatggtatcaaatatttagaaacggagggagtatgtttgttgaaaatgttttaccttctctcaatcttaataaatttggtcagggcaggcacagaaaaaaaaaaacaggaagacataacagcaaaacaaaaacagtggaaattaagcattgctaattacaaacttttctgatcattcacaccattttcatgtttgatccagctcaaacttcactacaacagcttagaacactcttagctagcaaaagtcctaatcacagccattataaatagacacaagcaattagcctcatctacacacactcccatcactccaattaaccaaagctaattaagctagctcaagctctaatccacatttagctagaatggcgccgtccaagtccacagccgccgccggcgtcctcctcgtcctgctcgtcgcggcggcgggcggcggcgcaaatgcggcggcgacgacgtgcgtggcgtcgctgctggagctgagcccgtgcctgccgttcttcaaggacaaggcggcgacggcggcgccggaggggtgctgcgcggggctgtcgtccatcgtgaagggggaggcggtgtgcctgtgccacatcgtgaaccacaccctggagcgcgccatcggcgtcgacatccccgtcgaccgcgccttcgccctcctccgcgacgtctgccgcctctcgccgccggcggacatcatctccacctgcgccaacgagaaaggtaaaatcaatcaacgcgccgcnnccgtggcgtggcgtggcgtgtgcagaagtccaatgcagacggttttcgaatcatctaagttgactctacgtctgtaataatataacactcgtctccgtaaattaaattctcaatttctgaatttttgttttgccgcgcgctgggctccctctcttgtttaaaatccaagagataggcataggcccaatacaggggttaaaatttccgtccaaaacttccgaaaattccaaaatttgggaatttaggatcctcccctctcatgcaactatttcatacaaaattgttagatttttaaaaatatttatgaatctggttaaaattagttgaattcagtcaaaatgtgtttaaatttcaaaatgtttcgttcgaaatttctgaattttgatacacccgattttttttgtccattttggaagtacaaagcccggggccaaacgaatgtccaaatgatcaagtttaaaatctcagttctaactaggactttgtttatttatagatttatatgttttaaaagtgcaacgttgagtagtgctaattaactaatgtacatatcatgattgacttgtgtgtaggtggtgtgccgcctctctactcttgcccggctccatctgcctgaggtaaaccgtcgtcaaccacaaaattatttccacaaaagagcctataaccatgctaaatttctacagtaactactcatataattcagctgttttgtttatattttttttaggggagctgttttgtttataatgacaagtgctttttaattcatgcagtatatatgagaaaagaataaatgttaccaaaggagggatttcaacatatctaaaagtcaagatggagtaactttggtatacaagaccaacatatatatcacgttgttaaaggacaagtagatattggattattggcatatactgatatatccatgctaatattagtatatgtatattctgcaacatgcatggacatacacattgtcaaatgaagtactaagtaacacggaacgtgtactagctcgtgctactgtcgtgctatgcgctgtcaatagaaataaaatattttacattgtggtattaagcattaaagccatattgtattctaatattatcgggcggagattgcggattattcctaccacacttttaaataattacaatttctctaaaaaaaagttgctatgtcagtattttttacagcacttgtttatctctactattataaaaatttaagatgtttttgtcgaggcttttcgtacgtcaccgcgagatcgtgtcggacacaaaaaatcgcaaacttgccgatatagtttaatttttttccatctatcggaataaatcacgtcagaccctaagcccacttggtcgcgttctcccctttctttcaacagcctgtataggtgaggcttacagccgatacgagcagcggttcccgatttcccgcgagccacgcgctctcacacatcgattgtgattctaggacgagcctgacacagatcgttttttcttccaactccacctccaccaacaatatctcctttgtatgtacgtacgtatgcacccgctgccacgaatagatctatatagatcgagaagcagagagaattaaggtcttgatgggtgtggtaagaaggcaacggcagcgatggctggttgatggtgatggtgttcatgtcggtgaaggcgtggtaggatgtacgctgacgctctgcggttgcgatcgcatatattaacagggcggagctagaacgaaatggatggtggtgccacttacttaaattattctactctagatcgaatttaagctgatgcgggtgcctaagtttgtattgagaggatacatacatggtgaaaatagatgatctatagctaaaaaattttcttgaccgggttcctggacaccccctagtatactctagctccgcccctatatatatatatatatatatgaaggctagcatctggtgggtagagacaatggctgtgggctagcggcatcgatcaaaattaagatagtcgagcgcgtcatcacagccagtgccggcgcgacgcgacgcgaccgatcgacacgcctcatacgtcatcatcgccgtccgtcctcgatcgatgtcacccaggccacatcgtacgacggccactatacggtggcgggggccggcgaacacgacggagatgctttccatgcagtacggcttcgacgacccgctggagcggtttgatgatcgacctctctccttcacgtccgcgcgcgctgcttcaactcccgctgtcccgcaggccgcatatactccctctgttttaaaatatttgacaccattaaatttttaagtatgtgtttagctattcgtcttattcaaaaaatttaagaaattatttattcttttcatatcatttgattctcatgtacatatatagttttacatatttcataatttttttaataagacgaacggtcaaacatgtgctagaaagtcaacggtgtcaaacattttaaaacggagggagtaggatatatctacgtccgcgcgcttgtttcctgctcaacttccgcatgttatgttaggaccaggcctcgatcgccaagctccggctgcaggtccagcatggggccgcgtgcgttagtgtacaaccatatatcaattgtatttatcgacctttaccaaccatatatcaatttttattgggtgtagctatatttatggtgctatattttttataaaaaaatagtcggcatgtatttacattgtaagtccctaaattacatatgtaattttagtgtatttacaatgtaagtcttaaaattacatatgtaatgtaaatttgaaaattacatactaattacatatataagtgaggtgtaaatgaggtgtaactactgcgtaagtggctgaaaaaaagtcgactgtagcatatggcgccatatttctagcaactccgtataatatatagctcatgcatggaacccaatatatcttactactcatctgtgttgacagtacgtatttgccaaagtatcttttgtcggtcctgttttatcatgtgtttactagctgtttaattctttgacgggcacaaaactttaaaaacggaccatttaatatgcacaattaaaattgttttcacccgttgcaacgcacgagcatttatgctagtaatatataaaaatttaattcttccttataaactaaacgtcgggattttattttattatctaacaaactgatcgatccattcatcaagttttatctgtatttcatataagaagcaatccataattatcatattagattcccttctatcaactcagcatattgaagatctaatgtgaccatgcctacgacggatataaccattgatcatatcatatacccacaggtggtctcgtttcataacaagtgccaaattaatctaatcaagaatacgacactacctcataatgtatgcgtttatatgttcatgaccaatccacttatttggggctacatatggaagataaacacgatggccatggtgcatgcagagatggagatgaattgttgtttaattggaattattagaaatgattttaaaagcctagaagagaagatctaattttaaataataaattccaatataaaatggggccagataaaatttcattaaatactttgcttgattctatagttcctagagttttctgggatttatttgagccaaggaagtatttttaataaatggaattgcatttcatgaataatttaaattggaaaatattttaaaagtcctcttttggctttgggccgaaagtcggcccaaaaccttccctctctctcctctttggcctagtcagcccgcagccgcccgcgcgcgcgcgctcggtcgctgacaggtgggtcccacctgtcggactcgtcgtcctcctcgcaccgaaaccctagccgcgccgcgccgccgccacctttccaattcggccgcatctttcccgatccggtgaaatcgtttgaggggaaatgctccccggaatctcctctaccttttttccttttggaatcgatcgccaattcggtttggaaatccgtggattcgagttcgattcggatcgatctctctcctccgaaccctaaaccttccatcgcgtcgccggtcgccgtgggccttcgccgccgcctcctagcccctataaaaggacccccggtgtctccgttatccgtcgccaccctcgccattgcctgccgccgtctgtagcgccctagcaccgtgcagccgtgcgccgccgtcgccgccgtcgccgccgcagctccagccatgcgccgccgtcgctctggtcgtcgtcgctgctcgaggaggtcaccgtcgtggtcaccaagccgtcgtcgatctcgtccacccctccgtcgtcgccgtaggttgccggagcactgccgtcgtcgtcaagccgaaggtcgccgccgcttcttcctcgacgccgtcgccgtccgttgatcttccgccgctgttttggtcaccggtgagttcgccgcgtcgccctctacgtgttggtgtcctccgttcgtgtcgtcgcgccgtcgttcgccggcgagcttgtgcgcccgagccgccgccggtgatgacgtcatcgttgccgtccgtcgtagaccggtcgtagaccgttagatcttggccgtccgttgtggataggatcgatctcggccgttcgtttccgtgagccaccgccgtgcacccgatccaccgcgaaccctagccgctgacgcaataatacccttttccttttcaaaaataatgcattattgcgtcataattcaattaaaatccatataaatgatttaatctgatttaatcattgaaaattcataactaattcatcttagctcggatttagttggttcaagtctctaaatttttctaaaattgagatctacatgttaaaaatatccacatgtactgttcatgcttgtttatgtgctgttttggtgatttagctcttttctctttagattccgacgttcctggagagtctgagtttgcaggagaagattttgaagagttccaaggccagcaaggcaagtcacacagatcccaaacaaccttttgagcatgttgatcccatttaaagctattgtttctattcaactattgcatttattttcgaatgtcatggggtggaattaacctattgtttgttatagcctttttgttcttgattactttattccttgataccttgggttattataacttgactagttgggctttatatattggttcagctagatattagatatgattgcttagccatgcttagaaacattagcacactattgggataacttatgactcactattatttaatgatggcttaatgatagctcatgatggttaatcatgattggttaattaattaatttgccaactaaaacctgataatggtgggttgtgagcacatggttttgatggtcgtgctcatgacaattaaggaccggttcatgagtttcggttgtgagatattaaccgtgccaaccacaagccagcgtgggcaacagctttaccttttgtatagcatggttcattgcggggcaccagactgagaagtggcggagataagcccacgggggtcgctggggagtccatgccttgtttataagggggtgattatgatccaggaatggtgcgctgtggtggattgtgttgtgcgaggggtactgtcacagctcctttctgaggtaccgtggtggtattgaggcgcatggtgacatgttgtggggctgtgtcttgtgggtacagtggtacacctctgaccagagtaaaactattcgaatagccgtgcccgcggttatgggcgggtctaacaatgtctttcgtgattagtttcacacttctcaccataataaaagatgctataactggtaataatttgattagctcctggtttggaatggtatattcctggtttggagatagaactgtgcagccgggatagttgttcagaatggttgggcctatgcaacagggtatgttgtatagcgttggattaatattgtttaattactacttaactattttattaaattctgaaatgtttattaaatgctgtttatgcaaatgaaaccctactatgccatcctttgttatcctgtgcacttgcatatttgctgcatggcttgctgagtatgtcatatactcaccttgcaatcattcatcagaggaggagttctacagtgatgctgatggtgtggaggattaggtgtagccctggtcaagctgcctgtggagtggagtcgtctgcgccgtttatcttatttttccgctgcttagatctttattgattgagaggaactatctacctctgtaatgacattttattcgcttattaattagagtaataattgtactctattatcaatttgttattgtgtgcctcggctgattcctaaacgagggttcacacacatgtaagcgtttagaattttggatagaaattccgggcgtgacagcgttctggaatccaattcggcctcctaagatagtgctgaattcaaacggtcgccaaatctccatatggcctacgttttgggcccacgagtactttatggaaagctctcggaatcctctttccaacgaatccaacctcattgtcaaattccatccgagtcatcggcattgaaaaaacaaggggctgcattgtctgtaatgggcctataggtctgtaacttcgtctgggaccctggtccaaggggggctgtgccctaaacagagggaggacgcccttatgacctcctctatcctttaaatagctagtaaccccttcagggttagttgggttttgattaattgtaagtttagctattgctacttcgcttgtagcacgcgtgtcggctagaccgtccgtctgcttgttcggaaccccactttatcgtatatcaattcatctttgtgcgtcttgtctatctagcaattcagttgctttctatcttgttcttacttgttctcgattgcttgcaggaatagggttgatctgcaccagcaagatcaacaaactctcggagatgtgtattgatcgctaaggcacaacataacaacgtctcgtacggttgtagtcggatcgtcaatatttctcctaaatcgtagttatctcaactcaccgaaagatcaagccaccccatacatatcaagatcttaggccccctataatttttccgattcatttttggaaacaaatgcatttggatgccaccgaagagccgtgtttgtacttgaaaaaaactgatcaaacaactttgaattattctcgattctggaccgttcaaaactgattggacggcttagatcgctcaactacaccatacatacaaccactcgacctgtttggctaggaaacattcaagagtgccttctccagccaactcgacgagctccccgtccacctctttcgcgaatcgcgatggccacccctaactatacatcactctttctgttctaatataagtgtaacctagaccctttttagatcccatttcaaaatttttcaccctgtcacatcgaatgtttgaatacatgcatgaagtattaaatataggctaaaaaataactaattgcacagattgcgactaatttacgagacgaatcttttaagcataattgctcctgatttaacaatatggtgctacagtaaatatttgctaatgatggattaattagacttaataaatttttctcacggtttactaacggattctgtaatttttttttattagcgtcctaacaccccatatgtaatacaagtacctgagaagacagactaactacgattcggcaaggaaacctatgccgaattgcatctgaatacacacattttaacagaaggcaaaatgtggagcaatgcaagcccacgggttaacgggcctgccaaaatacaaccaagttaccagaatgtgcatccaccagccaagcaaatccaacggctgacaaaatcgactgatggattaaaatttgggatcacctgtatattttatcgacaaattttcttctaaaaatttaatagatataattataatataatcgtagtgtaattatattataacttaaatgtgaataccgtgtaacttgtatataagtttcacgtaattttgaatcgttagatcttttacaagatttgttctggtaagaaagaaaaaaaattacagtagagatatgtgagaggatttgttctcatgacctttattttaccgaaataacatgttacggagattacgaagagatatttaaaagttacatacaagttatattataattacactacgattatactttaatttacatatgtcaatttttttgagaaaatttatcgcaaaatatatagcaaaattgttaaaattttgcaggcgcttgcaaaatagaaaacctgagaaaaaaagaaagaaggaaacactcgcgtggctgcccacccgccgccgtcgccgacaacggcggcgcgaagccgcatcctctccgccgacgagcacgctggcccggagtcgtcgccgcttcaaccgccggccgtcctgtcctcggagatacggcagcgcgtggcggcccccggtggctgtgctacggcggccaaaatcgaccgccggatttcctgtgctccaccgcacggcggcctgacggtggctgcttctcctccgcgcacaaatccactcccgccccccaccatgcacggcggcagcgcttgacggtgagttctccacatgttttccttgctgacctcgattcggaatatggatccgtgtgagccagtatgattcagagtggattcccgggaacaagtctgatccggagtcggatttctcttttgaggacaacaaattccgtttcagttttccttgggtaacttcaggtatataccttgcgtctcttgcttcatcacatgttccaactctgcaagtattcaagcaggcgacgaatttcaccttgcaagaggggctcgatctgctccaattatccaatggcgccctgtagtactatagccaggattatgaacttaggggatctagcgagatgtcccaagaatttgtgcaacctactcttcagagtagtacaatccaagctcctagcgccccttcacagtagtttactgaaggaagtgcaaaaagatgatggtgatcagccatcaatggcagagagtgttgtggcaaatttaccagagctgtctcaggacatcttaatggagatatttgcctcctgagatccctgacctcgtgcgtgcaggatcggtctgtaactcctggctctcggcctacaacgaattgcgcagcctaggtatctataaactgtcccagacgccgtgcctgctatacacctctgaatctgctggcgatagcgtcgtgtgtctatatagtcttgcgaaaaagagggaggtcaagatttctctcccggagccacccatacgcagtaggtttctcattgggtcctcacttggttgtttaattacagctgatgacttatccgagatgcacctggccaatccgatcacagggaaacaaatagctctcccttctgttaccacaatggagcatgtgaatcccatcttcaatgagtctggtgctctccacaagtatgagttctcactgcacactgcaacgagggttagttatgcagagccatcaatttttgcccttggcgagctgcgggattacatatatagtaaggcttttgtgtttactgatactttcacagggggatgcattgtggttctgatccacgagccagctggtcaaatttcatttgcaagggttggggatgataagtggacatggcatccatcacactctcactattctgactgcatctacattgatggtctactgtatgcactgactgcacagggagaaatccatacacttgatctcagtggccccacgatcacgatgaagatgataattggaagtttgtcttacagtaggtacattgtgcaagctccatggggtggtcttctgctagtttggaggtcagttagcacattgaggaggattacgaggctgacttgcatgctgaccatgcaacatttgtgcggtatactagggaaattaaaatatatagtgttgatactatggggaaaaaacatgtagagatcaataacctggatggtcatgtgttgtttataggtaataaccaatcactttgtctcagcacggaacaatatccacatctcaagggaaaattatacctattttactgatgatgacgaagcttggttatttggattcaagaataagcgtcgtgatattggattatttgatttgaaacataacagcagagaggaactcgtgtctcctcagctttggtccaactttcccgctcctgtttggattacacctagtttcacaaagttgaacttcgcctagaagaagcacttttaagttttcttgtttatggatataatagttgtgtatatttcttcttgttctgtacaatttatatgtaaaattatgattggagaactgaaaggtgaatgagaaggttaggttgctccatatttgtttatttgtaccgacctttcttatgtttatttaaatttctaccgtcttaagggcaaacagcaggtcttgtgtgatagccactttctagggaattagtggaatatacaaggctaatgtgaccaatgttattagaaaatggcaaagctgtaagtgcttcttagagtctaaaataacttaactctgagactctgactgcaatcggcaggatgcctgggctaatttggagaagccttgtggaagcatgttttttagtatcttgaaggacaccatgtacttcatattttacaactacagggatagaagattgagaggtatggactgtgttctagctgccatctatttttattttgaattatgagagaccaagccttctgttccaacgtacttaattcattctagataacaatcgcagggtctgtctaggaaggattatgagaaggaattggagcttgcggacagtgagaaaacaaaaaagcttgaacagaagttgtttcgtggtctttaagattcactagtcctcaaggaggtaggttctcatagtctttccacgtcaagatccagtttgtgttcttttcaccatttgatcttgactaaattacgttttaactttacatgctgctaacgggcaaaaatctgtaatggggctagttttgattcctagcactaatacacttccgatttacttgcaatgatgttcaggtgcaaacactaactcatctcatgtacacatatgcaatcgatgtattagtttagtgctacgcatcatatctgcttgtgctagtgtgtgcccttgctaactgtagatggacccattccttaactgagaattagggcctgcataagatattatccattggctaaaccttatgctcaagcttcagttttcataggtaattttctaaacttctaaacaagttttatgcacattacactgtattggctaaaatcgaaccagcaacagcttataacttcagttattgtgcacccattgttccatgtttatcagtttaaataacacatcccagattattctcctgttctctgagcgaaagtccttttttgcagaaaggagttaaggatggaccatcttagcttgtttcatcaagcatgattttgctcttgtttcatcgtggcagagcgcatgtgctcttatcaaatatggcaactagaattatgttaaggtcttaaggaggtgaggagagtaatgtaagtccaggggacgttgaaggagaaaggatgcagttggatggagctgaatggcagtgttcaccattttgcagctggagctggaaaacattcaggaaatgatagcatccttctgaagcttgatgagataattgcaaaaataaaggtgtttgactatgctcctaaggttaccaatgcttcggctgatttgttttgtgtaaggaaaatatcagagaagctgtctggcgtctgctgttcattgggaagcttgcccctttcatttagactggtcagttgagaaagttttgcttcaactgcaaagactagaagggtgtttgagggctgagattcttccgtgaagtctatggaatttgtacaaaatacaggttaattgccttgccaattgaaacccaccatgctgaaaaatgatcaacacagtcgattcatgacgagtgctacttgcgtgcatttgatgcgatggtcgtccaaaagaaaaaagatcttgtgtgccagggcagaacagaacaagctgggcgggtgtgccctatcatctccaactccaaaattctgaacaagcagaacaagcagggcgtggcgggggtactcaaactcaaataaattctgatggtgtgtaatatacacattgtgtatattctatattctgttctgtgacttccattcagccatgttgctacaatcttggttgttgccaaatgatgcttagttggtgctttatttctcatacagatggaggcggttcctcaaacgtgaactgccacgtgacatggtcactaacaggtgggcccgtgagcagtggggcccacatgttagtcaccacgtccctctgacttcacgtcagaggatcccattcccatacagatattaaggctactactggaatgtgcaaacatatttatgctgagatactaatcagtaatcactttagtcacacgcgcatgtcattcaacacatttagagtacgcaatcaaatcaaattatgatattatgattaaggggttacagatatcggtgttaacataagaatagtaagcaaggaactaatccaatagttagcaaggaaccaatccaaaaacatgccgaactttcagttgatcactctacccaccaacccgcaggctggacgtgggagaagtggacgtgtagctctaactcacggggagagcttactatcaccccgcaattcctctgattacatgggatccgatctgctttagggtgcttcctatgccagtggagcaacatctgaaatgcaaatcagcaagcataattagttcttccgaaaacaaatgcagcaatgtaatgttaaaggaaaattaaagcaccgccattcctctctagcagacagattttttgtgacataattttgaaagtagcagtagtggcaa

SEQ ID NO: 8324 - DNA, 2840 bp, Oryza sativa
tcgtatgcctccaccatgcgcgccaagtgcacgatggtagcgtcatcctccgagctagcgtcccggaaggtggcgtggtcgcgggctcctccgcgacgagggtggtagcagtagggcgagtgctgcaactcgtccgggtagcgctggtgaagagtgccgatggcgaggagagcggcgctctggcaggcggcggggaaggagtctccacccgcggtgactgtcagcgaagtccgctcgggagagccagcgaggatcactgcagtgacctcccaagcagcgtggggctccgcatcgtcaccctcctgctccggaagcggcctggcctggtagtccactccatgtggataccccaggaccacgcacatgccccgcagctccaagacgaaaccagtcatgtccaaaccacgacgggtgacgctgccggccatctacaaacaaaaacaaaaagaaaagcaacattttaaaggtcagattttggcgataaatgaagcagcaagacagagagagactagagggttttcacaaataagaaggggtttttatttcgaaaatattgctaaggcttgggatctacggctcgtcctagggtcaagggggctttgataccaacttgtcacgaccggaaataacccaacgggcattccttacgtgcgtgcattaatccttgtcccaggaggcaaggtacaccaaaagttgatacaattcagagtttaacaagcggaagcgtaaatagataattattacatgggcagcgaaggcccagcacacacacaaagaccaacgagaaacagcggaagactagggcgacgaccacaggcacttgacggcaggcacgagctagacaccgaagccttcatcttccaggaactcctcttctggggttgggaaaaattgagcaagactgagtacaaccaccgtactcaacaagacacacccacaagtgcagaattaatgcaaggtagtacatagaggttatactgtgagggttagggttgcaggaatcagcatttaaagacatttagttgctcagggctattttgcatacacgattctagaactaaacaatattatttatcaaggccgtgaacccacacgaacctgccttaacccaaggcctacgatgagtcagaccgaactggcaacccgaccctgggtcccagctcgtcccaagccaacccaggccaacaattccacatttagttgttaagcaggttttaagattaaaacactaacttgggtacattgctcggcttgcccataaccgagggcgcggctattcgaataggttatactctgatcagaggtgtacatctttacccacaagacacatcttcctcacgtgtaaccacgtgccacataccaccacggtatacagacggaagacgtgacatagtttccaacccatcctagccatagacaagagtaccgacccaatcccacctacggccggaacccccgggacaggtaggcaggactgagcccctagcagcaggacaccggccctgtgccatgacatctcgactaccgggccgcagctcgtgtagccttcatttgtcctagagatgtccatcgacccccgacttcgtccatctccatccgtgtacttttgtttataaccagactgagccacaaactaagccttacccactagacatgtggaagtacggtagtgctttgcaacagaggcccgaagaccggtccttatatggccgaggtgctactatcaaaaccatgcaccccgagcccagcctaaaaccattttggggattttgaaaagaggggaggtgtgaatccaattccacagaaatccaacaattccagtgtgtccaggtgatgagaatattcccaaagtctagagttgtaaaatcacctaatgttacctaattaaacagcgaagcatctacctaaaatcatactagtggtaccatgagtagagtgtccactagttggggttttgtttaatctagggtgaacaaggtaataataacaataacaataataataaggtcataacaaaggtaaataggcatggctagataaaacagtgatagcgcgggaatttaaataaagcgataatgcaataatttaaagcaacataattttataaactgggattcaatatgttcaaggatgatgtgacttgccttgctcgctttcccaaacgtcggcttcaacttccacgaagagcggatcttccgaagctgcagcgtctacacgaccaacggaaaagaaaaggattttactctaataaactccatataaccagtaggaacaaagcacaaaaatgggttcttgacttcttaaggaaaaattagagacttgaacggtccaattccgagttcaaatggccaagttatggccatttgaagtttatatgctctttaaatgaatatttgcgaatttcttcatttaaattttaatttaaaaaatggatttattgcgtcagccgaggagaggggcgcgcggaccgggtccacgggggtggggcccacgcggcagccccacggtccacggtggaccgggcgcacccgggctcacaccggccggcgccgtgggtcccacgcgtcagccgcacctaagggcgcgggcggctgacagccgggccccacgcggcagccgctcggtgcgcccgaaggcgaccacgccggtgcggccggcgggaggcggcgcgcccgcgcccctatggtcgccggcggcggccataggcacggcggagcggcggccgggagaggggtgtcgcgtcccaaatcgactctaaaatacatcctcaaaattatgccgagaataattaaaatccatgtgaaagcctccaacaattaaatatgcaaatttaaagtcaa

SEQ ID NO: 8325 - DNA, 11468 bp, Oryza sativa
  unsure (1)..(11468): unsure at all n locations
actgcatgatttcatctattgcaattggtcagatgacccaaaatagcatgtttcagtacaattaaattagaacttaaggccacacaatctaatgcaaaaaggacctgccgacaaatcatcacgacgagcgggacttggctaatttcaccatgagatgctccaggaatcatacatgtgtaaagagaaggtgcctaaatcaaatcaaggtaaattaggaggtggggatttgcaacaaatcttcttatagggggcatctaaaacctagagtgatatttggggtggtttttgcaattttcaatggcaataaaacggagaggcaacgagcgagccgtagaggagtacattaattatgttcaagaaagtagaaaatgaactcagacaataattatgttcaagttttaaaattccaatgacaataaagagaagactcatcaggcgggccgtagaggagtatagtgacaacgtttgacatgattttttctttaaaaaatataaaaacgaaacccaatgagacaataaactccaaaaactacaagatccaatttttaaaggttttaatgacaatgaatagaagcagtggtagatcgacaaaaaaaaaataagagtaaattccctgtgtacccctaaaaactcactcaatccctttcgtacccctgaaatttacccgatctcttctatacccctgaaatttcaacttgatcccttccatgcccctaccgttacattttccattatttcactattacatttggttgcaaatgtcttttttgcccttgatgctataggtttgaatataagcttaaaagcgattgaaaattttgtttgagtgcacagtacgtgcattttatgaaaaaaatgagactaaataattagtgcagaaaattttgacataaattttggaaataaaaaaggtaataaattaaaatttttatttgaaattttaataggacaatgatttttttttgatcgggagcattcataaaaaaattattatgaaaattggttgtcctatctttgtatgaatgatcctcttttttttttacttattttaaaaataaatacacaattttttatttcattatctaaaaatattttttgggataaataatgcatcgcacaacaaactcatagctataatagtttcgtgtgagaagcttttacatttttaacaatgtaattcatccaaagggtaaaatggtcatttttatagaaattagacggtcaactaacaatcaactgacgggaggggtatggaagggatcaaaatcaaattttaggggtatataaggaagtaagcaaaattcaggggcatagaagggattagttaaaatttcaagggtatacaagggattttctataaaattaaatgaggggtgacaaaaaagaaagtaagaggtaacaaccgatgtgacttttaaaaattataaaattagaaacatggggatgataaggctttgtttttcaaaatctttagattacgagatagctatttaacaatatttaagtaaaatcatattaataaatagatatttcctccgtttcacaatataagtcattctagcatttcccatattcatattgatgttaatgaatctaaatagatatatctatttagattcattatatctatctaaattcattaacatcaatatggacgtgggaaatgctaaaatgacttacattatgaaacagagggagtaattttgtatgggtgctagcagcgcaattgcgcgagccacccatctagtttttcttatataaagttagatgcagaatttaattatcttgtaaaaaggtaattatcttgtattatatattactgtaaagaatataatttaattccactacctctatttctaaaaaaaaatcattgtatcttaaaaaagatctgttggtgttcggtctcagcgtctatagcgtgaacaatcgcgcagtgggcttttttcgacttttgggctagcaagatcacacacaacacgcacatcacgaaccggaccaaacctccgccgccgcccgccgccgccgccgccgcctacacaaccccccctcgccccccgccgcgccctcctctccgtacgtggagcgcatgcaaatcccctcgcgctcgattcttcgcctcctccgacgccccatcgtcgcgccttattctgccctgcggcaccgcatctcgatcccctcccgcgatctctcctctcctccatggctacctctggtccggctcgcgggtggctaccggcgcttgcgcgaagaatcgcttcagtcacggggacgcttaaccctcctgccagtcgtgtttctcggtgtgttctcctgctctgatcctaaagtttgggcctttcgtctcttgctaaagttctcgatatagattctgttgaatttagttttttttttgttagaactatttgttcttatatcatgttggtgttttgagtataactagggaaattatttcaatcccgactgatggcacttgaatcggacgcaaagatttacccttttatgctctttgttcatagatttcctggatctcggaacatggccagcggcagtggagtggaaggcgagggattgggtataccatacaggcgccgcttcatcccatttgccaacgatcctatccacacaaccaaagataatatcatttctatggacaagcaccttcccatcacccaaggcaaggacagtgctgcaactaaggagttcatctcttgttatggccattgccgtcctaccacgtatggcgatgaagatgcttctaggacagctgtggaggtcaccggtggtaaacaagatccaaggggggcagttcagaacctaatagatggtgaagtggcagttcaggagctaatagatggtgaagaaattgcaaggaaccaaagggccagtgaggttagtgacaacgatggatatgaagagttcaatgatcgtgctgttaactaccactgtgactgtcatgtttggacgccacttattgcaagcagccaccgtgacggttctatatacgataccaggggcacctttggatctgggtggaaatgggattatcgtattgcagatcgtaacgagagtaagtgatatatatctattttcctgttgttatctattttataattaggacatttgtcaagctataggttcagctaatatattctatgttgaaaggttagtgtgcattatattttgtacttaaaatgataaattaaactactaaaaccgggtcacttcacccctgctttaaattgagattttgtaccataatatgacactccactctatgtcatgaatactttcgcaatttctcatgattatctgcatacattatcacatcccaagggtttgtgtccaggaggaaggtggcagcaatgctgccacttatgcaaccctagggtgccaaccagtcctatggctgctggggcccaccatgtggccatctgacctacatgccctgaacaacaaacaagacgagaaattctgtctattattaagagtctggagtctagtagactaggaagttatcaattaaatagaaatatatctcccatttaagttaagggtggcataatagatgatatttatatcaaaccacagctctaagtatcggaagaactttttatttgccactacagagtgtcctattctgggatacgccattggaaaatatcttatacggtctatggcatccacctcacaaatttcacccttatttgcaattgttgaccagtcaagacatgggaaaggtgtaaaattaggatgcctcatccacctcctaggtgatcattcccatgatggccatgatctaactggtgatgcctcctcgatggcactattgaacagaggcagcattctaccatgaccacaatcgatgaagtgtcacagaataaattgcagactttgtgcttgagggggacaattgtggaccagtggaacagagccccctcaactccaaaccatggtggtttgttcccttgtttgggacctgatgttcttttctttttcccctttttttttattttcttctgtcagtctgaattggttactagaaattacattggacagaaggtgttttttttttttgccttatattgtcccacatgaagtgatctggttttagtaattaggtgggggagtgaaatgagacgggaattatctagacaaccaaaaagctttagtcattagaatggactttctacctttatttttattgtaccatgcatgtattttatctactctttaagtttccgttacaatttggcatgtcatctttgttgtagctcggttggaggcaatgatgttatcacatcccacgaaagattgctacatgagggatggaacttgcatatggcatcctgcaaatagcatgttgcaaattttctcagtaaagttggctaaaactcctgtagttgatggctcaattgaattgtatggatacattgctgtgcgggaccttcaggatccattacttaattatatagtcaaaattggcagggatgatcccatcattgtggagcaggtatgcttccatgctctctacaattatttcaaattactttatttgtttcacattataagatcaaacttacagcatgcatggaacaaatgtgattagagcttacccaacattaaccttaacactaaaccgtccttcacccatggttagccaattttgtgctaaatggtcatttaaacagaaacggctaaccaccatgtggcgtttaaacaggctaaatgaccattcaggtgaacaatgaggttaccttttgttgttactccctccgatttcattttaattgacgttttggacaatgacacggtctacaaaatatatctttgaccttatttttctattataatatatgcaataaataaatgcatgtttacttttattatagtgctttgaaagataaatctatatatgttgtcctagttttctttaaactagatattttaaaagttattgatggtcaaagttataaaagttcgatctcaaccttgtccaacacgtcaattattttatagagccggagggagtattttacagccacaaaatatcttttacattactgaatttaggatagagtggaaatggtgtattaggctcagtttgatagtgtaggctcagtttgcaatctttttttcttaaaaagaaatgaaatagtagtagtctatggtttccgccatatttctcatgtgaatgttttcttttcttaacagaaacaggctgctactatgattttcattgtcccaccatgatctaacggcttagtttttttttctttgataatgtggtaattttttttctgaacagaaacatgccgctactatgattttcattgtcccaccatgatctaacagcttagtttttttttctttgataatgtggtaatttgtaggtcttcaaagtgaacatagtgcctctttttcaagctttctttatagtataatagatacataacatacgtgcccgaaaaggcagctaaaatattatagtgttatagctgcaaaaaatttgcttccataaacacatgtctggacagtgaggaaggtgagttgggatgcgattagtgtgtccaaaagtaacaaaataatattatggattgataagacctttatcaagtactatattgtggaatgataattatgatcagacctgtattaatcatgaactaggtgcaagtgagtgtacgtgttgcaaacagaatcaaatagaatagtttcgaaccctttggttcctgcctagtaccacataaaattgttctttttttggttgtctacagacatatgaatgacccttcacaacaaagtccttttttgtttacatttcacacaagcttatatgattaatattttggaattcaaaattaactcaaataaatagcgtgggacaaaccttctctaacattcttgcacacattgtaaccgttctgtttgacacatgacgaatatcttgggcatcaactgtaaaatgatccgtttagctaggcattattgtgactaaaacgttaatattttcttagttacttactttgctatgaagagctactaaatattaatatttttttagggttccctcatcgaaatgactggccctaagcgagggatcgacttttcttgtgctgttctagttgaatatgacatgagaatcaagacaggagaacgagaggaagatgatctacaactgattgatggtgcaacagatcttgaccatatattgacatcacatgtaccagtgagaaatcgcatttatggagattgcggcgcagttgacataactcaagcgaatcttttgtatgcatttgaggcgactgtagaagtcgtcatatcagaagtgcagactagttttgatttgtgtctcagctgttttaccagtgggttacatgaggaaattcggctctttgatggtgcgatcagtgagtcacgtgacttgaggaggtatgtgattgctgtcatggaacatgagtgtatggatttgaagttcaaggtaggtttagggtctgggtgtttcgctgaacattgtcgatccttcaaagcaactaatcatggatgtgccagtgaacaaataaagattgagttcgcctcaatctcggtgaaggtcacttggtcggctatggagttctagaagggtacttagcgtttggacattttttttttatttgttactccctcagttctatattgtaagactttctagcatgttcatattcatctagatagatagatagtgtgaagctagtgttgctagtgttgagtgtaggcatgtgtgtgtttcagcccaacagggcccattacaccaatgcatatgtatagtagaagagagaggaaatagtgtgaagcttctggagaaaaacaatcacctagcaacatggtatcagagggcgaccgcgtcgaggctaaaccctagctagcggcgcgccggtttgtggtgctgcagcttggagcaacggagtggtggcgttgacagcggagacggcgacagctgctacagaggatctcgacgcagccggcgtgaaggagggagcagggtgtgcgctcgctggttgagccgcgcaaggggaggacgcacggcgggtgagaggcgcactgtacgagctgcgtctagacttggctgtggtagtgttcccgaccattatgggtctagacttggctatggatacaaaagcacaagctaccgtcatctcggaaatgcatgccaactgtttagagttgagccatggagccatggtgtccatactagcaatcctgatgtcttgtcaataccaatatctaaaatggccagtgtcaaggctgctaacaacatcaccatcgaaccagtggttcagtatgttgataaagagctggacaaggcatccaatagggataaaggggccaaaggaacagaggtatggtggtggctgatcatttccaactgtggccatctctcttatcagcttannattngtgaatggtttctcaacactgcacgcagcaaaccaaatgngcncactcgccttactcaagcaggagacattggttgtcaagttgcgctgcgacgagtgctagggtcatcatccaaatgcagccaaggtgacttaatgccggtgacaccaccaaggccactgacaataggaaaattgcataactcgaggagccgttctgctggaaacacaactgaagccgtacaatcaattattgagtctcatgcaatatctttacactgtagaatttccaagtcaatgtgcattgcacttaattttgttgagagctggctacaaaacacagccaagaaattatgcaatggccagttgcttaacctttcagttgggatacattttgacgacagaaagatttctactacattgttttttgctgagttgcttgagcacccaataatatattttcaggtttacttaactgcttttcactgtgttcattcgaacaaaatcctgagaccatggattattgctagagctgctaatgagaagcagaacaggaaggtcaagagatgtggttatgattccattgttggttttgatggaaacaatcctattgatgccagtattgcagtaaaggtttccattgatgtgattggtacttggacagattcagagacgctatatgcataagttgcaaacaaggattatttgtctgttaaattacttgagctggtaagaaaggggtccaatacatactggttattagaactcataactaatgagctgaatccttggtgtttactcagatatcagagatggctagaaattctggggctcccacctttgactagggctgcgtggacaggacaagggaagatagaacaggacattagtgtggacataatttcagcatctcaagttatcaagtctctctgtctgaacaagtcatctattaggagctactcaagttattttctcctgatacatgctttggtcagtaaattgagagcttgggaagcattggtggaaaagcatgtgcatcgtatgcactccaaagataacaaaagtactccctccgtctcaaaaaagacaaaccctggtttccgtgtccaacgtttaaccattcgtcttatttagaaaaattatgaaaaaaatttaaaaagataagtcatgcataaagtattaatcatattttatcatctaacaacaataaaaatactaattataaaaaaaatttatataagacggacagtcaaacgttgacacgggaacccacggtttgccttttttttttttaaggacggagggagtattgttgatgccttgggatccaggaggtttccatcagcttggggacaagctgaattttatgggggagggaatgttaggatcctgcctccttccatgggcctgtcaggtcaaatgcatatgggcctagccaaccatccacccccgccaaagcacaagcaagcaggtagaaggtataaaaagaaacagatacttcacattggaggcatggtgggatcaattggcgagctgaggctcacgacggcgacctaggcggccggtggcacccttgtcgatctcttctctttctcctcttcttccttgagttactagcaacttgtatcccctattttcttcctttgtttcaccaaatacttgcaagtggtaacaatctggttgctaattgaattggagcaaagggtgctaacaccacgtcagcgggccccacgaccacccgaacgccgccgagaagacacacgtcagcgccagcaccgccacggagtagcgcctcgccatcgccgactcgccgtcccgcccgatctgcgaccccatgatccacgccaccgcgacctggcaggcgatcatcacgtacgaggccgctggtcaagaacagtacccggcggccgtaccggtccaccgtggcgatggagacgagggtggagccgaggttgacggcgcccatctcagcgacgcgttgtttcggtgcacgtgtgctgcaaagtcggatggtcacgcccggtagtggtgggccggttcatgcgatgtattgcgtgaatttgggatcggtttgatcgatctgctgcccggaaaagagctatttcgggaggatttttagtggttttgctacggacctgcaggttggtgaagccaatgccgaagccgagcagcatgctgtcgacgatgagcatggcgatgttgaccgcagcggcgttgacggcggcgccggcgaagaaaagcgccgcacccgcgagcatgacggcctgcctcccgaccgccctggtgacgcggccagcccggccaggtacagcgacgacgtgaacgccgtcagcacgtggctgtcgtagacgcagtactcgtcccgccgtgccgccgccatccgccggagcacccccgggatgaaggccccactccatcgccgtcactccccctgaccacatcatctccctcacagacgacggtatatataatacaagtgatgaatgtcgtttgcagccacgtgtaagtgtaacgacgtatcgattttgctatttatttgtcgacaaattttttcccaaaaatttgacagatataattacagtataatcgtagtataattacactgaaacttgcatgtaattacagtgtaacttgtatgtaactttcaaaaatctctccgtaacatgttatttcggtaaaatggaggtcgcgggaacaaattctttcacatatgtgtgtgctatgatttgttttcttcctcaccaaaacaaatcttgtaatagatctaacgatttaaaattatgtgaaacttatatataagttacatgcaagttacagtgtaattacatataagttacagtgtaattacactatgattgtactataattacatctgtcacatttttgagaaaaaatttgtcgacaaatgtataggtagtcccacgacgtatacgtaccggagatgccgatgtcgtagccgaagatgaggccgccggccggaggcggccatgaggcaggtgaccacgacggagaaggttatgccgccgcccatggggaacccacctccagccatatcgcgcaacggccggccttgtttggcacgcaatagccgcgcgctcactcgcgcactagttggttgggctggtagctagctatacgatagcaaaggccgatcgatcggggtgtctggtttttgtatatatccaaatccacggccacgtgcgggaggacttgtgttagttaattattaagcgcacggagcaatcgcgtgccaaaccatatattggaaattaactcgttcggctgctcttgctttatcaactcgttttgttttctttttcgttttgttggggcggaattattcagtcgtattcttgaagaggccctacgtacaaactaaacgtactccagattccagaagatcctcagtcctcactggcagactggcaggcacgctgctactcagattgcgatgggtttcacgggtggggtggttgttgaggatcgaatggttcaactgcaccgctgcatgcctgtggtgcagagtgccgttttgcatgccggcgcggcgtggcttcgtttagttctgaatctgagagatatgcgcgagttaatggcctaatgtgtaatgccatgtaccaaggcatacatacatacattgtacgtgtttgtgtctgtcagccaaaagttggctgatgacagacgcccatctagctcttgtcagggggcttggttttgctctcccttgatcagcctgtcatcacaccggcgggctgacgcatcacgcacgtaacaatttattgcactatctcgcggttagccgaaacaccacagcggtacaggcttgccacgacagctaccacagtttgttgtgcgtgaaggctgatgttcagtaaaaaaagttggtccgtcttgtactcttgtatcatgtatatgggcatgttgaattgtgtgtgatgtatcactgtaccttgcacagtgcgcaccaacctcccgagaagaaggggagtgccggaacaaagctgaaagagaaagcatggtaggaggaatgtcatagtgggccatcagaaaagcgtg

SEQ ID NO: 8326 - DNA, 4086 bp, Oryza sativa
  unsure (1)..(4086): unsure at all n locations
gtacttgttccggcgggccggcggcattcggcggaacacccccgggaaaaaaggccgccagaaccaattccttggccgtacttccccttgaccttcaatattaaccaagaccagactgggttaaaaaaatggatgcgtttttttgcagcgcgtgcaattgtaacggccggcgtacttccttcccgaaaatgccaatgtcgtacccaaagataaggccgccggaggcggccatgaggcaggtgacgacgacggaaaaggttatgccgccgccatagtcgcccggcgggcgccgccggccacggggaacccacctccagccatcgctcaacggcacgccgtggcacgcaatagccgcgcgctcactcgcgcagttgttggtgttggttggactggtagctagctactacaatagcaaaggccgatcgatcatggtgtccggtgtttgtatatccacggccacgtacgggaggacttgtgttaggtaagcgcgcggagcaatcgcgtattcgcgtgccaaactatattggaaattaactcgttcggctgctcttgctttatcaactcgtttcgttttcttttcgtttttgttggggcggaattattcagtcgtattcttgaagaggccctacgtacaaagtacaaactaaacgtactcgagaagatcctcactggcaggcgcgctgctactattgcgatgtgtttcatgggttggtagctatgttgttgtggatatcgaatggctcaactgcaccgctgcaggcctgtggcttcgtttagttctgaatctgagttaatggcctaatgtgtgatatcatatgtaccaaggcatacatacatacattgtgtttgtggttggctgatagccagactcccatctagctttcgtcagaaggcttggtttgctctcccccttcagcctgtcatcacagcggcggcctgacgcacgtaaacaatttgttgcactatctcgcggttagccgaaacaccacggccctcaggctcgccacgacagctaccacagtttgagtagtttgttgttgtgagtgaaggctgagatttttcacgtcaacttggtccgtcttgtactcctgtgtgggcatgttgagttgtgtgcgatgtccaccaactaccatgaacgcctgcacagtgcgcacaaacctcccgagaagaaggggagtaacgaaaacaactcgccggaacaaagctgaaagagaatgcatggtaggaggaatgtcatagtgggccatcagaaaatcgtgcatatgggctagtttcgctggacctacaaagaaagaagacgcaccaaccaacgggtttggcaaccggaataaggttatttcaaatcccttaactttaccaacgaannnncaggtggtctttgaccacaaaacttgaatcaacgggtctctcatatgttaaaaccggtacaatataagtcccaagatagtatggcaagaggttttattctacgtggtaatttgacccaagtcaacaacactgagtcagcgtaggctccacatgtccgtggctcttcatctctctctctctctctccaatctcaacggattgttggaggacggcgcccgtcgatttagagtgcgaagcaggaggcctagccgaacatatcggtgaagggctacgacatcatcaatgggatcaagacggagctatagaagatgtgcccagaggtggtgtcgtgcacggatatcgaggcgctcagcacgcgagacaccgtgcacctcgctggggtgcccaattacaccatgcgcctgtgcgcaccaatcgccgtctccaaccacgaggatgacgacggcctccctgggcggacatcgttgtgggccatggaggaaaggatggcggctgatgaggcgaagacggctgctacagtgtcacgccccggactagtaccgaccggaactagcccgtgacgctccaaattaacctgttaatcgataccagtcccaggaaatagtgctggtatcacaggaagacggattatcacagcaacagaggtctctttattatagagtagaggtacagtcatgttgggctacggacagatcccgagctcacaactgcattacaaaagggaaacggaagccaggacttggaccaaacaacacaggcgcgacttgggaactaggccgaaaccctaaaactcatcgtagccggcttgctcctggaagaactcctcatcagcaggatccgcttcatcttcttcagcaactggggggggattatttatatagagcaagggtgagtacggaagtactcagcaagccatgggaaataagtgtttaatgcaggcttcaaggaaaggctgttgtttttgcaattgattttatttgaactcttttctgaaaacaactaagtgagtgcttctcaaacgacacggttgagacagtgcatctcgtccggtcggagtatgtgcaatgtatcagtctttttgaattgattcaaggttggcacccggccaacaactttcaaacggccacccgggcctacaatttcaaacggccacccgggctagctgatcccgtcagctgcagattttccaaacatcgaacccctttccacaacagcaatttcacaagcagtagtcaaacaaaactacgctaggaatcacctcacatccgctcatgaccgtgggcacggctgttcgaacagtttgttaacctctgcagagggggtacactttacccacacgacattactaacccggatcacccagcccgtggggatcagccacgtcgggagacctccaagctttcatgacaaggcatttcgaaagccgacacaggtttaccatatgctgacgagaggggtcccagaccaacaacaggttaggtcccagaccatactgtgccaggaagcccaggggtcctccccgacaccaccccggcgaatccacatgtctctcggcatcaaggctcccctgataagctagttactcagccaggggtgtcccattccacccatgtggtcgtacttgtcttatgttcggatgaaattccaaggaaacggtccttaagtgcaagagcgggaaaccgtatacccggtacgttccccggtccgcggttctggaaaatccatttagttcgcaagcaccgacccaggtgtcgggttttccaagtcttttgtaaaacccaagttttacccaagttgtttttcagattttaagtttgaaggcgaccgtcgatactcgtgcagagtgcacgatctccgaggcgcaactgggtggttacaagggaacatggtataacaattatcaagggaaggatcaaatgcaacaaactaggtaggtctgccaatctgccttgcagacgggacaaacagattaagtgcgatcctatcaatgcataatatttttcaggcaacataattaaattcaaatataggctcaagatgttcaaaggtggcttgccttgctcgagatcttgagcttgatcctcgaaatcctcgcactgcgggttttcgggctccgaaactacacgcgaaacaggacaactcaacaaactgcaaaaataaagccctattaaagacctctaagcgtgccattagatagatctcgagatttgaggaattttggaagttgaacggagtcaaacggatttacggttgggaagatattgaatttctaagattattggattttaggtctaaaggaaaaaggatttaattaaatcctttttgaaaaagaaaagaaaagaaaagaaaagagggagggaaaatagacttttcctcgggcggctagggcgcggcccgagagaaatggagcgttccggccgagctaaatgggccggccggcccaaggcgcgcgcgcgcggtaggggaggagagagagagccggtggaccgggctcaccacgcgtggtcccgggtgggacccgcttgtcggtgacacggttcaccgtgcggagcgagcacgcggcgcatgcgcgcgggcgggggagggacgcggtgcacgcgcgtggttcgcggaggaacggatgcggcgggcccacgcgcagcctcatggctcgcggtggaacgcgcgcacgggaggggctgaccggggtcggcccgacccgatctcggccgagctggc

SEQ ID NO: 8327 - DNA, 6578 bp, Oryza sativa
aatttcgcaatttaggttttttttaagagataattttcccgctaggcgccacgacgaacgggcgctacatacagccaccgaggggggaagccaaccaggacgccaccaccaacgatgcacccaacaacatgccacttatattgttcgatgaaaaccaagcggcagctagtggcgccgctggcaatgaggcggcggcggaggtgaccaaaacgtccaagaagaagaaggccagcggcgccgagcgagtgaccgcaaaagtacttgccggcaaggcggcgcgacaaagaaggcgaggggctgagggtgatgggcgaacaatcattcagcatggccggcgccggcgccggcagcgagcaggcaacaaagtcgatggtgatgaagagccaatgctttagcatggcgggccagccgtaacattagacgaagaagatgatgatgatgctgttgtgaggaggacagtgtcaggctgaggagaagacccctcctcgcatctccaggtcggcgtactctgcccttttccccgctagccactactcgtcgtgctgcccttccggccgccgctgcatggatctaaccgccaggtcgccgcattggggaggaggagatagggagactggggaggaggagaaggaggagacgtagcgtcccactgtaaatagtttatttttaatataacagtcacttatatgtgggttctaggtttttcttttgactttaattgctacgtcaacgccaagtaagccaaaaccatcatccaaaccgtcttgggtgaaaagaaactaatctaggttaacgtcgttgatacgacgatccgtgttaattagcgcactcaaacgtgcggcagtaatatatatagctgtgcgcacaggtagaggaaaaccgaatccctatttgcatgtaacaacaacaaccttatctctatctagttcggttttcctcttatcctgtttacacgtgattacattatctctaacactccccctcaatctaaactagtgatgttgagattgctcttgaagtcttcaaacggtcgcacagccaaagctttagtgaaaccatctgctacttgatccttggaagaaatatattctatctcaagtaatcttctagatacacgttctcgaacaaaatgataatcaacttctatatgtttagtacgagcatgaaaaacaggattagctgataaatacttagctcctatgttgtcacaccacattttcgcagccttaggagcatttattgcaatctcacataggagagtatgtaaccacataatctctgctgttgcatcagctagtgccttgtattctgcttcagtacttgacctggatactgcggcttgctttctagcactccatgacacaaggttagagcctagaaaaacagcaaatccaccagttgaacgtctgtgtcgcgtcccaaaacgactctaaaatacatcctcgaaattatgcctagaataattaaaatccgtgtgaaagcctccaacaattaaaatgtgcaaagttaaaagtcaaataaggcttggaggatttttgtatatttcctaaaagcctaaaatacgtaaataaattttagtggaattttcagagcacaaacaataattattaagaaataaacaaagttaaaatgattttataaaaagaaaagctctaaaaagtcttttttcccccctccccctcttgggccggttcggcccatctctctccctctctctcctcttccccgcggcccattcggtctcctccccgcgcgcgcgccgctgacgagcgggcccgcccgcctccctcgctgacgggtggggcccacccgtcatccccttcctcccgccgctcccgctgcctcgcccgcgccctagcgccgccgccgccgcgaatcccgccgcccccgtccgccccgcgtgcaatcaataggggggaattattccccgggatcccctccccctttccccccatttttccctctctctctccctcggattcgtttgtaaactcctcccctaacctcgccggcgccattaatggcggccgggactcccgcgcccgtttccccctcctgcggccaccccctttcactcccaaccctatataaaccctcaccgtgcctccctccaccgtttccgccactcgccgccctctctcctcgccggaatcgagctcgcgccgtcgctctctctctccgccgcgcccgccgagctccggctgccggcgtcgtcgccccggaccacccgcccccttggcgccgcctacttcggcttcgccgcatcctcgccgacctcgtccacccctccgttccgctcgccgaccgccggaagcaccgccgaccccgtccacccgagccggcccgccgcttcctccgctcaggtcgccgtttccgtcgtcgcccgcgacccggggtgagccgtggaccgccggttcgattccccccttccctccccttggcacgaccggaaataacccaacggtcattccttacgtgcgtgcattaatccttgtgccaggaggcaaggtacaccaaaaggtgatacaattcagaggttaacaagcggaagcggaaaaagataattattacatgggcagcgaaggcccagcacacacaaagacaaacgagaaacagcggaagactagggcgacgaccacaggcgcttgacggcaggcacgagctagacaccaaagccttcatcttcaaggaactcctcttctggggttgggaaaaattgagcaagactgagtacaaccaccgtacttaacaagacacacccgcaactgcagaataaatgcaagggagtacaagggaattatactataaagggttagggttgcagtaaacagcatttaaagacatttagttgctcaaagctattttgtaaacacgattctagaactatacactattattcatcaaggccgtgaacccacacgaacctgccttaacccaaggcctacgatgattcagaccgaactggcaacccgaccctgggtcccagctcgtcccaagccaacccaggccaaccattccacattttagttgttaagcaggttttaagaattgaaacactaacttgggtacattgctcggcttgcccataaccgagggcgcggctattcgaatagattatactctgatcagaggtgtacatctttacccacaagacacctcttcctcacgtgtaaccacgtgccacataccaccacggtatacagacggaagacgtgacatagtttccaacccatcctagctatagacaagagtaccgacccaatcccacctacggccggaacccccgagacaggcaggcaggactgagcccctagcagcaggacaccggccctgtgccatgacatctcgactaccgggccgcagctcgtgtagccttcatttgccctggagaatgtccatcgacccccgacttcatccacctccatccgtgtacttttgtttataactagactgagccacaaactaagccttacccactagacatgtggaagtacagtagtgctttgcaacagaggcccgaagaccggtccttatatggccgaggtgctaccatcaaaaccatgcaccccgagcccagcctaaaaccattttaggggattttgaatagagggggcgatgtgaatccaattccacaatactccaacaattccacagtgtccaggtgatatgaatattcccaaagtctagagttgtaaaaccgcctaatgttacctaattaaaagcgaagcatctacctaaaatcattctagtggtaccatgagtagagtgtccactagttggggttttgtttattctagggtgaacaaggaaataataacaaaaacaataataataaggtcataacaaaggtaaataggcatggctaaataaaacagtgataacgcgggaatttaaataaagcggatatgcaataatttaaatcaacataattttataaactgggattcaatatgttcaaagatgatgtgacttgccttgctcgctttcccaaacgccggcttcaacttccacgaagagcggatcttccgaagctgcagcgtctacacgaccaacggaaaagaaaaggcttttactctaataaactccatataacaagcagaaacaaagcacaaaaatgggttcttgacttcttatgggaaaattagagacttgaacggtccaattccgagttcaaatggccaagttatggccatttgaagtttatatgctctttaaatggatatttgcgaatttcttcatttaaattttaattaaaaaacatatttattgcgtcagccgggggagagggcgcgcggaccgggtccacgggagtggggcccacgcggcagcctcacggtccacggtggaccgggtgcacgcggctgacgctggccggcgccgtgggtcccacgcgtcagccgcccccgaggcgtgggcggctgacggccgggccccacctggcagccgcgaggcgcgcccgaaggcggcctcgccggcacggccgacgggaggcggcgcacccgcgccccgatggtcgacgccggcgaccaccggcgcgcggagcggcgcccgagagagaggagagaagggggaagtgaaacggcggtcctcggctcaccccgggtcgacggtgacaacggaaacggcggccgaagcggaggaaggcggcggcgcggctcgggtcgacgaggacagcggcgttccggcggtcggcgggcgaaacggaggagtggacgaggtcgacgagaacacggcgaagccgaagtaggcgatgccgaagcgggaggaggtccggggcgacgacggcggcggaccggagctcggcggcgacggcggagagagagaacgacggcgcgggctcgaatccgacggggagagaaagcggcgagtggcggaaacggatgatgggaggacggggagcgtttaaatagggttgggagtgagaaagggcggcccgaagggaaggaaatcggcgcggcgatctcgggctccattgatgcgccgtcgaagttcgcgggggtaaatccgaacgaatccgagggagagagagagggaaaagtggggggaaagagggagggaatcacggggagtgatttccccctctttatggcgcgcggggacggcgggatgcggcagaatcggcggcggcggcggcgctagggcacgggcgggcggcgggagcggcggaaggtaggggatgacgggtgggccccacccgtcagcgagggtggcgggcgggcccgcccgtcagcggcgcgcgcgcaggggaaggccgatgggccgcgggggagaggagagagagggagggagctgggccgagccggcccaagaagggaagggggggggaaagaagacttttagggattttctttttataagacccttttaactttgtttatttcttcttaattattatttgtgctctgaaaattccactaaaatttatttacgcattttaggcttttaggaaatatacaaaaatcctccaagccttatttgacttttaaatttgcacattttaattgttggaggctttcacatggattttaattattctcggcataattttgaggatgtattttagagtcgttttgggacgcgacaaacctaccccccttaaacggaatctcgaccccgagattcggaagaactggcgaagagatcgggataggctgccttcagctcgtcttcacgctcccaagtagcttcttcctcggcgtggttgctccattggaccttgcaaaaacggattacccggttcctggtcctgcgctccatggtatccaggattttcactggcctctccacgtaggtcaagtcttcgcgaacttcaatttgctctgagtcggcctgctcggatggcactcgaagacatttcttgagttgcgacacatcgaacacatcatgcacgttgcccaaggaggcgggcagatccaactggtaagcgacttctccgcgccgagcaatgataacctgtgtacacctcgcaatggcgtgacccgaaggtacacaaaatcgtccactgcgaattccaagttacggcgacggttatctgcataacttttctgccgggactgtgccacctttagattatcccgaatggttcttaccttcgcttcagcttctctcagtatatcagtcccgaacacttggttttccccaactaggtcccacaggagcggtgtccggcatttgcgcccatacaacgcttcataaggtgccatttgtatgctggcttggtagctgttattgtaggagaactcggcataggggagactcttatcccaggtcttcccgaaatctaggacacatgcgcgaagcatatcttctaggatctgatttagacgctcggtctgtccatctgtctgcgggtgatacgcggtgctgaaatttaatcgggtatccatctcttcttggagcttcttccaaaagtgagaggtgaattggcttcccctatcagatacgattttcttaggaacgccatggagacttacgatcctagcgaagtagagttcggctagtttgttccctccataggtggtcttcacaggaatgaatcgagctaccttggttaatcgatccacaactacccatatgga

SEQ ID NO: 8328 - DNA, 7342 bp, Oryza sativa
agctgacttcgactggattgtggcacttgaagatgggacttcagttccagaacttctcataattcatatctttagcgtcaacctcatacaagttacccacttcacgttatgcgtcgatatcagcttgtcattactaggataccatgcttgttatcatgagaatatcatgcttgtcatttgcttcttacttgctaccaactgcctcatattaactttcctggtctccgggtgctagctacttctgttatttgacgcaagggtcgataactttgcctttaaattatgttcctcaacagaaccaacttatcccacttgacatgctttgacgtccccccaaatgactttactgctggacttgttatggtttgatcgttatccagccaactctgaagcttcgttgttagatgcgatttttaatctgacctctatcgactatcttcgaacatatcacttggttcataactgggaatagttcccacgaacagacaactcggattcactttctttatgttcagtttactttccactattctcttcatgttgtcatcatttagcattcaaagtattcctttacacattcaatcctgatgttttcttttcagatttctcttatcaatcacctttcgacctacttctttgcccggtaataaacaccttggctggtatcttctatcaatcaccttttgaacttggtcaaccaagtactcttcactccgagagttgtggatgcttctggtgacactgtggtacttgagcctgctgcctttcagagaaccttcaagtggttcgtcaaaagctagactgacggttgttgcctttgatccgaagaagtcacatctgaaacacttagtccaaacaaatgtctctttggttaatcacttgattttcttttccatcctcaggttggttattagctcgaggttagaatatagttcctctggcacgagaccctaggtctcctttgtcagtaaacaattatacacatgatcacatatccgcatcttccaaaagaatcctcttagaacttgtttttattacaaatttctcccatatttcatgaatacaaggcactgtcttaaacaaaaagggaaggtgcttaacatcggtacattgtttctactatgggttagaattaacatgaggcctcacaggtacggcgtttgctccagtgaccacaaggcgagtgacttgtcttcttcttgcataatggccggagtgatggcgcaggttacgcttcggctgtggacaatctctagagaaatgacctggttctttgcagttgtaacaaatcaacgtcttctttgctgagctgtccatctggggatgatcattgtgacttggagttggaattggtggttggaaatccttgctaacattggcatcagtggtaccatagttgctatcaccattggagtctttctcagtgtcgaaattgctaaggttgtcattctgggttccaacattgatactatcgttgacatcttggtgaatgctactgacattgcacgccttattcgagtggtcactaatggggcaagaaccatggttgttggtggtatcatcatcattagtattgctagtgttgttgtctgcattgcgtccatcttcttggggcggaaactcttgatgcgcaacagaagatccggtgatctgaagtggctcagtgcgctgtctttggttaccacctggaaatactgggatgttgacaatccttctcttgcagttcgtcatccgattatgctcactttcgagttgcatggctttgtccacaagtttctcaaaatcttcataatcctctagaagtagttgcactgcaagctcatcttttaacccctggagaaacttctcttgtttgtcttcatccgtttccacatcttctggtgcatagtgagccaaacgatagaactcgtgcaggtactctgtgacggtcaaatctccttgcttcaggtagcgaaactctcgttttcttagtgtgaccattcctgcgggaacatgtgatctcttgaatacagatgaaaactcgttccaggtgatggtatgtccttctggccgtgatgcttcgtagctatcccaccactctgaagccggtccaaccaactgatgagttgcgaagccaacccgctcctggtcggtgcactgaatcaaccctagcttcttctcgactgtgcgcaaccaatcactggcttccataggatcgacggcaatggcaaaggttggaggctcagttttgagaaattctgataacttgcactgttgctggactgtaggcacttgaacgttggttgcccctgctgggtggttccaattctgtaatagttgaaaggctgttgccaacatgttggtttggttaaccacaacttggattagctctggtgaggtttcgttggtgcttctctcattcccattggcttgggttcttgagtcatcggatccatcattcccatagcctttgttactagtattatccatctgtcacaaggtagaggttgagaggggaagcatacaaggaaagaatagaccagaactagggacaagaccttaaaggaactaactcttcttgctgatgtgttgtttgtttcacttattctgcaagttgattaagctaacaacctagcatggttacatcacaacccaccgatgcaaaccacgcgctacacacacaagcaagaaacacacgactaacgacactaccctagagggtggcttaggttctgcgacgggttctccaagatcttcactccttcacagctggcttcactgcttcctttgcttcgccagcggatcctgcagtcttccggagcttcggcaaacaactgacgatgtcttcttcttcactgacctgattatctagtactagttgaaatttgaagaaggaagaaaagagtaaaccttttgcaaatagcattaggggaaggagaaaaagaggaactttcgcaaatagttttatttataaaatatgtccttaggttttatccacttggcttatcctacagtcgagatggctctgataccagcttgtcgcgaccgggaaaattgccttttcccgaacgctagtgtattagtccccgtcccaggaaaagccggggtacaccacacaaacatgatataaaagacacatctttattatatcgataatatttacattattacaaaggcacttaaggcctgacaatcaaaaataaacagcagcggactagcgggcctacggctccatcttcacaggcgctcaactggggtataagccaggactccacctaagacatcttctccaacgcttctcttactgaagagggggagaaagatagagcaagaatgagtacaaccacagtactcagcaggccacaccggcagatgcatgattaatgcaagggggtacaaggggataataatataggggttaagttttgcagtaaacagcatttaaaagtcacttagttgcccaaagccattttataaagacgatcctagagctatacagtattattaatcacggccgtgaaccctcacgaacctgccttaacccaaggcctacgatgattcagaccgaactggcaacccgaccctgggtcccagctcgtcccaagccaacccaggccaaccattccacattttagttgttgagcaaattttaagaattaaaacactgacttgggtacattgctcggcttgcccataaccgagggcgcggctattcgaatagattatactctgatcagaggtgtacatctttacccacaagacacatcttcctcacgtgtaaccacgtgccacataccaccacggtatacggacggaagacgtgacatagtttccgacccatcctagccatagacaagagtaccgacccaatcccgcctacggccggaatacccgggacaggcaggcagaactgagcccctagcagcagggcaccaaccctctgccatatgacatctcgactaccgggccgcagctcgtgtagccttcatttgccctggagaatgtccatcgacccccgacttcatccatctccaatccgtgtacttttgtttatgactagactgagccacaaactaagccttacccattagacatgtggaagtacggtagtgctttgcaacagaggcccgagcttaatccttatagtggccggggtgctacttcccacaactggcatgcacccaaaccccaccgaaaacaggttttaggggttttgaaagaggaagagaggtgtttgtccaattccaacataagccaaccattccatagtgaccaaatgatatgagaattcccaaagtctaaagttataaaaccacctaatgttgcctaattaatcagcgaagcatctacctaaattcatactagtggaaccacgaatagagtacccactagttggggttttatttattctagggtgaacaaggtaataaaaacaatagcaataataatgtcttaacaaaggtaaataggcatggctaaataaaacagtgataacgcgggaatttaaataaagcggtaatgcattaatttaaatcaaaaataattttgtaaactgggattcaatatgctcaaggatgatgtgacttgccttgctcgttttcccaatcgacggctgcgacttccacgaagagcggatcttccgaagctgcagcgtctacacgaccaacggaaaagaaaaaggctttaacactaaataactccacataacagcagaaacaaagtacaaaaatgggttcttgacttcttaaggaaaaattagagacttgaacggtccaattccgagttcaaatggccaagatatggccatttgaagtttatatgctctttaaatggatatttgcgaatttcttcatttaattttcaattaaaaatcctatttattgcgtcagccgagggagcgggcgcgcggaccgggtccacgggaagtggggcccacgcgtcagccccacggtccacggtggaccgggtgcacgcggctggcgtcggtcggcgccgtgggtcccgcgcgtcagccgcacccgcgggcgcgggcggctaacggccgggcccacttggcagccgcgagggcgcgcccgagggcggcctcgccggcgcggccgaagggagggggacgcgcccgcgccccgatggtcaccgccggcgaccaccggcgcggcggagcggcacccgagagagaggagggaagggggaagcgagggggacggtcttcggctcaccccggtcgacggcgacgacgggaacggcggccgaagcggaagaaggcggcggcgcggttcgggatgccgagggcgacggtgctccggcagtcggcgggcgaagcggagcggcggacggagtcggcaaccactcggcgaagccgatggaggtggcgccgagtcgggaggaggtccggagcggcggcggcggcggaacggagttcggcggcgacggcggagagagaggagcacggcgcgagcacgaatccgacggcgagagcgagcggtgagcggcggaaacggaagagcggagcacgggcaacgtttttatagcgtcgggagggagagagggcggccgaggaggaaggaaaccggccgcggagatctcggccgctattgatgcgccggcgacgattgcgggcacgattcaaacggatccgagggagagagagaggggaaagagggggaaacgggagagggaatcacggggagtgattcccctctctttaatgcgcgcggggacggcgggatgcggcgcattccgcggcggcggcggcgctagggcacgggcgcggcggcggccccgccggaaggaaggcaatgacaggtgggccccaccgtcagcgagagtggcgggcgggcccgcctgtcagggcgcgcgcgcgcgggtagtccgatgggccgcgggggaggagagagagagagggagggagaagtgggccgagccggcccaagagggaaggggggggaaaagaacttcttttagggtttttctttttataaaaccttttcactttgtttatttcttctcaattattatttgtgctctgaaaattccactaaaatttgagggctccttttagaccaaggagaatttaacaaaaattctccgggccacatttgaatttttcttgtacgtattttagggtttgccaaattcttttcgaattttaattaattctatttttccttttagaagatgatttttatttcgggatgaatttatcaggacgtgacatccttggaggcgatcttttcgagcatgcgattgtgccgcacgccccccctgaacgcgtagatcaccgcgtgtgcggggatgcacggtatggtgttgcggacttgacagaaccgctgaatgtacgagcgaagagactcatcgtcccctcgctgtaccgcgtgcaagtccgcttcttcacctgggcgcggatatgtgccctggaagttcatggtgaactgctggcacaaatcctcccaagagtgtaccgacgcgggtggcaagttcatcagccaaccccgcgcctgacctttcagggccatggggaagaaattcgccatgaccctgtcgtcacccccggcggcctcaatcccggtcgtatagatctggagaaactcggcggggttgacgcttccgtcgtatttttcagtgatggtgggccggaaccttgggggccaacggacgttccgaaggctcgccacaaaggctcgacagccggcaccgccaaccggggacatgggaggctggcccccgtgcccggaccgaagtggcgctccggacgaggaagcgccctccgttgcgtggcagcacgacgaccattgcgccggcgctcaatattgaggcgggcatccggccccccacgcacatcttcttgggtcggaggcgttgacgagggaatagcggacgaacggcgggtaacggccgccgctcgccgcgccctccgcctcgacgacacggagccggtggtagcaacgccagaggccttgggggcggaggaccgcccgccggcgactaggcgctgctgcgccgtcatgaccaagtcggccacatcatccagccaacgtcgagctggagtctctggatcggggacgacgggcgggtgacgcaggagcgcgcccgcagcccggagcgcgccctggggcgtgctgccatcgccgtagacgaggaggcgacgctccccatctcgccgtccttctccattacccgtgggtggcgaagtcgcggatctttcgaccccctcgagcgcctcctcccgcccaagacttcggcgagagggggacggtggagtacgagctcgacggcgcgggttctgctccctgtcgtcaccgctagcgctcggagagaaggttgtgcgccactgcccgttcggccattgggctgagcgggggaaact

SEQ ID NO: 8329 - DNA, 1685 bp, Oryza sativa
cagcccggggtgcagttctacaccggcaacttcctcacggccgacgtgaaggggaagggcgggaaggcgtacgggcagtacggcgcgctgtgcctggagacgcaggggttccccgacgccgtgaaccaccccaacttcccgtcggtgatcgtgaggcccggacaggtgtacaagcacgagatggtgtacaagttctcgttctagtttaggtgactatacatggatcatatgtggtcattggtcgatcgcttcatctgctgtaagttgtgacattgtcggtgtcggtcggtgcaataatatgatatgcgttgatttgcaataagacgcatgggggaagaaaagacgagaatttttcactagccagttcagtctcatagagaagttgcggcaagagaaaagcccgggattcttccggcttgcaccataatgtggtgggttagttgcggacttataaaagtttttccatacgagagccacttctctcatacccaaagttttacggaagagggctagctacttaccattccaacgtaataggttatgtgtgctgacttcaacacaatgttagtatggtatcgtagataacagatatggtattattggtatcagatatgaaccgttataccagacacaatacttatagatatcagactttgatacttacatatcataatgacatcgatgttttagcatggtaacgtaggtaccagatttttttttgggagggtacaaatcaggacacacacgaacacacaccacaacacacgcatacacacgtgtgcgcgtccctaacacatactaggattgagattgaaggcactaggcctcagtgcacgggaaatatgcaaccactgaatgcgcacgcgcgtgtgtaccattatacctaaccgggaccaaccaaagtcagtcccgggaaaagagggggaaaaaacccgggtgagcacgagcgtcgaacttggggttcgaacgctcgtgggcaatgtgcccaccggcgtcgctaaccatccaaacaaatgctcgatctcacgtaggtaccagatttggaaccgtagataccagtgttaacaaccaaatttggtaacatctgtgtcaggaaagaagattggatcaaagcaaagtcagaggcggagatcgattcgagaacagagcaagaatcggctggagcccagatcggctacgattagtatcggttaagtccaagtcagactgggttaagtgatgcagccgattccgacaatacgacttgtattcgatatcgggtttgagttgacgtacttcaagatgattgccatacatggataaagtcctgggaaggcaattgtatctattaattatgatattttatataaattttttacagataaatatgggcaaaagtttgccgcaaagacttatggtatcttagagtttgttagagataatagtcgtgtccggtatggacatatcttgtaattctcgggtataaatagaccccgagccctatgtaatttttaacacacacgttcaatacaatttcggcgcatcgccaccctttttgctttagttttatttcgatgatttcttgctttcgggttgagttgcatcggtttcgatcttccacaagaggtaaaacttgttatgacggcctgtgttctcgggattagggcctccatctttatgataccctaatcttgtttatgtaattc

SEQ ID NO: 8330 - DNA, 3563 bp, Oryza sativa
aggttgtgcgccactgcccgttcggccattgggctgagcgggagaaacttggcgcacacgaaagaggacgagggcttagaaaaacacacgcgccccctacctggcgcgccagatgacggagcgtggggctcctcaccgggagaccgcgcaggcccccctttgccggttcggccgggggcgctgagtgagtttcttcaccctcgatctgtggaacgttcgcgagagagcaaatgcacaagacacgggcaatgtatacaggttcgggccgctgagaagcgtaataccctactcctgtgttctggtggatctgtgtgtgaaggaattacagagagccggagagcaagagagaagctggagaggaagagagttcaggctctagaaccctccttcctctttttcctcctctcctagttctcgttctggattttgatcttcttcccccccactctctttggtgggcaaggtcctccttttatatctcaaggggataccacatgcaccacttctacctactcttcttttaagtggggaccctccctattttgacccaaacttggcttgcttcttcacctggaaactaaatcacagcttgttcttgagtgaggcccagcgccatcactcgactgacacaggggatcaccctgtcattccttcattaatgggtggagatttgcaatggccgccgtccgaatgaccctccgatgggatgggtcatatctacctccactttgccggaagcagatgcaacgtgggggcacgttttgtctgccgatgacgtgaccggcgtcagaccagtcacagaccggtcattcttgtcctccacgtgtcagattagcatgcctcacgtctgtctttcttcatacaatgacttccttgcaatggttgcgatgaagcctgggatgtatctggccgggattggcgtgtcaactccaggagttaacacgccggctccggctagggacgagtgcctggaggctctcatcattccgatgggacggggcgaggcgcgtgacaggccgcctgttgccacctaacccgcgatctgaccggtctgtgaccggtcacatactgcgaccggtcacggaccggataagtgagcgcgctgcactgcattaaatgcggcgtggcgcgctcgtccaacccgcagtaaacgtggttaggtgagcgctgctgtgctcacctaactcacacacgtggtgccaacaccacagggggtcggggcgccccaaccctcggggccgaaacgggagcggcccgacccctcggggagacagagggaggggtggccacgtcaccctcgggcccgaccccccccagggggtcaaggcacgtgggtgagcgcggccgcccaagcctttagtcacgatactcccggtcccttgtcaccgacatatctgatgctggttcagcagaaaatggaggagatttggatgtctcaggtacacatgatggggtgcacacagcacatggtgacgcccccttggaagacctgggatccatgtcgcaggagtctccaggatcggggcatcagtctccgggatccgtttcacatgcgtcgttgcatcacgcgtccggctctctgcctgccacgccgacccctgcgccctcggctccctccctggcacaatcaccgaaccagcctggtgctgccacgacgccaaccatcagcgcttcctccacctcagctgctgcgcttgacacaggggctcatgatgctcctgacacaaccactgtactctatcaaatagacccagtgcatcaagattcaatggttcctccacgacctcacacaagacttcaaagcggcatctgcaaggaaaaggtatatacagatggtacagttaaatggtcttgtttttcctcctctggtgaacctcaatctctagatgaagcttttgctactaaccactggagggaggctatggatgcagagtatcaggccctcatgaaaaatcaaacatggcacttggtaccactgcagcaggggagaaatattattgactgcaagtgggtatacaaagtcaagagaaaagcttatggtagcctagcagatacaaggccaggttagttgcaaaaggcttcaagcaaaggtatggaatagactatgaggacacgtttagtcatgtagttaaggctactacaattagaactatcctttccattgcggtgtctagaggttggagctttcgtcaactagatgtgcaaaatgcttccttcatgggattttagaagaagaggtacatatgaaacaaccatcaggttatgagaatagtaaatttcctaatcatatatgcaagttggataaagctgtatatggtctcaaacaggctccacgagcttggtattctaagctaagcacaaagctacaagcacttggttttaaaccatcaatggcagacacgtcactattcttctatagtaagggtgatgtcaatgtctttgttcttatttatgttgatgatataatagttgctagctccactccaagtgccacctcagcattattgcaggatttaactaaggagtttgctttaaaggacttgggagagctgcattactttttgggcatagaggtgaccagaacagaagatggaattctgttgacccaagctaaatatgcatctgatgtcctcaggcgtgtggggatgcaagactgtaaaccggtaaatactcctttgcttacttcagaaaaattatctgtaaatgaaggggatttgcttggtccaaaggatgccactaaatataggagtattgtgggagcactaccttgacaaggccagatatttctttctctgttaataaggtgtgtcagttcctacactctcctactactgtgcattgggctgcagtaaagagaattttgagatacctcaactcttcttgttagcggtttctctgatgcagattgggcatgctgtctagatgacagactgtcacgaccggaaataacccaacgggcgttccttacgtgcgtgcattattccttgtcccaggaggcaaggtacaccaaaagttgatacaattcagagtttaacaagcggaagcgtaattaatttattacatgggcggcgaagacccagcacacaagaagacaaacgaaaaacagcggaagactagggcgacaaccacaggcgcttgacggcaggcacgagctagacaccaaagccttcatcttccaggaactcctcttctgggtttgggaaaaattgagcaagactgagtacaaccaccgtactcaacaagacacacccacaagtgcagaataaatgtaagggagtacaagggagccataatatagggggttagggtttgcagtaaacagcattaaaagacacttagttgctcaaagctattttgtaaacacggtcctagagctatacaatattattaatcaaggccgtgaacccacacgaacctgccttaacccaaggcctacgatgattcagaccgaactggcaacccgaccctgggtcccagctcgtcccaagccaacccaggccaaccattccacattttagttgttaagcaggtttgaagaattaaaaacactaacttgggtacat

SEQ ID NO: 8331 - DNA, 676 bp, Oryza sativa
cttcaactgcttcgagcccgggcactttgcggataaatgcccgaagccaaggcgtcagcaaggccaagcgcctccccgccccaacaacggtggtaaggatgtcattcagggtcgtgtgaaccatgtgacggccgaggacgtgctgacaactccagacgtcatcgttggtacgttcctcattcattccatccctgctaccattttgttcgactctggagcttcccactcgtttatatctgtgccattcgtggggagaaatcagttgggggtagaaaggcttagaaaccctctgctcatcaccacccctggagaggttatgacagcaaagtattatagccctgccgtccctatagaaattcaggggattccttttccctcggatctgattctgctagacaccaggaacttggatgtgatccttgggatgaattggttggctcaattccaaggagtagtggattgcgcgagacgcactgtcactctgtaccgagggccggagcaaccggttgttttctttgcacccccaacctctgtcaatagatcagaactgcatcagataggctgtcagaaatccccatcgtcagagagtttggagacgtgttcccggaagaactacccggtatgccgcccaagcgagagattgagttccggatagatcttgctccaggaaccaccc

SEQ ID NO: 8332 - DNA, 5704 bp, Oryza sativa
cctgcagccccggtcactgtttcggggtccacagcaactcctttagcagatatcacgtgccctaagaatttgacttcggacaaccagaactcacacttgctaagtttggcatacaattgatgttcccgcaactttcccaataccagacggagatggtgctgatggtcttcctctgattgtgagtataccagaatgtcatcaatgaataccaccacaaacttatccaagtattccatgaacactttgttcattaagttcatgaagaaggcaggagcattggttaaaccgaacgacatcaccgtgaattcatgcagtccgtatcgcgtggtgaatgcggtcttcggaatatcttcttcacggatgcgcaactggtgatatccggaacgaagatcaatcttggagaataccgtggcacctttaagctgatcgaacagatcatcgatccggggaagagggtacttgtttttgatggtgacttcattgagagctctgtagtcaacgcacatcctcttcgtcttgtctttcttctccacaaaaatcacaggagcaccccagggggaagtactcggacgtatgtaccccttttctttcaactcttccaactgtttcttaacttcggccagttcatttgctgccatacggtagggtcgcttgtacagaggagtggttcctggagcaagatctatccagaactcaatctctcgcttgggcggcataccgggtagttcttccggaaacacgtctccgaactctctgacgatggggatttctgacagtcctatctgatgaagttctgaactactgacagaggttgggggtgcaaagaaaacaaccggttgttccggccctcggtacagagtgacagtgcgtcttgcacaatccactactccttggaattgagccaaccaattcatcccaaggatcacatccaagttcttggtgtctagaagaatcagatccgagggaaaaggaatcccctgaatttctatagggacggcaggactataatactttgctgtcataacccctccaggggtggtgatgaggagagggttcctaagcctttctacccccaactgatttctccccacgaatggcacagatataaacgagtgggaagctccagagtcgaacaaaatggtagcagggatggaatgaatgaggaacgtaccaacgatgacgtctggagttgtcagcacgtcctcggccgtcacatggttcacacgaccctgaatgacatccttaccaccgttgttggggcggggaggcgcttggccttgctgacgccttggcttcgggcatttatccgcaaagtgcccgggctcgaagcagttgaagcacagacgctgcggacctgaagcgtccctgcggccttgaccaggctgcacagttggcgtaggaggacggggcgctcgagtcccttgttgattctgttgctgctgcggctgtgggacgcgcaccacgaattgaggtcggggcgcggagcgaggttgctgctgctgtggttgctgctgcgaggaggatccccctggatagggattggtgtagcggaccctttggttagcaccctgttggttgcggaaattctccaagtggcacttgtgcgactccagttccttgtgcttggcttccaagcggatgctcttgtccaccagacgttggaagtccggatagtccccggagactagacgcacggacagctcagggtccattcctgccaagaacttctcttgcttctcctcatcttcccgcacatcctccggggcgtaacgggccaggttgttgaactcatgcaaatactccatcacggagcggttgccttgcttcaactctcggaattcccttttcttaagggccacgactccggcgggcacatgggttctccggaaagcggcggtaaaacgggcccaagtaataggctgcccctctggctgcgtagcctggaaatggtcccaccatagagatgcgggtccctgcagttggtgggcggcgaagatgactttctcctcatcgctgcactgcacagtgtctaactttttccccacggcatgcaaccaatccaacgcatccacggggttgttggagctagagaaggtaggtgggcggatgcggagaaactcggcgagtttagagtgttgtgggggtggtggtggagcattatgttgtggcggattttggatgtggtggaggagagcagtcatcatgttggcctgctgggcgaggatttgggtgagaatggcgttggtgtctggtggtggtggtagaggcggaggaggaggtggaggtggactgccctggttgttgtggttgctgccttcggggtgactgccttcaccgtagcagcacttctcctggtcgtcaccatctgaaaaccccacacagaaccagcaaacagagagagctgacaattaaaactagccacccacgactaccataatttttgaatttattactgctattaaattggttcattaaagttcaagttgcttaggcaaataaaataaagacaggctccgacacagttataccacacaccggcataaccatgccccacacgactccaacaagaagacaaacgagaaagaacacacgcgcaagcctactaactgctcgtctaccgctgcgacgggccaggacagaaggtgagcagcagcgcatcctccgtgctaccaacgccggaggcttccccctcctgaggagccatgggcgcgggctcggcacgaggggtctccacgaagcaggtccatgccaaggactggcgaacaagctcgggcctggaggtgctcttgcgggcggtgatcttctggctgcggcagacgcggcggcgcttggggcgacagacctctccctgggcgatcttgagctgatgcagctgcgcctctgctgcgtctaggtccttcttcagctgcagattctcctaacgcagctccaggatcttcatgttgttctcgaccatcccacggcgcaccatctgatggaagtcgatacgagccgcgtcgtacgcctccaccatgcgcgccaggtgcatgatggtagcgtcatcctccgagctagcatcccggaaggtggcgtagtcgcgggctcctccgcggcgagggtggtagcggtagggcgagtgctgcaactcgtccgggtagcgctggtgaagagtgccgatggcgaggagagcggcgttctggcaagcggcggagaaagaatctccacccgtggtgactgccaacgaagtcctctcgggtgagccagtgaggatcactgcagtaacctcccaagcagcgtggggctctgcatcgtcaccctcctgctccgggagctgcctgccctggtagtccactccatgcgcataccccaggacaacgcacatgccccgcagctccaaaacaaagccagtcaggtccagaccacgacggttgatgctgccggccatctacaaacaaaaacaaaaagaaatgcaacattttaaaggtcagattttggcgataaatgaagcagcaggacagagagagactagaggattttcacaaataacaaaggattttttttttcgaaaatattgctaaggcttgggatctaaggctagtcctatggtcaagggggctctgataccaacttgtcacgaccggaaataacccaacgggcgttccttacgtgcgtgcattattccttgtcccaggaggcaaggttcaccaaaagttgatacaattcagagtttaacaagcggaagcgtaattaatttattacatgggcggcgaagacccagcacacaagaagacaaacgaaaaacagcggaagactagggcgacaaccacaggcacttgacggcaggcacgagctagacaccaaagccttcatcttccaggaactcctcttctgggtttgggaaaaattgagcaagactgagtacaaccaccgtactcaacaagacacacccacaagtgcagaataaatgtaagggagtacaagggagccataatatagggggttagggtttgcagtaaacagcattaaaagacacttagttgctcaaagctattttgtaaacacggtcctagagctatacaatattattaatcaaggccgtgaacccacacgaacctgccttaacccaaggcctacgatgattcagaccgaactggcaacccgaccctgggtcccagctcgtcccaagccaacccaggccaaccattccacattttagttgttaagcaggttttaagaattaaaaacactaacttgggtacattgctcggcttgcccataaccgagggcgcggctattcgaatagattatactctgatcagaggtgtacatctttacccacaagacacatcttcctcacgtgcaaccacgtgccacataccaccacggtatacagacggaagacgtgacatagtttccaacccatcctagccatagacaagagtaccgacccaatcccacctacggccggaacccccgggacaggcaggcaggactgagcccccagcagcaggacaccggccctgtgccatgacatctcgactaccgggccgcagctcgtgtagccttcatttgccctggagaatgtccatcgacccccgacttcatccatctccatccgtgtacttttgtttataaccagactgagccacaaactaagccttacccactagacatgtggaagtacggtagtgctttgcaacagaggcccgaagaccggtccttatatggccgaggtgctactatcaaaaccatgcaccccgagcccagcctaaaaccattttggggattttgaatagaaggagcggtgtgaatccaattccacaataaccagaccattccaaagtatccaggtgatatgaatatatcccaaagtctatagttgaaaaaccacctaatgttacctaattaaattgcgaagcatctacctaaaattaaactagtggtgccatgagtagagtgtccactagttgaggttttgtttattctagggtgaacaaggtaataataacaataacaataataataaggtcataacaaaggtaaataggcatggctagataaaacagtgataacgcgggaatttaaataaagcgataatgcaataatttaaatcaacataattttacaaactgggattcaatatgttcaaagatgatgtgacttgccttgctcgctttcccaaacgtcggcttcaacttccacgaagagcggatcttccgaagctgcagcgtctacacgaccaacggaaaagaaaaggcttttactctaataaactccacataacagcagaaacaaagcacaaaaataggttcttggcttcataagaaaaaattagagacttgaacggtccaattccgagttcaaatggccaagttatggccatttgaagtttatatgctctttaaatggatatttgcgaatttcttcatttaaattttaattaaaaatcggatttattgcgtcagccgggagagagggcgcgcggaccgggtccacgggagtggggcccacgcggcagcctcacggtccacggtggaccgggtgcacgcggcttacgccggccggcgccgtgggtcccacgcgtcagccgcacccgagggcgcgggcggctgacggccgggcccacctggcagccgcggggcgcgcccgaaggcggcctcgcggcacggccgacgggagggggcgcgcccgcgccctatggtccgggcggcggccataggcacgg

SEQ ID NO: 8333 - DNA, 2384 bp, Oryza sativa
cgatgacctgtgatgcagtcctgttttttgggaatctgcctgtcctcctattgctgcagacgagaggccagaaacaggtcaatagctgcagacgatggtatttttaggaagttgtttttgtcaatggtatttttaggattaagatgcttgtcgatggtattttatggattttctcgtataaattacatgacatatcacaagacagtattgcgcaaggatgcacaaatttaaaaccggaaagaaatgagacagacgtatatatatcgctgcattatttgagccgcaacacacagcaccgtcgtcgaagccagcgtctgatctgctctacttgcagacgcctccactcggcgcagtgctgctccggtggctcgccggcgagccactgctcgacggcgaactccacagtggagcacgatagatgtcggtgaagatcgagcacgccggcggtgtcgtgcgttcggcgtcttcagcagcatcgtatactgattggccgtgcatagacggtcccggtgacccggtcccggtctctgctgcatcatcgccacggtcctcgggtcccggtgtacagtacacgcacccgtacttctcctcgccggcggccaccaccaagtccgggaccgccagcgtcaataacgagactagctcaaaacaaactaatgtgtatatacgcgcgttcatacgtaccaagatcgccgtagcaacgaggatggcaaagcagaacagcagcttcctatttgcagccattgggtattgttgaaccttcaacgagtagctaggctcgactgactctagctagtttattttgcacttctgttgaggctgtgtttagttccacgctaaaattggaagttttactaaaattgaaagtttgaagaaaaaagttagaagtttatgtgtgtaggaaaattttgatgtgatgaaaaagttgaaagtttgaaaaaaaagttgggaactaaactgagccgtaccgatttgtgagctagaggaggctaacgagggtatttataaggcgagctagaggaccagagctaatatgttggcttgttaaatattctgagggatgggtgcgtagctgaagcatatcccttcgtcgtaaaataaactaactcataataaatgtaacattatatatactagacaccgatccacgtgacatagctattactttattaattataaatattagaactttgatcatatatgaaatatgatgggtattttctgaattatgtatgatgctttagtaagaagtccgcctcacttgcagttgctagctacaactttatactattaactctgatttttaaaattgtcaaattttataaactaaaattaaaagagtcaatgttacttctagccaagttctattttacatgtgctcccaatatcatctcggtttcaatgattttaacccatggctagatatattaattagttaagtgaaacctcttaaagtatcataatattattagtaattgatatagaggtagacagaaggacggcactaaaaaaagatgcgcgcacacggcaagtgatcatagaaaaggggatcgctgataaggataaaatatatagaggatatcaagaattaagtttttataaagaataaaatatattaattagtggtaatatatcttgtgagatgcatacaaattgataacttatcttatataaatggttttgatagttcacacaacttgattggagtatgatcaagctcaatttaccgcatggccttctaattataccgataaaatcacatcactatcccaagactgatatggatgaaatatacgatcatgccatataatatactgttgtgctgagttcaatagaacttcgcatcatcttgtgtgagtcgttaaaaaataatatgttgttgtgctgagtttgaatggataagatatgagttgtgcaagattgtacaggaagctgaaaaattatatgaaaggaagggcattgtctagtgtttgatttatatctgatcgtccgaaatgggtttatagtgatcgcttgcgtttgtagccgtcttacctttttggtctgaagtctaaaccgcagagcaccggctccaacgaggcgcgcacataaggaaaggaaaacctgcaacaactccatggtctcctcccgtttcgatcaaacaaaagaccagaaaataaaagagaaaaaggtaatagtaagcctccgttcccaaactcccccaaaggcctccaagctcgagctcgaccccgaaccggaaacattcctcgtcggcgaggagcggcgagatcccccgggccccggccatggaggggctcctgtccaagctccggagcctggacgcctaccccaaggtgaacgaggacttctacagccgcacgctctccggcggcatcatcacgctc

SEQ ID NO: 8334 - DNA, 9239 bp, Oryza sativa
gaggtggatgatagtgacattgcagcgacaacgaagtaggcaggagatgaaggaggagcatgggtgggccgtccgcggaggaccgtggttatgggcgtcgttccacgcagagtctgcaacgttgacggtgcagcgtctgcgaagctcggaggtgggccaggcatggcaagatagcgtcaggaggagctctcgccggcgtgggaaggaggagctcaccggtggcgacaaatgaggcgtacggacaacacgtcaggcgacatgtggcttcggagggacgagtggcacggaatgaaacaactcgcgtcctcggtggcatattcagaaagtgtcatgaattaagtggcaaacctagatggtgcgaatccaatgacatattctaaaaattctccacatttcaaatagagggggagaagggatttccttggagagcgagtagattgccacgctggcaagcaacatgtgctattaaaaaagacgtgaatattagggaatgacctaatatcaaataattaggagtgaggttttgaacccaggtcgtctagcgcaccacctcgtggagctagccggaagacccctgtgtgtttcttgcctcatgtgttatttaaaccataaatgcaacagtgctgtggggagttttcaacacttgagctagatgggagcagccaatgttggatttttcaacacttgatttcgattgaaaaagacaagtgaactaggacctactccatgattcaaaagttataaaagagggatatgtattttcatcactcgagatgacattccctcgttatttgtatgccatctaaatagttattaaaaattttgaaaaaaaataataacatagattaatataaaatatatcactccacgaacatacaagaccagattcaacttctacatgctgcaacaaaaagaacaaattaaatggacaatagttgtcgtacattcgcaactatatttgttattttcgttacaacttgtagaagttgaattcaaacttgtatatttgtggagtgatatatttcatatcaatctatgctgccaatttttttcaaaatattttatgactatttagatggcatggacgaaacgaggggatatctcctcgagcgatgaaatcacttttcccagcagatggacaaaagtgcaattacacatggcgctaatgcgcgaccagtcggggcgcgcgcggcacctcagctggtactaatactacctgtactactacttgcagtactaatactaccattactgttactactaggactactactagtagtagtatgtattactactactaatctacatacgtatatatatatatatatatatatatatatatatatatgtatataaactttacatacgtgtatataaactttgcatactcgtatataaattttatatacatgtataaaaattagtatatgtacgtataaaaatccagaaaatacatgtatataaagttttataggcgtacccggagtgtaaaaaaccagaaagaaaaaaaaaaaccggaacagaaaaataaaacagaacagaaaaccacaaaaaaagggaaaagaaaaaaaacgcattagcaatttcgattacacaatcgtgaaacatcaatctcaatctcgatcagtcacttaggtttgttcgttgagatttgctactgtccagcgcttggtaccccaagataccagtaccaccaggtactagatcaaatctagccatccaatgtttaggggtaggattgggaatgagtaaaaatctcttccaatattgaatcaattaatcttgttcctgagttcttcgtcaaaatggaaaaattctcattcttgaacaccgccgcatgcttgtgtccattgtttcctccctcatatgcgtgtctttgcagttcttccttgcggccggcgccgccgcctggtccgacgactcgccgccgctgccgtggtgcttgatccgacaactccacgaccaattcgctgcctcggctgccaacacccccgccgttgccgtggcacctggtccgacctctccacggccacctcgccatcgcggccggcaacgccccaaccgccaccgcagccgcctgccatggccgtcgacgccaagactggatctcgcagagtcgcaggccacacatgccacacaccgccgcggatcccgcagccctgccgtcgacgctgggatcggatctcacagcacgtcgtcgccgacgctagccctgtgatgctcgccaccgcccgaccaccgtcgaagctagggctggatctcgcaggctgcacgccacctcaaacccttgaaccccacaggccgcagctcgccgccaccgccatcaacgccggccccagacctcgccgtccgttgatgccaccgtcgatgctgaccccgcggcgcacctcgctgcctaccgccgctatcgacatcgggtctggaacccgtagtctggtgccaccgtcaacaccccaccgcgcaccccggcgtctcgcccttacatacgaaaagtctatactatccttccacctctcttcaagaaatggtaccactataagggctaaaatggtaccgcacggtaccgagcaatctcaaccgtttgatctgtcccagctaacggttaggatttggtaccgcctccctctgctgaacggtagcaaatctcttgttcgtttcgtcctcgcacctcgctcctcttcagttgctcctgcggcgcgaaccgcttccagtaccagtgtcgcgcccagacggtgggcatggactcgagcaggaagacggcgatgaaggcggtcatgacggcgacccaagcggcgtagtaggcgaaggtgccatacctgaaccggcagagcatggcgaggaacgactgcgtctgcacgaaggtgaggccgaggccgatggacacgttcatcgcctgccccgccgaccggatgtccaccgggaatatctcgccggggatcacccaccccagcgggccccacgaccacgcccgccgttgcgatgacgacgtacgccgacggcgaggaagaactggaacccggccgtgagcgagccacgccaccgcgtcggggccatctcggcgatgaagagaagagccgcctgccatttcgtccaaaaccaaacgacatgatcaaaaccgtcgtgcaacgcgcggtgcaccgcaccagcgctcgtgtggtacctagtcgccgcgcgcgcaacgtggtagtggacagtgacgccgtggcgcggcctctggcgaggctggcatgcggctatgctgcaacaggtcaccgcaccaggcaaccaccaccggtggatcagttgcaccgaatagacctactttaattcagtcaacaattcccactgcaacatacacggagtattatctacttaagcagaatatgtcaatatacagcggaaccaaattacctccatcatatcaatgctctcgaattcacccacaagtcaggacgacaatactgaggataatatttgttcagcaggatagcaagttgtcaacttgccacaagaattttgttacattctgatcaggcttaattggctatttaagcatgaattcccggcatatgaaagttatcgcgcagtcagatcagcgtagcaacctgagacctcgtgcaatccataaatggaaattcttttgaagagcgctgcctgaaaacaaacagcctttgttgcgtacgcttgcttggtgcataagtgatggtgatgaacaaggcaattgggactcggagggcaatctccttcttgcgtagaggagagcgctggagaacatcccccttctctttagctcaagctgaaaatttgatgcaccctcgattgcttcttcagattcaatttccatgcctaaagaaggcagagcagcatccagaaaattaaaagtggttggccgtctccaagcttgcattgcatcaccgagagcttgttgtcttcccatgccattcatcagatatgacaggcgacgttgcgcataaatgacaggggaaaccatagtgctagatttaatcaactgcatgcataaaaaaggagcaaagtcaacaatagctgtgaggtttaaaagcttttccttttcaatggattgatgttgtttacagacagggacagtcaagaaattgctgttttcacaagcacttttctcaagaaaatcagtagaccaaatggaactgttcgcactgtgtcatacactaattctatttgatcatgcaactcgctgacatctctcacaaacccatatagcacaagagacagagatcttaagcaaaatcaacctaagaacaagtaaatatacaacgaaagctaagcttcatctccttactggtccaaaacattatcattagttcattaacaatatacatgttagcaagtattgagtacatttcaaggagggaaaaacaaggctaaagcactcaagtcaatccacttgttggtggcataggaaatatggtgtgaacgaaacaggagggtgttccaaaatcaagagaaaaccatgtcgcaactactcatcaaaatacaagacgaaatcaaaatatggagcatgtgtggagcaaaaaacatcgcgagaatatccgcttaggtttcatttagtgtgtgtttcttttatgttttcttccctagtttcccttgtttctttctccttcaccttctttggtgatattgtaaatacttttctattctccttaatataactccagcttagcctagcttcggtttcaaaaaaaaaagtattgagtttataattacatattgtaaaaaacaagcatacctttgaggggtcaagacagaagttggttagagggaagttgcgctgtgggttctccataagcagttcaatttccctgttcaaaaaaagcaagtgtgcataaaaaaaactgagaaaggaacagaacctgtggaaacataatagtataagctaaactattcttaccgcttgaggtttctgcttgttgcttgcctaagcttcataatagatggttttgaactctttggcacttggggagctggtttcctaaaataatcagaggaaggcatatagaaattatatgtttgtatagttattctttgaaaagaactaatcaaaattgttaacttaaaggcacagtagtatacccagcacattcatcatctacgaacacctcaatggggttgacaagattttgcagaattgcagccctcgatcctaccttctgacaaatctgttcagtgaaatagtatcatcagttcattaaccgttactgaaccgataaaccttgagacatgtcaccaaagggaccttttgagttacaggttgtgaaacaaacatacattccaccgctcgtggggatgcagacggacatcagagagaatggataagatcttcaaaccagaatgaataaaacactctgcaacagagcaaagaaaaaagatccacttgcttttgagcatcttctatgcaaagctgagatactttaggaataccaatgcttaaaaatcagtaataaaggtccaaccatccacttcgcctgatccattatcatgcgatgagcacaacggaatcttcaatgaaagcctcaagtagggttgattacctttgtatatgacatcttttagagccttccagttcacgtttctcatcatcagagccattactgctggggccaatactcttgctgtcaatgtctctggcctgtgaggattaccaaacaaaagagtgggtgttattccaacacgtatcttttgtatactagtttcaaaagctattacggtaagtatatgaaagataaatggaattctgtaaacgagatgttgagttgcaaacaaggaaaacaatggagcacgcaacagcataacactatgaacagtttcgatgaaacaatgggtgaatcaaatgtcacatctcaaatcagaggatgatcgctaaataattcagcaggataaagtttcatttatgtatctaacaactcataatattgaccggtgactagtttcacatcgtcacatgctgcaaatatatagatgtcacactgagaatcaggaaattatgcaaaatcattttgttgaacaaaggaatatttatgcaactttaacaactgacaatttttgcttttaatacactggaactaaggagatgaaaagctgatcagcgtcaagttattgtcaacttcaggtgcactaggatcaaacagacacatcatatatatattaataatacatcaaaatgcaatatgcacgtcaccagtaagaatatttctgaggtaaaacataaaatatgcaatgagcccatgaggactaaaagactaacatgcttgtaacttgctcccttcagtctttctcgaactcctcctccctttggtacttcttccccaatcgatccacctccacctccccctcctgatccccctcctcccttctttcctttctttttccgcttgtcctgctttcttttgtgcttaacctcctgacgatccaatgtgttttcaaagatgggcttgggaggtttctcatgctcaaataatcctgagttaaatgcatccctgaataagatcctgacaatactaagagccgattccatagaatctatgacaagtttctcatgcttgaatggttttggctctaggccctgtttcatgaggtcaacattttccattatgtgagcagaaattttcttgtacttcttcacatacatggggttggagggatgtttccccaatttgcttaaacccggattctcagaaaggaaagaatctttgatgtagtcatgcaccgggcgtaatcttgctgcctcagatataatcacagcaaatattgcaacatcttctgatatatttatgttttcaccaccagcatgcctccagaagttgtcaaatgcttttctaacaggccatagaccagtgggagtattctcaacacccccgaaaacaagcttgttatagttcaaaccagttttgagtctgatgcactttgggtccagagtgaagttctcatgttggtcatggttaagctcaaaaacacaatcccttgctttccatcctctaaggtacagatttcttccctgtatcaagaatcttatagaccgacccatgtacacgaattccacttccattgagcctccagctcttgtagtgaatacctcatggcactgtccacaaatatctgagatatccaccttaattccatcttcatatgaccaattaattacctcttcaatgccactaagatagcttgctaacgcttccttgtcagttccatcaaggcaaattgtggtcacatgctttgaggtgagccccctattcctgatctgctaaacaaaattacaggtgtgtacattcatatatggaagttaaatgagtaaactagcaacttttcaacaggcagtgctgcttaatggtcagttgtagttcattagggtatatccaaactcccaatcctgtgaaagattccaggcatattaaacttccaagttcagagtaacaatgtggctgatatatagccttgcaagttaactgtaacaatctggctgataaccttgcaagattataagcaacagcagcaaaactatggactgctgaaccatattctgttctcacatttttggatccaatatacagtctaatactctgtcaatagtgttttctatcattctctgacaatactgccgtaccaaatatccatattgaccagggcacagttattggaaatcatatccaagtaaaccaatcaccataattttgtatggcatttccctctcttaatataaaaccagcaagatctaggtttcaaaaaaaaaaaacaatcaccataatacaattaataggaacgactgaaacgaattcaataggttgtcctacctaggaaatttatgcactaattagcaagacaaaatcagttcggcaggtggatcataagttgcacatgctcagggaatcttactagcgctgcacataaatcggaaacaaaaatctctaataatgcacaatcaacatattatcgctaactctgtatcatgaatccgctgtggataaagtaaaattctgccgcggaatgacgtaagttctgtttccaaaatcgcatctaagccaattggtattcgataccgcgtcatctccgctccacggctgaacacaaacaacaacgaacggttaaagggggagacgattacctcgctcgcgtgaggaggcggaggcgagggccgtgagcgccccatcgtcaacgaatctgccgggcgatagcggcgtcggcggcgagaggttgctcccgtcagcgccgagggaaccctagggtttgagatcccgcacgcaatcgttgctggggcggggcagggcggcgaaatggtgcgcgacggcgatcacggagcaggcgaaatggcgaagagggggctcggaagaatgccgctgcgcttgtcgatgcaatatgcttgagaatgggggagttgggtctctgggcttcgttttcgggcatcgcgagattagtgggccgtccgtactcaaatgtgacataataactttagggaaaaagtacaccggaggtccctcaacttgttgaatcgtccttgaaccacaaaaccagatacaatgcgtccctcaacttataaaaccagaataaactagatccctgaacggttttgactccggttttgtctgatatggcagatgactcagcgtgggacccacgtgggtcccacatgtcagccacttcttcccctcccctcaccatctctcttcctctctcctcccctctccacggcggctgcagagaacagatgggcgttgcgggcgcgggcagcggccggcgagggaggagctgccaccggcggcggcggctctacgccggccgacctccagctgttgcatctgctcatcaccagtccgcggcgagacgacgacgccgcccgacgcactatggtcccggagcaaacacccgcacgcggagcccgacgccgccgacatgccaccgcccacgaccgcaaaccgcctgcagcagcgcggccctccgcccctcgtctgcctctttcgccggcgccggcggctctctgcgtcttgcagagcctctcggcgatggtgtgccccatgtgcattgacaggtgacgagcagcctcgtcgcggcgacatcaagcgcctccgtccgggagctccacgatggagtggccctggtggttctccctgacgaccgagaccacggcggcgagcgaattggcgtgcgcggtgagcgcgacaggacacggatgatgctgaggttgagcttgtgaggaatgaagcacttgagcatgtggatgaagtcgtagatgg

SEQ ID NO: 8335 - DNA, 39484 bp, Oryza sativa
tgacaacaagttgaacgagacaattagcgatgtgagatgcgaaagattattccagaacagatcacaagcaggcctgtgacaatcatgtgacgcacaaggagagagtatgggaagtaaagtcaaacaaacgagtacatgatgagcatttttagacggatttaggacttgacgagtggtctaaaaacctgataaatcaggtacgtttattcaagaaaaacataaaacatttttttgccacctactacattattagtgcgcacattaccagcagccctggcttattatcacaactcaacactttgacagaacaagcacataaactagaggacgtgctcagtgctcagctcagctctcctcctcggcggcggcggtggccgtgctgatcttgccgcagacgctccgctcggcgtagagctggtacggcggcgcgtcggtggcgagccactgctggacgtcgaacgccgccctgttgcacctggcgtggggaccggcgacggtgacctcgacggacttgcagaaccacccgtggtgctcgccggcgccgttggagacgagcttcatgcggcagacgggggctcccaggcatggcccgcggccgctgaagatgtcgacgttgctccgctcgaagtagtcgtggccggccgccatgaggccgccccacgcctgcaggttcctgatgaggatgccgttgccggccgccgtgtagagctccacgccgatcgccgcgtcggtgccggccttccagatcgagcccgtctccacgtagagcgtgtacacgcactggttcgaccccgtcgagcccgggagcagcagcgcgcccgtgtcctcctccgacgttgctccggcggcctgcgcattcaaggttatatatggtgaagctgatcacgagatggactcataagcgagactcagaaaatgtagaacacgtaccaaagccgccatggaaatgagtgccgcaaagcagaggagcttatgcgccattgttgaaggcttgaagaagcagactgtctcgacctttatctgcactttttgagatgttatgtgcaccgacgatgatctacttcagctggctaatgaggcttcttatagacggagacaaaacggataggggaattggaaatgctaccgtaagattaaactagcatggtggcccgcgcagattgcgcggctagcatcattatattttctctcatataatagcatatatgttttctcattatattattcaaatatattaaaatgaaaacataattttaaattttgcaataactttacaaaactactaatgtgtaatattcatattatattttatatacgtgttagttattaattatttttaatgtcaaattttagttatttgtaaattatatatactcctatatgtactctagacttgtcttttaatacttcttttttttaattctgaattttctgtaaattgtatttctatatagactgtttgctcttctttcaatattatttatttttatttttgaattgttattattactaattgcatttatatgtggactctaaacttatctttcaatattctttaattttaatttcgaatttcagttacttctaaattgtatttctatatttgtattcctatattgaccttaaactcttcttcccatgttattcttaatttcgaatttcgaattttagttatttgtaaattgtatttttatacatactctaaactctacttttaattttattatatttattccaaattttagttagttttgaattcctatatggactctatactctacttctaatattccttattttttaattctaaatttctacttttttcttaattgtatttctatatggattctatactctacttctaatattccttattttaaattgggtgaatagctaatatgctccctgaagtttcacttcgggctcagtttagtccttgatgttttaaatcgtccaaacaagtcctccaaattaatcatttgagttaatatagtgcttggacccaaaaaagtgccacaaattaattatttgggttaatataatccttggacccacaaaaagtgccacgtgagcatgtcaagtcatcctcgcatgcagcggtatgaatgaaatgaacattctacccttatataccatataaaaaagaaaacaaatatttcacacatgtatggacattttagaattgtcacttacgattgctgcagcctaatcgtataaattcctttgtcggccaccctccgcaacaatgttgggcctaggttagctttttttttgtgtcttttatttcttttctatatagtatataggggtagaatagtcatttcattcatatcgctgcatgcgaggatgacttggcatactcatgtaccatttttttggtataaggactatattaacccaaataattaatttggaggacatgtatagacgatttgaaacctgactaaactgagcctgaagcgaaacttcagggaccatattagctattcaccctttttaattccaaatttctattatttcctaattgtatttctatatggactctatactctacttctaatattccttatttttaattccgaatttcagttatttccaaattatatttctatatggactctatactctacttctattattccttatttttaattccgaatttaagttatttcctaattgtatttctatatggactctagtctcctcttctaatattccttattttttaattctaaatttcagttatttcctaattgtatttctatatggactctagtctcctcttctaatattccttatttttaattccgaatttcagttatttcctaattgtatttctatatggactctagtctcctcttctaatattccttattttttaattctaaatttcagctatttcctaattgtatttctatatggactctagtctcctcttctaatattccttatttttaattcagaatttcagctatttataaattgtatttctatatggactctgctttttctttttctccgattaatgtgagaatttctaggccatgagagcgaacgtggaggctcatttttctattcctttaataatataatagatgattagtgtactgtttttttagatgaatgtgtcgttttttatgctttgattagacaacaagttgaattcaagaatgaggggatacaggattcttcaacggatcaatcgatgaatcgatcatgtgatgcacaaggatgatgtatcacgtagggggatttaagtcaaacaacgagcttactgtatattcaactgctctgctctagctggcctgccagtagagcacaatagtgctcagatatgatcaccatctatgcatcttctgttttggaggagttgaatttcattctatactcggcaatgatttttttaaaatttaattattactctttttctgtgaatcatgtgttagaaagctgcattaatggcccagctcggtgttttgtgattcacatttcagaactttaggacagcttcaaagtttaccaacattatctagtagtatagagtaggacccaagacatgtcattcatatttgcgaatggatataggctatgtttagttcctgaaaaaagttagaagatgagggaaagttggaagattggaaaaaaagttagaagtttatgtgtgtaggaaagttttggatgtgatgtgatgtgatggaaagttaaaagttggtgatgaactaaacacggccataaacgtcaaatctgaaataagtggcgaacacaactttaaaatatagatgggatgacatttagcaaggagctagccctagttcgatgatggcacatcacatataaaatcatagtcaccggctcatggacccggcacggtgacacaccgcacaaacatcaagcaagttaacaatgaaaattaaccggcgaacaaactcggagttaggtaggtgaggtactaagctagtcatgaatatgagacagtgatgaagaccttatgtcagaaattaaggatgaaaatggtcaaaccaaaaattattaatttagaaacaatttacaaaattttccatttgtaaaaaggtcctttttactctcctgttccgtactatttcatcaaatcacttaacctctaaaatattttatttcttattgtatccctaaactaataaagatggtttgctttactaattaattgcaattttgttttttgtttctctttatacaactcgtaaaaaatgttaagccataaacgacaccataaccaaagttctaaaatattttcaaaattagtgcttccaacctatataaacaatgataaaaaaatgttaacaagtagattataatggatctaccaatcctattaaatttcaatgcaaatatgccttatatagagataaaaaaatgagaaatattgttagggtgcgagtgaaccatcttcaatagttcgggttgtaaaataagctaaaaaattatttagaatgaccagtgctccaccaacatagttcgaggcagtaaaatagaactttttaaatatatttaccaatttaactatttagtatagactaggtactaaataaataaaaaaattcaaattttatgtatggcaaaaatggggaacagtcaaaatagtaccaattataaaaaataatacttattcgaccgtgaatttccataaatatttttatccctgttcaaagtacttgatttatctaatggtttgaaagtgggctgacggctaatgtgctagaaatgggctctaagggtgtgaggcggtacagaccgtagctggaccgactgacccaccccgcttaatgggtgtgtccacccctatccgaaatacaataatactttgcttatctattggaatgggaaatcctcttaaaatttgcctaattctgaatagctgggccaatttacgcttgcctcgaatatgaaacctaaaggcatttggaaaacaataaaatgtgcctatatatacttgcagtggcttagctgctccttggactagatcggtataactacttgaatatgaatcagtgagggggcgatgtatcctagctagctagaacgaatcacttacaattggtggccatgtgatgcacaataagaggaccaaacaggtaacacaagtgggatacaaatgcttatatataaccttacatcacctatgttatctgaattagatctagtctttctttttgttcttcttattcttatgtgaatcatgtgatagaaagatgatgaattattaattgcacccaacataagtgtgaacatatcctatgcaagcacacaagctttctcgtgtacataccgtgcacaccaactaaaaaatatcatcaaaaattctaaaaaaaattgtacatgtagttttagtagtatcacatctatgtatgaagtctcatatccaaatttattatatatagcgagaaaaaaagatattatttttgataaattgatattctcaaaactttcaacaatttatctttatgttacggtaaaatataatgaatttaaggttaagactttatgtaacactattggaaatacttgtacattttttttagattttttgataaaacttattagttagtgtgcacgatgtgtgcaaaaaattcttgtgtgcacatgatttatatgtttcgaacacaaatagtccaatatattaattatatctgtgaagtttatgctacttcacaagatattggcatgcacgcttgcatgtgaatggatctaatccaactatatttttatccgagtttatgccgagtagagtgcatgatgaagaggagagaacattgatgcaaaaccgcgcttgtttgaggcatggcacgaggaccttcgactgaggctgccgaaacctgataggcttaggcgaagcgccagctgaagaccaaggttttcgccttaggtgaacccaatgggcgaacccatcgggcgaagcaggagggattcgccatcaacctagatgccatttgctacttgagggccaattataaagcccattaaggagcccatgaccaaatagacactagttactctcataagtattatcataatggcataaaatttgacaatttgaccctttgcaaaaactaatttcacaaatgaacaatggccataacttatttcaaaatgacccacaaatgaacaatggccataacttatttcaaaatgacccttttgttcagcgccacatcgtatggcgctgaacttagacacctcagcatcacgtcaactggcgctgaatactgtgccacagcggatgggaggctgagtcggcgtgctaacgtgcattcagcactgtgctatttggcgctgatatgtctaagttcaaggccatatgatttggcgttgaacaaaagagtcatttttaaaataagttttggccgcggctcatttgcaaaattagatttcggaaagggtcaaattatcaaattaaatgatcataatgttatccatgtaaattcccctatacacattaagtctagggtgcatgaccttgtactaaggctataaatagtccctagagacatgtaataggggatcccaaaaaattcaatcaattaatacatattgctttacttactactatgcaaaccacgtctttcgacgtgcgcagttatcaatcgacaaaagtgctgttggtacaggaatcaatcataccgtaatatcccggttgtaaaaagaatgaatataacacaaaaggctcatcaatatatgtttattccagcaaaatctacacagtaaagttacattttcgccacataccaaagtaattaacccgcactgcttatttccacagcgaacgctcaagcagttaagccgaaacagagaccgaagcggaagatcgatcacaacaatataaattgagaaaatccatgaaatgctatcgacaggcattccaatcccaaaaataccatcgacaaaagcaacatcttaaaaatgccatcgtataagcatttttctcccagaaataccatcgtcgtcaatctaccgttgatttcacaccgttacaatttaagaatgaccaaattgccctcagtccaaaatataccctagcattcacggtaaaaaggaaaaagataaagatgaaatggggaaaatgtctagacccgatccaggcggctctatcggcggcggcggtccatggtggcggcgcggcagtcgtgggggcagcggcgtggaggttgctggctgtggcgcagggtccgaaggcattggcgtgggggctgtagcggcgaggaggccgcatgtggcggctcgacggtcactgggggcagcgaggaggccgcagtcgccggtccctgaccgccttcatcgccgtctctcaggtgctgccgacggtcacctgaagacccgacgccaggacccagcggtgactcctccatctcgggtccgacggcacccagatcgtcgcaccctcgcatcacccaggctccgcccatcgcgccatccccacgcccatcgagcagtagcgccgctgcccatcacgcccttccccttggccatcgatgacctgtgatgcagtcctgttttttgggaatctgcctgtcctcctattgctgcagacgagaggccagaaacaggtcaatagctgcagacgatggtatttttaggaagttgtttttgtcaatggtatttttaggattaagatgcttgtcgatggtattttatggattttctcgtataaattacatgacatatcacaagacagtattgcgcaaggatgcacaaatttaaaaccggaaagaaatgagacagacgtatatatatcgctgcattatttgagccgcaacacacagcaccgtcgtcgaagccagcgtctgatctgctctacttgcagacgcctccactcggcgcagtgctgctccggtggctcgccggcgagccactgctcgacggcgaactccacagtggagcacgatagatgtcggtgaagatcgagcacgccggcggtgtcgtgcgttcggcgtcttcagcagcatcgtatactgattggccgtgcatagacggtcccggtgacccggtcccggtctctgctgcatcatcgccacggtcctcgggtcccggtgtacagtacacgcacccgtacttctcctcgccggcggccaccaccaagtccgggaccgccagcgtcaataacgagactagctcaaaacaaactaatgtgtatatacgcgcgttcatacgtaccaagatcgccgtagcaacgaggatggcaaagcagaacagcagcttcctatttgcagccattgggtattgttgaaccttcaacgagtagctaggctcgactgactctagctagtttattttgcacttctgttgaggctgtgtttagttccacgctaaaattggaagttttactaaaattgaaagtttgaagaaaaaagttagaagtttatgtgtgtaggaaaattttgatgtgatgaaaaagttgaaagtttgaaaaaaaagttgggaactaaactgagccgtaccgatttgtgagctagaggaggctaacgagggtatttataaggcgagctagaggaccagagctaatatgttggcttgttaaatattctgagggatggtgcgtagctgaagcataatcccttcgtcgtaaaataaactaactcatgataaaatgtaacattatatatactagacaccgatccacgtgacatagctattactttcttaattataaatattagaactttgatcatatatgaaatatgatgggtattttctgaattatgtatgatgctttagtaagaaagtccgcctcactttcaagttgctagctacaactttatactattaactctgatttttaaaattgtcaaattttataaaactaaaattaaaagagtcaatgttacttctagttcaagttctattttacatgtgctcccaatatcatctcggtttcaatgattctaacccatggctagatatattaattaagttaagtgaaacctcttaaagtatcataatattattagtaattgatatagaggtagacagaaggacggcactaaaaaaagatgcgcgcaacacggcaagtgattatagaaaaggggatcgctgatcaaggataaaatagatagaggatatcaagaattaagtttttagaaagaataaaatatatagaaaaggggatcgctgataaggataaaatatatagaggatatcaagaattaagtttttataaagaataaaatatattaattagtggtaatatatcttgtgagatgcatacaaattgataacttatcttatataaatggttttgatagttcacacaacttgattggagtatgatcaagctcaatttaccgcatggccttctaattataccgataaaatcacatcactatcccaagactgatatggatgaaatatacgatcatgccatataatatactgttgtgctgagttcaatagaacttcgcatcatcttgtgtgagtcgttaaaaaataatatgttgttgtgctgagtttgaatggataagatatgagttgtgcaagattgtacaggaagctgaaaaattatatgaaaggaagggcattgtctagtgtttgatttatatctgatcgtccgaaatgggtttatagtgatcgcttgcgtttgtagccgtcttacctttttggtctgaagtctaaaccgcagagcaccggctccaacgaggcgcgcacataaggaaaggaaaacctgcaacaactccatggtctcctcccgtttcgatcaaacaaaagaccagaaaataaaagagaaaaaggtaatagtaagcctccgttcccaaactcccccaaaggcctccaagctcgagctcgaccccgaaccggaaacattcctcgtcggcgaggagcggcgagatcccccgggccccggccatggaggggctcctgtccaagctccggagcctggacgcctaccccaaggtgaacgaggacttctacagccgcacgctctccggcggcatcatcacgctcgcctcctccgtcgtcatgctcctcctcttcgtctccgagctccgtacgcctcctcgctctcccctccctccctccctctcacttccgatctagttccgctgctctcaaccctagcctccggatgggtgcctttggagatccgatggccatggatttgagtatttgaccatgggggatatgctggacgagggtttgcctgattgatttaattcggtgcgctagtgaggtgtgggccgttgttgcattgtggttttgcgttttacggcgggaattcgccctcaccgtagagatctccttgactgttttcgaggatctggttgatgaggctggaatcgagccactatttcgactatacagcgttgagttttgcttcatctggttgttactggcttactgctggtatattgcattgaagaatcatttgttgctcaattctgttacatgaataattggacagttcgtgagcttctatttttacttttgttgtgctgtgcttggttaagtatgcgtgcagaacattctaccattttggtattaatgtgttctcacaactcctagggactccataatgaatacgaagatcaaacttgcatgcataatgttcggttccttgtgtacagagaaacttgagatgctgcagaaatgagttaaaccgaacttttgatcatcatcagagttccttaatatttactatgtatgacaaaatcaaattagtccaagaccatatcattaaaatgaaaaagaggggctgtttttataatatcatgttttatttctgagtgtaaaaatatactcacaatgtctaaatttgcttccatatcctagtgctgttgaacattctttttgtattcatgattcatcctgtgctcagtagctaatgtttcaccatacaggattatatcttcatgcggtcacagaaacaacactaagggttgatacctcaaggggagaaacacttcgcataaatgtaatgaccagctttaattctaaatctttgattgcatctgattatattctaaacctttcttttttatttctaccaaatattgagaaactttccgttcctcatttcttttagataattttctcaccgttgttccctttttcctttctttttttgtttttcttttttgccagttagctcatctgattatattcagaaatttctctcttctatgttcgattgttaccttctttactgcattctgttcaggacacacgttgacatatacctttggtatgattctaaaaatgcagtttgatgtcacctttccagcccttcagtgttctataataagccttgatgcaatggacatcagtggacaagagcaccttgatgtggtatgtatctgtgtgttgttattgttgctgtatgtgttatggttgatcactggttgttgcagacttttagtgagtagtagctaacacagctttgtgtaatgctcttatgtagaaacatgatatattcaagcagagaattgatgtccatggtaatgttattgcaactaagcaagatgcagttggtgggatgaaggttagtgcttttcactgtccttaagaacaatacgctcatgatttttagaatatagtaaggcgttacttcaaagtcccatttatgaattaatcaaaatcataactagtatgaatgcattttgtcatggaaatgccttaacagtcctagattcttaacgtgaagctaacgaggactggttatttaaaattgtaccatatctgaaatctgagctattaacaagataacataacatatatcattttccataactatgcaattaagtaaattctggcttgtaatgtccagatcttgatgcatttcgttaaccctaaagatgcatgtttccttgtttcttattttttacaggtggaacagcccctacagcggcatggcggcaggcttgaacacaatgagacctattgtggctcttgttatggtgcggaagaagtatgctcctcttgcttttagatgatatttcgtcctgactcgtatctctactactttaaaagcgaagttgtcccccttagcatctgacttcacccacatcccccccccccaaaaaaaataaaataaaattaacaacaacaataataataatcataataaaatgtgtttccacgtgaaaattgacgcagaaaaaccagatagaaaaagaaaaaaccattcatccgttttcctctaaatcctattcaactcaagggcatgcaactagcactatacaaaagttttactgccctgtggccttagcgaaaaagacacacctgatagtgatagtaggggttatcagatataatttgcttgggttagaccatttaatttttttagctttctgttttcttctttatttgcttactgtacaatggattgccctctgttttgcaaccttggccattactcctttgtgttttttatgggatattgttcttatattttagctcactagtgccttatatgctgatctcaataattccagggttcttttctattatctgtttcttatttacatgaattagattgttatatagtgctccgtatatttggtacatcagtcattcttccaggggtttcactgaatatcttctttcatttaatttagtctgatgagcagtgttgtaactcgtgtgaagatgttcgagaagcatacaggaaaaaaggttggggtgtatcaaatccagatttgatcgaccaggtataaaatctttttttttattatgtgctataactatgtacctgcatatgtaacataagttgcatgctgtataactcgtgttccttccacctaggggcattttattttgcctgatatgcattgttctgtagtgcaaaagggaaggcttccttcagagtataaaggatgaagaaggagaaggatgcaatatttatggtttcctggaagttaacaaggttgctggaaatttccactttgctccagggaaaagcttccagaaggcaaatgttcatgtccacgacttgcttccattccaaaaggacagcttcaatgtaataatacttgagcatgatttctaactgtgaatactggcaggcaggaaaattattgtttccatgtgaacattctttctttaatattccaacttttactttattctttatgttccaggtcagccataaaataaataagttaagttttggacaacgctttcctggtgtggttaatcctcttgacgggtagcttgtttttctcatgttttcatttcattgtgtccttttctatgtttattagaattaagtgcatgcgcctaagaataataaaagtgatactaaacatttctaagatctctctgcttgtaaaatatcagggcacaatggatgcaacattcatcatatggaatgtaccaatacttcatcaaggtctgtcctatactctttaactatcttaggaaaaagtatggaatgctaaatcatgttgcttatttcattgcacgtgatattatagcatgatataggaaatgtgatgataatattgtgttttttttcaggttgttcccactgtctacacagacataaatgaacacattattctttcgaatcaggtaatgccttccttttttccctcatgtgcacaagtatcgtcaagttcacctatgcacatgtatgtatggatggatacgattttaaacatatcttaaaatgctgttattccttgctgcagttttctgtgacggaacattttagaagtagtgagagcggtcggatacaggctgttcctggagtatttttcttttacgacctttcgccaattaaggtatcgttttgaagtattttctctgacgctgctattagactggcttcccaatttgcatcatcttctgtgttgtcttttataccatattttccttatatgaatgggaaatcagtgttcatgccttcaatgtttaataatacatcttgcagtgatattactgcaacaatcatataaacctcccatcgatgccttttgcaggtcacattcacggaacagcatgtgtcatttttgcacttcttaactaatgtttgcgctatagttggaggtaatatttcccttgtggacattgtcttacacttaatactcaattttattaaactgtatatgtttcatttaagcatttgatattttaagcatcgaatttctttttcttcaaaacctgagatatctacatttgtgtctaagaacaaacaaaatgtagctgctgaagcaagtgaacgatacctgaagttagacatatgtcttgccatttagtctttgtatatttctctttgttttgtctaatttagtctactcctgaacgatgtgcaaaatatgcaactttttttctgtcagctctaggggccatacattattagaagctatgaaattaacccaggtcatcaacatcctagtaacctaaggtgcctatcttcttgatgtgcaggcgtcttcactgtttctggaatcatagattcatttgtataccatggccagagagcaatcaagaagaagatggaaatcggaaaattcaactgaatattgaatgtagccttcctgttggtactacccacaactcattccattttcaggacttacttttgaagaactattgtcacagtagggggcgaggccgctccaagttcaaaaaacgccagtgaaccaacccactaatatttctcatatgctttctgctctgaaactattgattcccgtgcatagtttataaccaactggtcatcaaagtacaagtgacttggctgcttgcttccagcagaagctacctgtaaaggaaatggttcatctggttatactgccctggggcaaacggagcatttcagagatgctcaattttgtacaccataccaggaaacattttgtgtaagctgcatttttttttcttttgttgtaaatcggtgactccgtgttaatgagctcttgcttctttgtagaacagaaaattttcctgactccgtgttttatacatcatattcttttacttacctgtagctttcacatgctaggtaaaagaatgtgtaattatttcgaggaaaagtttcttttctcccttgctccccgttctctacaaagtttactgtaatcggtagaagtcaatgaccattgtattagatataaagtaaccatgtgacggtgtggatggtatcccataatgaatgcaccatgtcttttgctccgtccgtcataaaaaaaagataagtatttatgaatctggatgtctagaacttcatgtttatatattttttatattcaaggatggatgggtgtgctgtatatacttgttgtaattaagaaggggccattttgagtttacttaccgtgcaaattgaattttgttactgtttggtacttctatttcctgtccactttctttgtcttgaataaaattatttttaactataatttttttaaaaaataaatttatttttgagtaatcattggatgaaagtaaaaaagaaatgcattggaagtagataaagagagataattatattaaggtttgattaagttaaggtatttagtttttttattggtacgtgtgagatgaatgaaaaattgagtgttttaagatggacgaagtatttgtgagaagtgcacatgaactttctctgcaagcgcttctattcaatgaacataaataattgtattcatttgctcgttcttaccttcacataaccttacctgtttctttaacaaagctacagagctagtactaatgtttagtggatgtcgatgaaatttgttcagtccatacgtacttgatctgtattcagtgaagtgcctaatagtattataaacaaaataaaatgtattttattcaaaaaataaaaaagaaacaacaataagaaaaaataaagcgaggaagaccatagcatcgtcgtccgcaccaaaccaagcaaactccatctcatcgtcgctccggtccccaccctactccaccaactcccgccgccgccgccgccggcggtcgtgcgctccgggccgcagccatgcacggccgccgccacctcgccgcctccctggcccgcgccctgacctacgccccctcccgctccatctcctccaccccgtcgctcctccaaaccctcgacccgtccacgccctcccccgcggccgccccgcccaccgcggggcggctcgcggagctccggcagcggctgcaggcggacgcgccgtcgctgggggacttcacgtactcggtggaggtggggacgcggaagaagccgctgcccaagcccaagtggatgaaggagacgataccaggcggcgccaagtacgcggggatcaaggccaagctgcgggagctgaagctgcacaccgtctgcgaggaggcgcgctgccccaacctcggcgagtgctggtccggcggcgagaccggcaccgccaccgccaccatcatgatcctcggggacacctgcacgcgcggctgcaggtaagagattaatcctcttcttgttgctgcttgcattagatgtagctgggctgctgcttagatccttttcggattgtacatggagaccttactatcatgtctccgtaatattagagactttatctgtagagatagaatgaagctttctcatatgctatccatttcgatgaaatttcacagattgatgtccttgaaggtataacttgagccatgttagtgcaaatgatgtggttattgtatcttctagtttattttagttgcttgtgctagattatgtggatgcttgagctctgcttgtgatgtaaaattaggtcctatcatttgtgcattagggatgttagcaaaaattgtagaaataggcaaagaggtaattaacttagtgtagagaaatcatgagggatctccagttcttctgtattttcgaataggttgttttcttaaacataaatcaaccttgttggaaatattttgagcataaatttcaaaaaatatcagaataggttgtcctgtatgatgacaatttcagggtactgtctctttatctagtactatccatgtgaccttgtatggaaagaagtgttctgtgttattattgttgtgatttgtccatgaattccagttgctagtttaagatttgctgatgttgcactctaccttctcgtgaattggcactaaccttttagacaaggtattgcaagtcttctgttttgatcgtttagtgagttggcaagtcattgatttgcaggttttgtaatgtcaagacctcgcgaactcctcgccaccagatcctgatgaaccttctaatgttgctcaagctattgcctcgtggggcctggagtatattgtcatcacaagtgttgaccgcgatgatttacctgatcaagggagtggtcactttgctgaaacagttcaaaagctaaaggtgttgaagccagaaatgcttattgaagcacttggtaagtgacatatttctggtatattgctttgttattcggtcagtatattatcagtcctctgtctgctaatgttgtgcttccctatattgtacccttatgcaagttattttgcagttcctgatttccgtggagacccagcatgtgtagagaaggttgctacttctgggttgcatgttttcgcccacaacattgaaacagttgaagagctgcaaagaaatgtgagagatcatcgtgcgaacttcaagcaatcaatagatgtcctgaaattggcaaaagagtatgctccagctggtaccctcacaaagacatcaatcatgctgggttgtggagaaacgcctgatcaggttatcagcacgacggaaaaggttagggctgctggtgttgatgtaatgacatttggtcagtacatgagaccatctaaacgtcatatgcctgtttccgagtatgttactcccgaagcctttgagaggtatcgatcccttggtgttgacatggtacgtccgtcttcctggaagttttttgcatcattcaaagtaaaatcaagtattggctttcattagtaggatacatagtgtacatggcaaagcttaatttactattaacatcagattttatcacaataaagaagctttccttggcatcctcatgtagactattagctagtcaatctttattagttttcaatgagggatatgataaacagaacaatacaaccaatctaaatagctgtttatttgctctatcatttggtggaccaaacttgattttttgagaacgtaggcacttgctttgtcatacaatctgcctccatgctcagttattcgtctaacaatcttaactccagggatttgtaaatctcgactttaaatttgggctcctttggaagaaaggatttttgaaggaattctggagaaattcaatcctatggaaaattttcatacgtggtcgtttggatcaaaggaatagatagccaaaaatcctataaaattttagattggctcaaaacataagaatttttccatgaggtccaacctcttggggaaaaaaatcttctctctctctctctctcttcttattcttacatttttcctgggctccatttaaacggtcattcctatagtattcctgcaatttttcagtccataggatttgaggtgcttgagcactccaatttcctgtatttttcctattcctgtgttttaagaatcttgctttccaaaggagccttgcatgcatttcttaatactcccatgttggctctcagaatctttcctacagttcaaggtttttaaacaatactactgtactttgtataacagtaattagcttgtttgctgatgaaatgccatggtcatgaataacagggcttccgttatgtggcttcgggcccaatggttcgatcttcctacaaagctggtgagttctacataaaagccatgattgaagctgacagagcaaaagctacgactgcaatatagttgatcctctttccttgacattgttacactgcaaataaagtcgcaggattctaaaagttcttattggaaaaacatgttcatttttgtcataattgcaatcgtgctcctttcaacttctcactgccccttgtaccatttcaacatctccaagctatgtttgaaattgttgctctcttttgttttataatgtaaaaatcacgagtccctgtggtccagttgtcaatcattcattcattgctgtaaacttcaacagtagcaggaagtcaagtcaaactacccactgaaaatgtaggatattgtccctcatgttactatgctgtacttttgtatatatgatggcacaatgtgaagatggtaaacttgcctgctgttccattgaagatcagatctgatgtagaccattccaaaaagatggagcccgcccaatgctccaagatcgacgaaacactctttctgcaagtcaacaaaggccctcccccaggggctaattggaggaatatgttaggggtaaagagcaccactacgagaattattgacacttccatcggtgtcttgtccccaaaagaaactaaatggccgtgcaataataatgcttgaactcgctgaattattatattgcattgtggacatcccgttgaagttgaaggccaggaggatttgcgtgtcccaccatattcaccagcagccacgctgcagcaatgagtttcgagtcaaaccggcactagcacgaatcgctagctcctgtagccatatggacgacttcttgagccaaacggcacccagtgggtttggttcttgtgtgctgttatcctgtcaaacgtgctttggtggttacagacatgcataaaggaatcgcagcagcgatcgggatcactcgatcaacggattcaactcttcaaatgaggtgaaggtctggaggatcgagttagaacttggaatgaaatcactgagtaatctccggaccaaacaccctcttaaactaatacttactccaccttgtagcaaagcgcacatgattacatgcgtaatataatcgactgtccgatctgtcccgcaggatcgcaatctacttatgtacttatccgaatccgattcggacggagtccctcacctttgcttagtttactcgcgtttctagatttccaaagcgcctaaagaggcccacggggatatcaaataaaattccgcagtgccggtagttatcagcgagctatcccctcatggagtacgtagctgctgcgttcgagcccacgattcggccgtgtcaacctcacgcaacatgcgcgcgcaccggtagatatccttatctcgcgctaaaaacacacgtacgccgcgccactcttccgccggctctatgccagcgaccagatcaaccctttgcagcgcccaagggttcgcgactcgcgagccccggtgggatcgcgagattgtctcgcggaaatcccactaaaaaaccccgaggagtccacgcgcgcgcgcgcgcgcccgtgccaatcccctcccctcgcgaaagcgagagccatttccaaccgcgcctcgcactgtgaccctggctatatatacacgcggtagctgcgttcttggaagagaagagaacaaattaaccgaagctagtgtaagagcagagaagagctagaggtttagagtttgcggtgtgtgcgtgtgcatggcgagcgtgtgggcgacggagcagccgggggtggagctcgaggtgaaggtcgtgagggtggccggcgtcgaggcgcggccggaggggggaggcggcggcggcggcggcctcttcgtgaggtactacgtcccggctggggacgggaagcggaggatccgcgtggacacgcgcgaggtcccgtgcggcggcggcgatggcgaagaggacggcgcgttctggggcgagctcgcccgcttcgagcgccgcggtggcggcgcgccggcttcggtaggcggggtcgtgttcgagctccggtggaggccgcggcggcgctcgccggcgttcctcgggatgctcgggaacgggaggccgtcgtcgcgcgtgctggcgcggggcgagctcgcgtgccaggacaacgccgccgccgccgtgacgcccgcgccggcgtcgtcggggagtacctggctgaggctctcgccggcgtgccgcgagctgagcgggtgcaaggcgcccaagctgctggtcgaggtcaggatgatccacgccgccgacaactacggagccgtgaaggcgacgaggtcgctcggcggcgtgaaccaccactactgctgcagcgacggcgagcggtgcgcgcagtgcgggtggatcgggaccgaggaggacatgttcctggcagcaacgttcacccacgaatgagtggcgtgatcgttgatttcgtagttcatgggagaggagctagttaattaacctaactgtactttcgctgatgaaatgataaaagaagctctcgactacgaggcaatttagtcatgggattttgatcgattgtccacatatgttgcgacatactccgtatttcggcatcataaatcaatgatttttggtacattggattaaaacaggggcggattcaccaagtgaattagacttgtctcggccccaaaagtttctgcactcccatagattatccttcagcttataagcgcaaccaaaattttaattttaaaacttaattttgaggtttttcattgtatagcttatttttcctgcattagctttcaaaccgttaaaaacacatatacaaattgttttcggttgatgataagctattatagcttataatccgcataagcaaaactatgtattggattcggcgaggtcaaaactgataaatacgctacgctcaaaattagtggattatatatgccgcattcttttctgattgattgagatatatattttacatcgatttttgttagcatgtttttttaaatcccttactgctatatttcatacgaaaacattctatatatatatagaagtatttttaaaaatatcagatactaatgaaaacttaattaatcatataatggttttcttgtttcttatgagctgactttatttttaatcttcagtgaaacaccctcatagtggcgtcgtctgttcatttccgcctcccgactcccgagtggcaacggcggcttgaagtactgtcagtctgtgctgccacgtactcctgactcgcgcttgtacgttcgcggcggccgtgtgcgcgaccgtgcgtggcggcctacacgcaatccacggcgccctcgttttggttccgccgtccgctgacttccgaggcgatacagccatacaggctttgcattggcgcgtgatctcaacccatcgatcacgccatgagatcatgttcaccggcttgaaaacgggtacgccgtacggcgtacgcgtatgcgtacggccgagctcgattgttccataggagtagatttttgcagagtagtacaacctttggacctttaattcagtcgagatctcgagagaagaaaacgaagaatactagtagtaatatctagcgtccgcattgtacctggatttgcagttcgaatatccaagtcgagcagtatactctatactccaaaggaaaaaaaaaaggcataagacgtgcacgcgtagtagcacggctgcagcaaaagcaagcaacaaacaacggcaacacgagatcgtttctttccttcaaagtgtcttggcgcgccacacgggccaaacaccgggagcgagcaaggaaaggagggggaccccacgcatcagacagacgaggggctcgcgtgatgaagcgtccgagagaagggtcccactcccactccgacacaaggccctgtccttctgacagcgggccattgggaccctactgtcagtcgcacacggcgtacctgcgggctcgccgctcgatcgcgtgatcgtacgtggacttttaaaccgcttcgcgtgctccgggcgctccgagccacgtgcccaccggcacctcggccgcgcgggatcctctacgcccaaatccaataaaaatccacttcgctccacccagcacacgcgggctacacggttccaacgcagatatccacggatctcgtgctcccgctcggttcccttccctgtacctgtccaggcaacccgtacccccgccctgcgcccaccgacaggtggacccacgatcttccgggcccacatgtcggtgacgtacaggctactgtttcggtgacgcggacggggacggagggggtgcgttgcgcagctactagtagcggccgtgctctccaaacagcggcagtggtggcgctcgcatttttttttcagctccgcggaaggaacgaaacccaacccaagcgaggcaaaagcggcggcggcggaggaggagaggagcaatggagagggcggtgccggtgaggaagccgcacacctcgacggcggacctgctcacgtggtcggcgacggggcccgacgccgccgccgccgcggcctcgccggtcgcctcctcccgccccagcctcaaggtaagctatgactaagccgtgctcgaatgctgctctgcttccccgtgcgttcgagtgcgacacgcgaggctgacttttttgagggtgcgtgtgggttgtttgtgctggtgttgtggtgtgatgtctggcggccacagccggccggggggatcacgccggcgatgttcggcgcgccggtgagcgagaaggaggcggaggatctgagcaagaggtgagatctggggggggggggggggtacccatcctgccgcattcattgtttcgtccctgatctgatcgatctatgatttcgttgtgctgtgcttctcattcgattaattagcctgatctggcattttgatctacgaacgtgtgttctctgtttgggcgtgtggtttagtgcatcaacatttcgaacttaggaaggttggttggggttgttgctctgggtttaggaagaagtagcagctgaagaaaaaattgcgctctcgacgcctttaatttcagggtggtttgctggagggagaatagtcgcttgcaggtggttggttggttggttcatgtgacgatcaaccgtgtccgtgtatgtgtggtacagtgcaaacatgagatgtttgctaatgtccaaatttttagtgctagaatccaagttttagcagtacaggcaatgatgcttgaaagtgatttgggctgaggcaaacggcaaatgcctggttcaaaatttggatatttctgtcgtgggtgccacaaagagaccagaaattatagcttaataagtcaagtcatgtggagcctgactgtttgttctgacctgcagttgtgaccatgtcattgcatacactatgttattacttcgcctgtcatagaattttgtggagtgttggctgtttatatttgtataatttatggaaaacagtccatgaaaatttcttgatggaccactttctgtggtggccgaattatggtagatgttcttttttatgcacctagatttttctagtttatctgcctttgagtattcctgcttctctgctagaaatttatcttcctctgcggttgaagctttggcttgaaactgtctatcttgcatgtaaagctcctgttgaatttttacagcattttcttattgtagtgcagttaatggtacgtactgcctgttttagttttgacttcattggttttgtataccaagacatgaagttagttcgacgaccaactcttaagtgtctagttgtaacaaaatcagtcaaatatcctttattcatatgctatactttttgaagatatggtatattgaacttataactttgttggcctgttatagtgaacgaaaattttgctcgggctcaaagttaaaagaaatgactggaagtgggatattcgctgagaatagtgaaaatgatgattcagaggcttcaaatcctgcaaacaaaacttctgtaaggatgtatcaggtatttcttctttcttgttcagaaacatgccaatcttcctcccttttattgagaaatatgtgtttctcttgttcgtgttgctgtggtgtggtaataagcaggattccatataatgtgtgctatggatagagtaacaagcaaagacacttcatacttcagttaagatttaagaaaaaaactactactcttccatgcatgaaacttgacaaaaaaaaagacacatctggagaaatatcttatttcgttttggtttatgtaattttatttttagttgcatcaatgtcccgagatatatctttctcttgggttgattattcaaaatctcaaaacattatattcttccagtaatataattactgatgccctaacgtcttttttcataacagcaaactgtaactggaataagccaaatctcattcagtgctgatggaagtgtttctccaaagaagccatcgtcattacctgaggtggctaagcagcgagagcttagtggtacactggagactgatgctgaggctaaaatgaataagcagcattctgaagccaagagcaaggagctcagtgggagtgatatttttggtcctcctccagagatccctgcaaggccattggctgctcgcaatatggagctgcaaggaaatctagattttgcacttccacaaccgagaagcgtccacacatcagtgaaagtatccaatgtaagtgacatgagtatgaatatcctgtttatgtttctattccactatgtatcattttactgtgtattctccattagtgacaggaaatcaaccaagcacttactataggaaaaaaaatagtagtacgtcttgatgtatatcttcaatataaacaagccatcataactgtttctgtttcatattggccaatgtggaatttcaggcttttgttattgagtaccgcaccacggcaccaatcttttgtagactgaataatttactggttagatacgccaaaaaggaattcataccacctttctttaggaaaccacaactacagaagggaccttttcttttgttcctcttggtgatacaggatatccatacaccttacagggaatggatgctcaaattaggttgcattgatataggtgtaagatgcatcagctacagtttttttttttaagcatcagccagaaatagcagcacaaaggatgacatttctatttgatagatatacggcttgcatgacatattgacatgttgcattgccatatgtcatcaaaatgtatttggatttaccttgttatatgaacatttcacccttaaatttgtatgaactgaatgcctttgtagcctgctggaggtccaagcaacatcacgttcagtgaggagcctgtagtcaagacgtcaaagaaaatccataaccagaagttccaagagttgacaggcaacaacatcttcaaagaggacgctacccctgcatcagctgagaaatctctgagctcagcaaagctgaaggagatgagcggcagtgacatctttgctgatggagcggcagctccccgagactatctcggcggtgtccgcaagccccctggtggcgagagcagcattgcactgatctaatcgccgcaggctgccctaatctggactggctacttttaccctcatcgctgaagtccgtggcatgtgctcttcctggaccctggttcttgatcatggttgagagctgatatcttggccctgatatcatctagagtcagcagaatctgactcagcttatgtgttgtaaacttgacttaatctcatctgtcttatggtacttatgtattaatctccttggactgagactgaaataagttttattggttcatttttgtgagctcatggtatcatcaggaaataatgtctgtcttgtatcaaattaacttatttgtgagttatgcaaaagataacgaaggtatctacaataccatttcctcttaacctggtttcctttgaaatttgggagatacaacctggtttcatttgaaatttgagagttacatggatgaagggagaaagaagaaaatactatttcctctaacctcgtttcctttgaaatttgggagatacaacctggtttcctttgaaatttgagaggtacatggatgaagggagagagaaaaaaagagacgaaagtaaatcgactccactggggatcgaacccagaatctctggttccgtagaccagcgccttatccattgggccatggagtccttgttggatttttggacattacggacttgtttactaataaatttcaacctttccgaaatttcacattaccttttagtaggataagttaaatatgatgtcaattctttaaatgttaccatacatttatccaaccaaataatggtatggtttaatggcatgaatctgaataaccctgccgtgcccgttcaagcctaccaccgcttcccaccgctggatccgccaccacctcacctccctaccaccgccgtgcttccgcgggatccgccgtgcctgctcgagcccaacactgcactcctgccgtcgccaacctgagctagagtgaggagagaagtgtgagaggaggaggggagagagagagagagaagaggctctggaaaaaaaaagagaagtgagagagagaaggtgagtagataaggatgatacttacaaattatgaaaatgctgagacggaggaaatgaggaaggttagacttgaaggtgggcctttaagaagcccacgcatgtggccgcttaagaggcccacctgtgaaatagtcttgtttctgcatgtgggtgtgttaagaggtccttctataaaaataggtttttgcatgtgggtcttttaagaagccgtatgtgaaaatgtaggttgatttttgtaggcgcgaccagttacggtccgcctacaacttgtatagaaaaatcgtttgtaaggtacgtacatgcttgaaatttggaaggaatacaatgtctcctctcatcgtagcactcggatccactttgactctctcgtgcgtccgttacctccttgcatcatggaaggattgtcctctctccatccaagccacggccttagtagaccgtctaaacaccacgttctctttttttctgatccttctcgttttattaaaaaaaaccgttgtaatgcgctggtactttactagtacaaacaacacaaaaggtgtcttgacactcttataaataatctgagcgatccttgactctacacagcagcatcctttttttgttcaggtccagaaaagctggtacgcttcacgaaatttttatccagaacatcagatggtaaagttcccttgaggctggaaagattagaacaaaataaatacaataaattctctcaatgggtttgcatgttcaaacaggttttagctctgcattacttgtataaggcaccgtgggccactctgatcttgctttcagttacatcaataggggccaaaagctgcaacgtaagatctcccattaatctgcataaaaaggccatcagaatggtgggtttctttttttttgttgcatttttggaaagttgccctggggaaaggatatatttgttctagcaaaaaaatcatgtaattaccgtaagtgttcagaaacaacataagtgccactgtcactatttgagctatctgcctcctgtgtcaaggtttttacaaggtaagtttagtatccgtaatctaaaaaggagtagagtgctatgccattaagcacaatttagaactaacaaattttaagctcgaggaattgattatcaaaacatacatggatgtcctttgccctggtcaacatatcgaatttttggatcgagagatgatgccgaatcagagaagaccaatggcatactccaattgtaccttctcttcaaagattctacgtttgtctctacaaaatatataggcattatttcgtgtgcttatgattggtatcatgctaaatgtgacctatgaaatctgtccaatactgacataaaaaatggtattctcagaaatagacttatcggttacctatattctggagctgctccaatgcagcaagaagattggtatctaacaattcaatcatttccctgatataattcaacaatagcaataagtggcacacatgtcaagatgcagcatattagcattagacagcaaatgtgtaaccactgtaccaataacagctacaaattacctgttggtgtgtttatccagtaccttggtcaagtgagactctcaaaaaataagggcacaacaaaactgttacacaacaacaaaagaaaaaaaatgcaacactcaagtagcagatgcatggttgttaaggctaggtgacatggcaaggtccacccacaccttaagactaaattcataagactaattgcgtactactagtgccgaacctcttctttacatcaattaaaatgcttcccattattaagctagcaaagaattaatatagttttgcatggtagtggaaggcgtatcaataagatcacctggagccttgccgaggtgcttgaaaaggtcacattgcaggtagatgcgatggaaaaacagaattttctgggaaaacggtgagactttctctagcttcttgttctcggtgttgacagagagcacccaaccacttggatcagtacccttcatcttggccattacataaagaatattgtcatcgtacaaatccattgtagggtaagtacaaatgaagttcgtaaatgtcagctggttgtccttggaatctcagatcacaggcattttatgaaactaatgagactaaataattagtgcagaaaattttgacataaattttggaaataaaaaaggtaataaattaaaatttttatttgaaattttaataggacaatgatttttttttgatcgggagcattcataaaaaaattattatgaaaattggttgtcctatctttgtatgaatgatcctcttttttttttttacttattttaaaaataaatacacaattttttatttcattatctaaaaatattttttgggataaataatgcatcgcacaacaaactcatagctataatagtttcgtgtgagaagcttttacatttttaacaatgtaattcatccaaagggtaaaatggtcatttttatagaaattagacggtcaactaacaatcaactgacgggaggggtatggaagggatcaaaatcaaattttaggggtatataaggaagtaagcaaaattcaggggcatagaagggattagttaaaatttcaagggtatacaagggattttctataaaattaaatgaggggtgacaaaaaagaaagtaagaggtaacaaccgatgtgacttttaaaaattataaaattagaaacatggggatgataaggctttgtttttcaaaatctttagattacgagatagctatttaacaatatttaagtaaaatcatattaataaatagatatttcctccgtttcacaatataagtcattctagcatttcccatattcatattgatgttaatgaatctagatagatatatctatttagattcattatatctatctagattcattaacatcaatatggacgtgggaaatgctagaatgacttacattatgaaacagagggagtaattttgtatgggtgctagcagcgcaattgcgcgagccacccatctagtttttcttatataaagttagatgcagaatttaattatcttgtaaaaaggtaattatcttgtattatatattactgtaaagaatataatttaattccactacctctatttctaaaaaaaaatcattgtatcttaaaaaagatctgttggtgttcggtctcagcgtctatagcgtgaacaatcgcgcagtgggcttttttcgacttttgggctagcaagatcacacacaacacgcacatcacgaaccggaccaaacctccgccgccgcccgccgccgccgccgccgcctacacaaccccccctcgccccccgccgcgccctcctctccgtacgtggagcgcatgcaaatcccctcgcgctcgattcttcgcctcctccgacgccccatcgtcgcgccttattctgccctgcggcaccgcatctcgatcccctcccgcgatctctcctctcctccatggctacctctggtccggctcgcgggtggctaccggcgcttgcgcgaagaatcgcttcagtcacgtggacgcttaaccctcctgccagtcgtgtttctcggtgtgttctcctgctctgatcgtaaagtttgggcctttcgtctcttgctaaagttctcgatatagattctgttgaatttagtttttttttttgttagaactatttgttcttatatcatgttggtgttttgagtataactagggaaattatttcaatcccgactgatggcacttgaatcggacgcaaagatttacccttttatgctctttgttcatagatttcctggatctcggaacatggccagcggcagtggagtggaaggcgagggattgggtataccatacaggcgccgcttcatcccatttgccaacgatcctatccacacaaccaaagataatatcatttctatggacaagcaccttcccatcacccaaggcaaggacagtgctgcaactaaggagttcatctcttgttatggccattgccgtcctaccacgtatggcgatgaagatgcttctaggacagctgtggaggtcaccggtggtaaacaagatccaaggggggcagttcagaacctaatagatggtgaagtggcagttcaggagctaatagatggtgaagaaattgcaaggaaccaaagggccagtgaggttagtgacaacgatggatatgaagagttcaatgatcgtgctgttaactaccactgtgactgtcatgtttggacgccacttattgcaagcagccaccgtgacggttctatatacgataccaggggcacctttggatctgggtggaaatgggattatcgtattgcagatcgtaacgagagtaagtgatatatatctattttcctgttgttatctattttataattaggacatttgtcaagctataggttcagctaatatattctatgttgaaaggttagtgtgcattatattttgtacttaaaatgataaattaaactactaaaaccgggtcacttcacccctgctttaaattgagattttgtaccataatatgacactccactctatgtcatgaatactttcgcaatttctcatgattatctgcatacattatcacatcccaagggtttgtgtccaggaggaaggtggcagcaatgctgccacttatgcaaccctagggtgccaaccagtcctatggctgctggggcccaccatgtggccatctgacctacatgccctgaacaacaaacaagacgagaaattctgtctattattaagagtctggagtctagtagactaggaagttatcaattaaatagaaatatatctcccatttaagttaagggtggcataatagatgatatttatatcaaaccacagctctaagtatcggaagaactttttatttgccactacagagtgtcctattctgggatacgccattggaaaatatcttatacggtctatggcatccacctcacaaatttcacccttatttgcaattgttgaccagtcaagacatgggaaaggtgtaaaattaggatgcctcatccacctcctaggtgatcattcccatgatggccatgatctaactggtgatgcctcctcgatggcactattgaacagaggcagcattctaccatgaccacaatcgatgaagtgtcacagaataaattgcagactttgtgcttgagggggacaattgtggaccagtggaacagagccccctcaactccaaaccatggtggtttgttcccttgtttgggacctgatgttcttttctttttcccctttttttttattttcttctgtcagtctgaattggttactagaaattacattggacagaaggtgttttttttttttgccttatattgtcccacatgaagtgatctggttttagtaattaggtgggggagtgaaatgagacgggaattatctagacaaccaaaaagctttagtcattagaatggactttctacctttatttttattgtaccatgcatgtattttatctactctttaagtttccgttacaatttggcatgtcatctttgttgtagctcggttggaggcaatgatgttatcacatcccacgaaagattgctacatgagggatggaacttgcatatggcatcctgcaaatggcatgttgcaaattttctcagtaaagttggctaaaactcctgtagttgatggctcaattgaattgtatggatacattgctgtgcgggaccttcaggatccattacttaattatatagtcaaaattggcagggatgatcccatcattgtggagcaggtatgcttccatgctctctacaattatttcaaattactttatttgtttcacattataagatcaaacttacagcatgcatggaacaaatgtgattagagcttacccaacattaaccttaacactaaaccgtccttcacccatggttagccaattttgtgctaaatggtcatttaaacagaaacggctaaccaccatgtggcgtttaaacaggctaaatgaccattcaggtgaacaatgaggttaccttttgttgttactccctccgatttcattttaattgacgttttggacaatgacacggtctacaaaatatatctttgaccttatttttctattataatatatgcaataaataaatgcatgtttacttttattatagtgctttgaaagataaatctatatatgttgtcctagttttctttaaactagatattttaaaagttattgatggtcaaagttataaaagttcgatctcaaccttgtccaacacgtcaattattttatagaaccggagggagtattttacagccacaaaatatcttttacattactgaatttaggatagagtggaaatggtgtattaggctcagtttgatagtgtaggctcagtttgcaatctttttttcttaaaaagaaatgaaatagtagtagtctatggtttccgccatatttctcatgtgaatgtttttttttctgaacagaaacatgccgctactatgattttcattgtcccaccatgatctaacagcttagtttttttttctttgataatgtggtaatttgtaggtcttcaaagtgaacatagtgcctctttttcaagctttctttatagtataatagatacataacatacgtgcccgaaaaggcagctaaaatattatagtgttatagctgcaaaaaatttgcttccataaacacatgtctggacagtgaggaaggtgagttgggatgcgattagtgtgtccaaaagtaacaaaataatattatggattgataagacctttatcaagtactatattgtggaatgataattatgatcagacctgtattaatcatgaactaggtgcaagtgagtgtacgtgttgcaaacagaatcaaatagaatagtttcgaaccctttggttcctgcctagtaccacataaaattgttctttttttggttgtctacagacatatgaatgacccttcacaacaaagtccttttttgtttacatttcacacaagcttatatgattaatattttggaattcaaaattaactcaaataaatagcgtgggacaaaccttctctaacattcttgcacacattgtaaccgttctgtttgacacatgacgaatatcttgggcatcaactgtaaaatgatccgtttagctaggcattattgtgactaaaacgttaatattttcttagttacttactttgctatgaagagctactaaatattaatatttttttagggttccctcatcgaaatgactggccctaagcgagggatcgacttttcttgtgctgttctagttgaatatgacatgagaatcaagacaggagaacgagaggaagatgatctacaactgattgatggtgcaacagatcttgaccatatattgacatcacatgtaccagtgagaaatcgcatttatggagattgcggcgcagttgacataactcaagcgaatcttttgtatgcatttgaggcgactgtagaagtcgtcatatcagaagtgcagactagttttgatttgtgtctcagctgttttaccagtgggttacatgaggaaattcggctctttgatggtgcgatcagtgagtcacgtgacttgaggaggtatgtgattgctgtcatggaacatgagtgtatggatttgaagttcaaggtaggtttagggtctgggtgtttcgctgaacattgtcgatccttcaaagcaactaatcatggatgtgccagtgaacaaataaagattgagttcgcctcaatctcggtgaaggtcacttggtcggctatggagttctagaagggtacttagcgtttggacattttttttttatttgttactccctcagttctatattgtaagactttctagcatgttcatattcatctagatagatagatagtgtgaagctagtgttgctagtgttgagtgtaggcatgtgtgtgtttcagcccaacagggcccattacaccaatgcatatgtatagtagaagagagaggaaatagtgtgaagcttctggagaaaaacaatcacctagcaacatggtatcagagggcgaccgcgtcgaggctaaaccctagctagcggcgcgccggtttgtggtgctgcagcttggagcaacggagtggtggcgttgacagcggagacggcgacagctgctacagaggatctcgacgcagccggcgtgaaggagggagcagggtgtgcgctcgctggttgagccgcgcaaggggaggacgcacggcgggtgagaggcgcactgtacgagctgcgtctagacttggctgtggtagtgttcccgaccattatgggtctagacttggctatggatacaaaagcacaagctaccgtcatctcggaaatgcatgccaactgtttagagttgagccatggagccatggtgtccatactagcaatcctgatgtcttgtcaataccaatatctaaaatggccagtgtcaaggctgctaacaacatcaccatcgaaccagtggttcagtatgttgataaagagctggacaaggcatccaatagggataaaggggccaaaggcaacagaggtatggtggtggctgatcatttccaactgtggccatctccttatcagcttaattgtgaatgttctcacactgagcagcaaccatggccaccgcctactcaagcaggagacattggttgtcaagttgcgctgcgacgagtgctagggtcatcatccaaatgcagccaaggtgacttaatgccggtgacaccaccaaggccactgacaataggaaaattgcataactcgaggagccgttctgctggaaacacaactgaagccgtacaatcaattattgagtctcatgcaatatctttacactgtagaatttccaagtcaatgtgcattgcacttaattttgttgagagctggctacaaaacacagccaagaaattatgcaatggccagttgcttaacctttcagttgggatacattttgacgacagaaagatttctactacattgttttttgctgagttgcttgagcacccaataatatattttcaggtttacttaactgcttttcactgtgttcattcgaacaaaatcctgagaccatggattattgctagagctgctaatgagaagcagaacaggaaggtcaagagatgtggttatgattccattgttggttttgatggaaacaatcctattgatgccagtattgcagtaaaggtttccattgatgtgattggtacttggacagattcagagacgctatatgcataagttgcaaacaaggattatttgtctgttaaattacttgagctggtaagaaaggggtccaatacatactggttattagaactcataactaatgagctgaatccttggtgtttactcagatatcagagatggctagaaattctggggctcccacctttgactagggctgcgtggacaggacaagggaagatagaacaggacattagtgtggacataatttcagcatctcaagttatcaagtctctctgtctgaacaagtcatctattaggagctactcaagttattttctcctgatacatgctttggtcagtaaattgagagcttgggaagcattggtggaaaagcatgtgcatcgtatgcactccaaagataacaaaagtactccctccgtctcaaaaaagacaaaccctggtttccgtgtccaacgtttaaccattcgtcttatttagaaaaattatgaaaaaaatttaaaaagataagtcatgcataaagtattaatcatattttatcatctaacaacaataaaaatactaattataaaaaaaatttatataagacggacagtcaaacgttgacacgggaacccacggtttgccttttttttttttaaggacggagggagtattgttgatgccttgggatccaggaggtttccatcagcttggggacaagctgaattttatgggggagggaatgttaggatcctgcctccttccatgggcctgtcaggtcaaatgcatatgggcctagccaaccatccacccccgccaaagcacaagcaagcaggtagaaggtataaaaagaaacagatacttcacattggaggcatggtgggatcaattggcgagctgaggctcacgacggcgacctaggcggccggtggcacccttgtcgatctcttctctttctcctcttcttccttgagttactagcaacttgtatcccctattttcttcctttgtttcaccaaatacttgcaagtggtaacaatctggttgctaattgaattggagcaaagggtgctaacaccacgtcagcgggccccacgaccacccgaacgccgccgagaagacacacgtcagcgccagcaccgccacggagtagcgcctcgccatcgccgactcgccgtcccgcccgatctgcgaccccatgatccacgccaccgcgacctggcaggcgatcatcacgtacgaggccgctggtcaagaacagtacccggcggccgtaccggtccaccgtggcgatggagacgagggtggagccgaggttgacggcgcccatctcagcgacgcgttgtttcggtgcacgtgtgctgcaaagtcggatggtcacgcccggtagtggtgggccggttcatgcgatgtattgcgtgaatttgggatcggtttgatcgatctgctgcccggaaaagagctatttcgggaggatttttagtggttttgctacggacctgcaggttggtgaagccaatgccgaagccgagcagcatgctgtcgacgatgagcatggcgatgttgaccgcagcggcgttgacggcggcgccggcgaagaaaagcgccgcacccgcgagcatgacggcctgcctcccgaccgccctggtgacgcggccagcccggccaggtacagcgacgacgtgaacgccgtcagcacgtggctgtcgtagacgcagtactcgtcccgccgtgccgccgccatccgccggagcacccccgggatgaaggccccactccatcgccgtcactccccctgaccacatcatctccctcacagacgacggtatatataatacaagtgatgaatgtcgtttgcagccacgtgtaagtgtaacgacgtatcgattttgctatttatttgtcgacaaattttttcccaaaaatttgacagatataattacagtataatcgtagtataattacactgaaacttgcatgtaattacagtgtaacttgtatgtaactttcaaaaatctctccgtaacatgttatttcggtaaaatggaggtcgcgggaacaaattctttcacatatgtgtgtgctatgatttgttttcttcctcaccaaaacaaatcttgtaatagatctaacgatttaaaattatgtgaaacttatatataagttacatgcaagttacagtgtaattacatataagttacagtgtaattacactatgattgtactataattacatctgtcacatttttgagaaaaaatttgtcgacaaatgtataggtagtcccacgacgtatacgtaccggagatgccgatgtcgtagccgaagatgaggccgccggccggaggcggccatgaggcaggtgaccacgacggagaaggttatgccgccgcccatggggaacccacctccagccatatcgcgcaacggccggccttgtttggcacgcaatagccgcgcgctcactcgcgcactagttggttgggctggtagctagctatacgatagcaaaggccgatcgatcggggtgtctggtttttgtatatatccaaatccacggccacgtgcgggaggacttgtgttagttaattattaagcgcacggagcaatcgcgtgccaaaccatatattggaaattaactcgttcggctgctcttgctttatcaactcgttttgttttctttttcgttttgttggggcggaattattcagtcgtattcttgaagaggccctacgtacaaactaaacgtactccagattccagaagatcctcagtcctcactggcagactggcaggcacgctgctactcagattgcgatgggtttcacgggtggggtggttgttgaggatcgaatggttcaactgcaccgctgcatgcctgtggtgcagagtgccgttttgcatgcc

SEQ ID NO: 8336 - DNA, 28451 bp, Oryza sativa
cctatgtaagattcgatcgaagtggaaggtactgagatatgctggtagccgacactgacaattaatggtttgcaaagcaaaggcattcgatccttgacgttctatgtctctcttgatcgagttaattcgataaatttcaaatcttttttttcccttttgtatgcgggccttgtaatcatcgtatgaatatttttcaattgtttggaatcaaacgatggatggatggagagtatatgtacttctagctagccctttattttagttttccccttaatttcgcaaaaaaaaaaaaggcagagaagaggaagaagaacaagtatatattccatttgtctaaatatttaacgttacgaggaacatataataaaacttccagaactttgacatcaataattctcaaatattcaagttctttttaaaaagtgatatatgtatatttggcttaatattttaaacatattatattttataaagttaataataaaaagtaatagttggagcaattgaatcttattttaaattatatatatttataatcaaatcatatcttatactaaacgtcaaatgttagttaaatactgcatgcaattaatccgtgcgtatatgcataagttagctcatatatatatatatatatatatatatatatatatatatatatatatatatatatatatatatatatatatatatatatatatatatatatagtgaaagagcatgtagtctagtggttgtagtgatctgagtaacaccctgtttcataagttcaaatctttggctaagttccatgtttaataggttaaattcctactccctccatttcataatataagagagataattggtgaatgtgatcacatcctagtgtaagggagtaatttaaaatggctgcataatatatccggttggatataaaggccgaaaaaaaaaacccttccaaaaaaatagttatatataggaggatactgtatcactggagtatgcacgtacgtatgcagtgcactgtttgactgacgtactataaggtaggaggactaacgaatattgatcttcatcgaccattcttcttatcagtattcgttcgttcgttcatttatttgtcatcgatgatatgatccatccatcattccatcttcaaccgattcaattctcatcttccctttcacaaaagaaaccgaccgacagacagagaataactagtccacgtctctgcatagtgtatactcctgctcccgtggatctgatcttcttcctcaatcgtcaattcgtcagcatactgctcgcttactatatatgacgaatcattctgcccggggtttgataaaataaatctacatcctattattaattcaagatctacagattattaaattttagcatattttgttttaacaaaaagtagcacattgtgtgtacattaaaggaaattatatcattttctagatatttttttaatttctacataaatttattatagcttttgatcccacggtgtcctttttccttcctaaatagtaggaagttggtggtggggttgtaagatcaaaaaaaaaccgagcttaccatagggaggtgaaaagtgataacattagcagaagtcaaataaccaaacttcgatagataaaaaactcaccccaaccttaaaaaccaaaagatcaaactttgacactctaaccggatctgtacgggtggctaatcgggcttagaactggtttgactgaagtacaattactagttcgatcgtcagattaaaaagaaccttacatcacttgtgtaaaatcttgttttctctaaaaccagccattagatcgagctctaatcttgacaggaaactaagagacaaatctatcgaagggtcatgcaaaagtaataaacggtttaagagaaaacatctcaaaagctagacgtctcagaaatttcatcaaatatgaataaaacataaattttaagcaaattcgagtcaagcaaataccaatgaaaccttttagatctgatctataatataatagaaatgtttcgggtggattaacttgaacaaaaccataacaaaactgaagaatcacaaattaatgccaaaaacgaaaaaaataaagattacaaaaccagtaaaagatcgttgacgccttgttgattgaatatgatatttctttttcaagtagtattcataagacggtcattgcacctctcacgaatttctcacataaccctaacacaaagagtagtaaactctttaatctctcaattgtggcttaccctcaatgcatagcctcccttattcacatctaattacaaaatcaaactaaactccaactctcttgaacttggactccaatccaaattcaacttatccatacgcacacaattccccttgtcacctccatgtgcattattctctagccttggtatccacatgatctccttgatcttctagaactcaacttctaccaagtctagtcttgatccatcatcggcaatactctcgtgacctcaagcaacagctacacgttaacaaacaaagaaaccatatttgagcacaagatcttccccaatttgactcacatatatctcacgtatagaaaccatctaaaagtcataaacatttagcaatcaacatattcgatagaatcaacccaaaactgattcatcaggagtttgccggtctaagtgctccctcccatggcagtcagatcgctggccccatggtggtgagaccactcttgccatgaaacttcgccaaattcaacatcacttcacaaacatcagctcaatcacttttttatcactcttaataattctttatcaccagaatcaaatcaacaccttaatttaataagggtggtgataaattcaccactcaccaccaccgctactctcttttaaaaagagttagaatagattactaattctctgcagttgtgatagttcaatccagttgaccaactataagatgtttttgattaattggggagtttcttttcagagatcccaactagtatacaaacaatatgagaagggctacaatgttttccaaaaataaaaaaaacacaaatcgcaacgcacaagggtcaattactcttttagacggtgcccatatagaaagcccaccgggcttgctttcaaccgtcatgtgggctaatgttggatttaagtatcaggctttaatgtttgatgttaatcacatggcaaatcggtgatgcaagtgtagctcaactggttatgtttttcttgtggtggaatcaacccacctgagttttagtcctatacttaacatcgatgctcatatttacatctaattattctttcgatggtaggtggctgtcggtgacacgggaccaggagtaccatgactagaggcttgaggcagacataatcgcccacgtggcctggcaccctcgggggacgtcgggcccgagggtgacgtgttcgccctcctcttagtctccccaagggggtcgggccactcccgcctcggccccgagggccgaagcgccccgacccctcgtggtttctcctccgcgtgtatgggttaggtgagcacagcggggctcacctaaccgcatttattgcggtttggttgaacctgtcatgccgcatgtaacgcagtgcagtgcgctcgtttatccggtctgtgacaggtcacagaccggtcagatcgcggtcaggtcgcgacaggcggtctgacgcacgcctcgccccatcccgtcaggacgagggcttctaggcgctcgttcccagacggagctagcgtgttacctcttagagatggcacgttagtcccggttagatatatgccaggcttcattctaaccattacagacaagatgttgtgtgaagaagggcaaacatgcatattgctaagctgacgcgtggtggacaagaatgaccgatttgtgaccagtctgacactgatcatgtcgtcagcagacagccacgtttcccacgtcgcacctgcctccggcggaagtggaggtaggtatgtgccgtcccatcagaagatcattcggacagcaatgatacaaatctccgtccatttatgaagagagggcaagtccagtttggaaagggagagagggtgcatgtggtatccccttaagatataaaaggaggaccttgcccactaagagagagggacgggactctggtagattgagaacggagagcaacggagactctggttcatactttgtagctccttcatacacagatccaccaaaaacacaggagtagggtcttacgcatttcagcggcccgaacctgtatacatcgcctgtgcctcgtgtgctctttcgactctcgcgaacattgtacacacagagagcttaggatttcaccctgagcccccggtcgaaccggcaaaggggggcctgcgcggtctcccggtgaggagccccgcgctccgtcagtggcatacctattgacaacgaagtgcccgtgtggtgatcgacaccttcattaatctcaagatatgttggtctaatattttaggggtgttaatagggatagggtgtgcgtgagttttttcgaggtgttcatatggatatataatgtgtatatgtgttcctatagggtgagtgtgtgcgcattgtgagtacttgtatttgtactgtgtttaaaaagaatcatattttagaggtgttcgtaggaataggatgtggtgaatcttttagaggtattcttagccatatggtgtacttgtgtgcccgtggtgatgggcacctttgtcgatctaaagatatattgattcagtctgttggtaaaatgggaactgtaatacccatttacctggtaaaagcattattatcaaataaatagtatgctcagaatgtccttaaaaataaaaaaggaaaccctagggtggcgtagctaggggcccactccggagggccccaggcccacctaaaatttcatacatggggttcactccggctgaggaggaatattgagtgtatggcccaaaactctgagtatcaaagcagcttggggcctagcttgggtcccaagcataccctaaagtatataccttaagaatgtaacctaaggtctgcccggggcccgatcccattccgggccctaggctcaccctagtcctcgcaggttctacggttcccggcaagaggagtgtaaaacatgcaagacctatatgccttaagaggataaactatggtctgcctcgggcccggccaagtcctgggcctcaggctcaccttaatccttacaagtcacgcattactcaaggaagaggggtgacggggcttgccaagcataaaggcgtaaaccaaggtgtgcttcgggccccgagctcaacttggaccttgtatagcttgcgttcctctgcttagagggttgtccaaaggtacaagacgcacaatcttaagatattcttccatcaacaacgccttcgagaagctcctcacggaataattaaccttctttaagtgcgacagggcgcgatctcagaaacttccaggaagttggccgtgctccacagccaactataaggtagcacgccccgccataaatgaaacaggtttatggggggattcccgaccagtctgagttgaaaggacgtagacaagacgccagagctaagtcactttggacggtggcgcctgggacacgcgtcgcacatgccccatgccacttcatttagccaaatagacagataagtactgtggccttgtttcgggcaagtcgggcctcgtcgagcccaccacgcaccacgtggtgagcacactggcgaaagctcaactatttcagacgaagcccgggagcccggggtaatatgaactgtaagacttgaacggtttcttggggctgcgttatgacaccggctggcaatgacaagacggttgatgagacaagactaagagtagatttgtaataatgtgagcccctctttggactataaaaggaaggggactagatacagatgaagggttggattcttctaggccaaatctattgctttgtagccgaagaaggcctccttcgtacttagttgatctagagaaaaagaacgaacaccaacacagaagtaaggtattacatcttcgaatggcctgaacctatataacctcctgcctcctcctcgcggggtggtcagaccccatgaatccaccgcgatcgcagataccatgaaccgtacgccgactaaccccctggccaaatcttcactcagggagagaggtctccactccccgctgtctgagggaccacaccctccgacacattcttttgaaggtgttcatgtagatatttagtgtgcgtgcgttcatatgagatgaatgcgtatgcatgttgtgggcaattattatttgtcctgtgcttaaaaaaaatcatatggcagattgtgttgctagttccgttgaaaacgagagacaaaatcatgctaccaatttgatttgtgatcttccgatctgcttcgcgaatggcaaactactagtactccacttcagtacaaccaatcgacggttcggccataaatgccactgacttcagctgtccaccatccagcctcccaaggttctggatcacatcgtgccaccgtgccggctcggctcacgcgtggatggggaagacggcgaccgaaggggacaaggaggcggggcggggcggcggcggcggcggcggcgcccgccgccccgtggtgctggtgacgggctgctcggagggcgggatcgggcacgcgatggcgcgggcgttcgcggcggccgggtgcgccgtcgtggccacggcgcggtcgcgcgcctccatgcgcgggctggagggggacccgcggtacctgctgctggagctcgacgtgcgctccgacgagagcgcgcgcgctgccgtggccgacgccgtccgggagctcggccgcgtcgacgtgctcgtcaacaacgccggggtccacctcgtcgcgccgctcgccgaggtgcccatggaagagttccagcaggtgttcgacaccaatgtctatggtaggggtggaaatttttgctcccttttttttcttctttgttttaattgctgtctctcgtgcttgctggtatttggtgattgcgatgttctcgaagaagacgggattttagatcctgcgatcaggtggtccattaagtatgattagtaggcaattaaaatgtttgttcttgtatctatcgattggttgagtagtacaacggcagaaaagttgcaaatttaggattactttgtcaagacattttatcctgttagtgccagtactaatttaggaaaagtatgtaaaatcttctgtagtcacttgcagcactggattacttataagtttgcaactaggaaccctatgttagcaaggagatgcgttaatatttagtagatcacactgagctggttctagttgtgcaccacaatgaaaatccaaccaaaagaatagcttggtggcatgatatgtttagtaacatggggtttcattggcgaaattgcagtaccaatagttgaaagatgtattatacacttgcacactctaacactagtcagatcagtgctcccagggcacgcttcctgtcagttgcacaaattgacagtcaaagtgcagtgacgatgctgcgatgatgttgattgggaagcaactggaatgtggaattgactcattctctcattggatctgacaaattattttgtcccattaagtgtatgattcacaatagctcttaaaccaatgtaaaggtatttgaaaggagcatagcctgttaacctacaattaggctttccacgctgtttcatacgctgataaatagtcttcaaccggacgtaaatatatgtaattccaatgtaaaaatgtatgctggttgaactgctgagttattgtttcataatgctagaatgatgatggaggcgcaggggggaatagttatcaattaggctttccacattgtttcataatgcttgaatggttcatggcttcatgcttgtgcaacagcttgtttgagattacttacattgggcctgcacttatgaaaatgtctaaatgactgtcttttcatctacaggagcaatgaggctgattcatgctgttattccccaaatgatagaaagggaacaaggtacaatagtgaatgttggaagtataacagctttggctcctggaccatgggctggtgtatattcagcatcaaaagccgctcttcatgcattgagcgatacgctaaggtctgtacattcaaggagcactctatactatgctggtattattatgccacattgtttttctctccgtattactgctggtttatcactactctgagaacttgctaaattgtttgatcgtgcaacaaaatgcttttcaacagaagctataataagaaataaaaatgaataacgatacaatagtgtgagactattcgaaattcccatttgtttgttttccatgtcatcttcttgtatattcagttcttttcgacttgcaccgcatgatctgtggcttttgacgctgaaattatttttcacttttgacactgtcagttgacacgacagtttttatcactgcagactggagctaaaaagtttcggaattaatgttatgattgttgcacctggagggacaaagtcgaatctgggaagtaactctacatccaagtatgttcaaatacgtgactggaagtactacaaaaaattcgaggaatccctcagagccaggactgatgcttcccagggtcctggttctactccagcagaagacctcgcaaaaagggttgttgctttggttcttaagaagaatcctccagcctggtttgcttacggccagttcagtgctattctaagcttgttgtactatgcaccactatggtttagagattacttctataagattgtcatgaaatgctagaacttctgatgtcagtaagttcaaaggacaaagaggttgccactcagataacccgcaatacatacttgcatacagttttacagggaccattcattcaagcgaaaaggcccctcccagtgtatgccatcttttttcacctgtaataatagcggtgctagtttgttcatgtagtgccaaaggatggcaatctgaaatatgtggcctgaagaaactggtttccttgcaacctccactgttgacatggcctgcatcttcctgtctcaggaaatcaaatttcgacgcgcaaacgggtcgaacacttgtgatctgattgtttgaagtttgcattctactatgtctggcagcatctgctgtagttggggggcgtcaagtgcacacggtgaaactgaccagttgcgcatcattgttcagatcagagccaagctctgcaaatatctgacgatactgcaacagttcatttggagagtgataatgcttctcagttttaagtgggaaatgaattgttttggcaaaatattaccatgaaattcttattcttacattccaattggccttaaccttaacggccatttccggcaaatgtatttttttacaacagttttgcggtaatttcacgtaaagaaatcgagtccaacatgaaagaagaacgcaactgaactggaatacttgtcaaatcgctcaggattttactgcggggcggtctcacaccagcgacccgtccccacaaatcacaagcagcgtcgtgggcaggatatagtccacgtggcgtccacctgcgcggcaaaatccgatggcgcgcgctccccattggccggcgacatatccaccctagctccccggggatttccccatcctgtggccgcggcgctccgcggcgccacgattaaatatcaactcgcccgccgtgaccgtcctgctcgctcccgatcacaccgtccgccaccggaagagagagcccccctacgacgacgacgaccatggcgctcgcctccacctccgccaccgcgtccgcggccgtgctcaagacgcccttcctcggggcgaagcgcgcgctcgccaatgccgtcggcgtcgcgggcgccaagcccgcgccgcgccgcgcgctcgtcgtgtcggccaagaagtcgtggatcccggccttcaagagcgacgccgagttcatcaacccgccgtggctcgatggctcgtaagttcttcttctcttttttcctcttcctcttcttcctcctcctcgcgccgccgcattgtgtttggctggctgacaacccgagcgcgtctcgtgtatggaacgggcaggctccccggtgacttcggcttcgacccgctggggctgggcaaggacccggcgttcctcaagtggtacagggaggcggagctgatccacgggcggtgggcgatggcggcggtgctggggatcttcgtcgggcaggcgtggagcggcgtgccgtggttcgaggccggcgcgcagccggaggccatcgcgcccttctccttcggctccctcctcgggacgcagctgctgctcatgggctgggtagagtccaagcggtgggtcgacttcttcaacccggactcgcaggcggtggagtgggccacgccgtggtcgcgcaccgccgagaacttctccaacgccaccggcgagcagggctaccccggcggcaagttcttcgacccgctcggcctcggcggcgagaccagggacggcgtctacatcccggacaccgacaagctcgaccggctcaagctcgccgagatcaagcacgcccgcctcgccatgctcgccatgctcatcttctacttcgaggccggccagggcaagacgccgctcggcgccctcggcctatgagcaatcaaccccgctctcgctcgccatggatctgacacacagagttgggtttcgcttgcatgcgcgcttcgtgtttgatcgctagctgttgcatcgatcgggcgcgtgcatgggctcggatcgaacgattggaggtcggaggagcagtagcaaaatgtatcttgttgtgttcgtggccgcttttgggttgggtggtgtgcgtgaaccaaatgggggaattaatcaaggagttatttttttttatttttcttcccagtgtatgtaccatatgtaatatatataattaaggctgcaggatgagcaaggatatttcattgatctcatggtgttcgtgccattcctttgtcatgtgcactctgtttggccgcttgcctgcatggcgaaattgcatcagctaaaggccgcattgctacgaaatatctcatccgctcttcgaggttcgaaatgaccatagtattttgtttcttccattgcgccgaaggaagaaacgtgctatagtagctctggcaaagataagtaggagcatatggtaagaactgaagaatactctctctgcaaactgaagaactccagagtacctgccactctttcttcaatggctgcatttgccttgaagcagatacaacatcgatactgcatttggtcgtaacatgagctgatttcaagtacaggagcagatcacattcccaatctcaaccattgcaatacctgccggtaccaaactccactctgcaaattagtgcaaactagatacctctgctctgcttggagctgtcatttttttcaatccaaaatggaagagaacgaaattaactaattaaacaggcataaataattaacaaaactccacgcctatctatatcagattatccggcactaatccgagctcgacccccagtgacagatgggactgtccgggaagtcgctcatgtccaccacttgcgcgacaccgaggagaccctccagcatgtcgtcgtcgtcgacatgcacggtctccggagcgacgctcccatccccgccggctccggccgccacgtccttcccctgctcgccgccgccgccgtcggtgtcggtcccctgcaggcagctgtagtagagcttcatcagctcgtcgatggagctgcggtccgcctccgggacgacgtcgatgtccgccggcagagagagctgcatctcctcgccgccgccgccgccgccgccgccgacctcgcgcttgcgcttgtcggcgtgcgactcgcgcggcgtcggcccctcgttgggttcgtcgtcgtcgtcgtcgagcggcgtgatgtggagggagcgcagcgcgtggcggctgagcgcctcctcctgggtgatgacgcgggaccaggtatcggcgtccctggcgctcatcttgtgctgaagccgcttggactgccacacgagcttgcgaatctggtcgaaccgcgggctcaggtgcttgatgacggcgctagctctgagcagggagatcttccacgccttcttgaggtcgtgcggcttccggtacggcggcgggccctggctggcctgcgcctcgccctgcaggccccaccacgcctcgccgccggtcggccaccacggcggcggcaggccgcggtcgagcgggaagctccgctgcggtggctcgcagtgctggatcagcgccgacagcagcgaccccagcgtgctgtcctggatgtcgaggagcccgtgcaggaacgacgccgccgccgcggggctccgcgggctcccccggccgcctcggcccgacagcgccgtcggccccgcccggtcgaatgcgacgtcgtccttccaccacccgcggaggctgtcggaggagccggacaccggcacgccggactcgtccacgatgccgtacacgaacccgcgcgcgttgcaggcctccatcatcttgagcatgtggcggagcacgccgtcctgcgcccggagcatcgccttccgccggtaccgcgcctcgggcggctcctcctccgccgcctgctcctcccccctgaagacccggtggtgctgcgccgccagggcgccttcgtggcccgaccggccctcgagcttcatgagcagcatctggtccttccacatccgcttcttcaggtcggcgatctcgatggactcggacccggactcggagtcactaaagaactcctcctgctccggcgccgcctcggcagcagcagcggcgtcagcagccttggctttgcctttgtcgtccatggcggcggttggccgtggcagcggctcgagagcaggaggtttctgtttctgtggataggcgaggctttccatgaggagagcttgctgtgtgaagcggaactcgtggaaaaggtggcacggaagggtggcgggaaaggttgcggcgtgcttacttatgtacgtgcagacgttccgggcggatcgaaggatgtggaagaagctaggcttggtaggtggatttgctgtggcacgcagcgccttggagcccgaagggacttgtagggagtagggacgggagcactgaccagcgaggcactcactgagtgcggagtagggtggtggtggaccggtggtgtacggtagcacccgtccgcaccgcacatgcttgtaggagaagaatacacacgcggctaagactaagaagcctaattttttatgcttttgtgctttcttgtgccacagcgcggacgcgataatttttctgctctctaggagaaggttgagggtaatgacgagccctgcacttatctttcaattattgttcttgtagtatttgtttatgatgttactgggcctgttcagcaggccggctacaacggctgcagctgcagctacacatattgagtgtggcactgttcacattagctatgggctgcggcgcagcagcagccccggctaccaaacaggcccactagtgatctttttcatgcaattatcactcttgctgttgtttcgaaaagaactatattcattcggttagggctaacgccgggggctactgtcaataatatggtccaggggtatcatgtttggagggaagaggccaccccgaaacccacatggcacttccccgagggggatcgggcccgatgtggagtgacggctgccccctcttcgcctgagggtattaaaacttgagggaggaggctgctcctagcacccacgtggcactcccccgaagagggtcgggcccggggtagggcggcggctgccccctccatgattgggggttggactgccccaacccccaccgcatgatgccacgtatgcggagttaggtgggcgcccccaacggccacctaaccgcatttaaagcggccagagtgcgtgctgtgcacgtgaccggttgaatgattgatggaaccggagtagtgcgcctgtgcactactcacatgtcaggcggcgtgcgatctaacctgccccgtcacatcgtgaagcctctcatcccgaccggagtcggttcatccactctagtaagcaaggctcccgttttccggtgcaaacgggaacccagaagtcttcacccattaaatgccgaatgacacgagcgtccctcgtgttaggcggttcaatttgatgggcccatgttgcgacacttgtgcgcatggcttccaagacaaggcacaacacacacatttaatgtagagaacatttttcctctttggtaggtagcactctcaacacccgtggtaaccctttgaagtataaagggaggtccatgtatagcgagggagggggatcgaaaggtgaaaaggcttagccctagcttgtataccagagattcagagactttgtaagctcagaaaaatcatcatacacatgagtagagtattatactccttagcgacccgaacctggataactccctagcgtctcatcttcaccgagggcccgaccctctcgttttctcccaatccttccagttcctcaactttcacccgctgtccccgaccaaactaacaaaagaggggcctcacggttccctgctcgaggagttcaccctccgacacatacgtacatatatcaatatggcgtaaaattcttttattttagatagaaagtaactttatatatatatagtttatatgtgtgtataaaaaatatttgcatataaattatatatatacctatatacaattttatatatgtgtaaatttatacgcatatgcatacttttgatgtatataaaagtttatatatacgtgtactacatatacatataccagcggttttatcgaatacgggatgctactgcagacataaaagggccggatcgcggaagggagttcgcgtgtttctgagttctgacgtagcacgatcgcacaggaccacgatgcggggggaggtgtgggcggctcgtggactcgagcgttttacctggatgcatgtacgccatttgtgacggcgccacactgccatgctgtatcatcctgtgctgctgacgtccgcaccgcgtacgcaattactcgctccgtccaaaaaagaagcgatccctgatccggatccccaatgtaagtttagtactaatgtgaaaagacgaaaatgcccttctgacaagatccaggagtagtatgccagaagcatctgatgcagagtaaaaaatgccaaacgcttcacgtgcacaaagcaaatactaaaaaaaaaaaatctctccagttgagaaaatactagtactagtagagcatgaacatcgcaagaaccatgatttgcctccaccactgcaagaatcaagaacgtatcaccgtcgcctccaccaccgccgacgccgcgtctcccagtcgcctccgccgacgacgacgacgtgtctcctggacgcctccgccgccaccgacgccgcgtctcctcgacgcctccgccgccgccgccgccgacgccgcgtctcctcgtcgcctccgccgccgacgacgacgcgtcttcccgtcgcctccgccgccgccaacgaagccgcgtctccccgttgccttcgccgagcgggaggtaggtgcagagggggtcgaaagcttggtgaggtctcgcatcttaccgccgccgcattgatgcagtcaatttgggaacgggagagaaacgcgagagaaagagagggacgcgagactggtagagacgggcaggcgataagatttttgcggtgtgaatgtgaacgagagaagaagtcgctgtccaccagggcccacaaatgatacgatagatttgaagttttcttgatttctgtggaggaatcctcccttccagaaatcgtctcttttaggacggagggagtacgtactactaccaccgccacatgagtatgtgtatgtcctcccatttcttgtgaatgcttacatagttacacggccagccagtctactagcgacgttgcatttgactcgtttgagacgaagatcccgatctatggcactgaattccacagacgcggacaagttttagcatgtttctgatgatcatctccgtgctgtagtgaagattctcgttcagccatcaactccggcccggcacgccgttacccccgcagacttttcaacagaaccatgcttgggcctatctaggacttctgggccgtatcgtcgaatccacgggccacggcccaatctaggcagaaaagaggccgtcggcaggtcccatttgtccacttgttctggaatcttggaagcaggtttcagaattgcccctttcctaacttcagaagcaatcaaacaaaatctgttctgagttctgacttctgaagaaacaacatcaaactccagactccagagcacccatggttcacatatatactgtatactccagtacaagtatacacaacgacaggcctgtcggacactgatgtgtaaacagccgtgaggtctcgatgccgcatgtacatttcatatagagattatgccgacacaaaaacgatacatggaaatcaataagccagtcatggtgacattgaaggtgtgaatggagtgatgctgacatgttaccaactggagtgagcaccggatcgtccgaccgatccaacgctggtttcatcttattaccctcttaaaatcgtataattattttagcatcctcccctcaatgtaaaaaaaaggatcaatcactgcaatgcacgacagcacgagcagtcgagcagtagaccacatacgcgtaaggtacataattacacgggaatccaaagagaatctacgatttatttacagcacggtgaccctcggctcgtcggcgtcggcggcggcggcgtccttggccttgttgcagttgtcgacgacggcgtagaggcggtagggcgatgcgtcggtggcgagccactgctcgacggtgaagagctgctgcgcgcagccgaggtggggacccgtgacggtggcctcgaggtagttgcagtaccagccgtggtgcgggccggtgccgtcggaggtgaggttcatccggcacggcgcctggcgcatgcaggggccgcggccgctgaagatgtcgaggttgccgcgctcgtagtagtcgtggccgtcgcccatgaggccgccccaccgctccaggtcgcggatccgcaccccggagccgtcggcgcccagcagcgtcacgccgatcaccgagtccgtcccgcccttccagatcgtccccgtccgcacgtatatcgtgtacacgcacttgttctccgggtccgacgacgcctccgccaccgtgatcccctcagccgccgccgccgcgtcgtcgtccgtggccgccaacgcctgtacaacatgcatgacatacggcgccctatgacgatgagaaggggggtttcgcgtacctctatgttgttagggagcggacgggacttaccgcgacgacggcgaaggagacgatgagaaggcaggagagcttcgccatggccgagcttgctcgctccaacctcccaagtctcgaaggccctttcccgccgcggtcaatgggaaagtggtggtggagatcgggaggaggattttgcgaacgaggtaggagtagtaccataaggccataaggggaaccgggtggggcccacctgacagtgacactagctaggaggagcatccaggtggcatatccttctggatacatacagagaaaaaaaatttcttatccaaccaaacggtgcaaggaaatcaattctgccgcgttcacgtgtaacacgcactcgagccaaaatttactgtaccttttcttttttttttttgacaaacaaccgacggaaataggccacgacctccaccgatcggccctgaatcttgggaagcagagataagatttcatctctaggaaaacaggagcacgacctccaccgatcggccctgatcctgttgattacaatgagtttcaatgctctatacttcttccgtctcataaaaaaactaatctagtattagatatgatatattctagtactatgaatatacatgtacatttgtacagatttataatattagaatgtatcatattcaattatatatttgttttttaatagaacggagggatcatataattatcatttggcgagggcgaagccggtctactactacatgttaatttggggtagttggcgaagacagtgacactaagcaggtgtcagacgagaaatagttggccaaatagtagtacataagctgataagcagtcaagaattcaagaagaaaagtttcttctatctaaaataaaagaattttgctgatttatttattgctatatccaatttatggaattgatacaccgtttaattgatatcatttagcaaaatgaaacatagcatatgcatccatctttcggctcgagaatttcacgggacggagatatggtatatagtggcaggacaaggcctcccaagcgtgttcaattgttgatatttttcagaacgacatcaccgtgtgtgtcatgcgttgtgctactggctccacctatgttccttttgcatctttgtttaggcctcgtttagttaaaaaaaaaagcctttccttcatcgcatcgaatgttcggacacatacatgaagtactaaatgtgaaaaaatatatatattacacagtttgcgtgtaaattgcgagacgaatcttttaagtctaattacgccataatttgataatatggtgctacaataaacatttgctaatgacagattaattaggcttaataaattcgtctcgcagtttcctggccgaatctgtaatttattttaatttattttattattagagtacttttaatactttaaatatgtatccgtatattcgatgtgataactaaacctaaaatttttttccaaataaacgaggtcttagtctgccgattggcaaatgaagttagctactccacactacatgattgagtaaatacgaaatgtggaacagtcaggcattcaagctcaaccggcttggatatacagtaacagcaacatattcttaagtttgttttaacagtattgacttttcccttgatcccatctgcttatgaaaagagcatttattcatgccacaaatggtacaatgccacgttgtcatcttctcctgtaagagcatccccagcagctcatccatatttaatcctctaaatacccatatggatagtcatcaaaaaaagattcctcattcatatccattcccactccaacaaatcatccatattacgtcattcatatcccaccctcctatattttaataatatcttccaactaaccttacttttacttttgtatttttaagggacatattttgaactactaaattttaacagtgttatttatcacgataatatttcgaaatgagtatattttaacggatacatttttaatggatagttttttaattgatatatttgaattgagtgaagcattttttttggatatattcgtagcaacatccaaaaaaaaatgaacacaacaaaaataaacatctgtatatttccctttctctactcaggctgcacagtagtgaacatactactagaatttttttaaaaaataatacgattttaatagaaaatcgcaaaaatataggtcggttcgacgaaatcgtaaatttagcaccctgtcgaacaaccgtgtctcgatagaggtacttatcgaactatggcagttcgacatgtacctgtcgaactgccatagttcgatagggtagttggtccaagggaaaaaataaaaaaaggacagtaacagtgcctggcaggacatatcgaacaagcaaacttcgatagggtggcatgtcgaacttggtctcagctacagtgtgctacagtgtttttcctctttttaaaaattattttatcatctgtcgaactgccggcaccctgtcgaactgcggttgttcgataggtaccctgtcgaaccacggatattcgatagagtgccaaacttgcgatttcgtctaaccgacctatatttttgagattttcctttaaaatcgtattatttccaaaaaaaatcccatactactactactctttctgcagaggcagcaggcgaggggcagcagcgggcgtgcggtggaggggcagcggcggccgggcggacgggcgaggggtggcgcgggcgtgtggccgggagggcgaagggcagcgggcgtgcggcggagggcggcggcggccgggcgggcggagggcggcggtgggtgtgtggccgagggtcggcgcgcggccaggccgacgggcgaggggcggcggcggacgaccggacgagggcgcagatgggcggggaggaggcagacggggggaggagaagctcgagggcgctgctgcgggtgtccgacggcgggagcgccgcagtggatcaggcgacggcaggaggacaacctgggcgcgggtggctgacggcgggagctcgtgctatggcgaaacctccagatctggtacgcctattcctccccaccttcactgctctatggctccaccagccggtgtaccacggcgtcgcctgctcgttccggaagagggcgggagctcgcgacggatgtggtggttgggatatggcgtgaggagagagaaacgccaaatctgacgtttctctctccaatatggagcacgatgactagatggaagatctgctggagcatcaattttctctcagatactctatttttaggatggagtagctgctggtcatgctctaaggccattcgtaatacgctgatgtgccattcagcccggagagcccagctcggagattctactccacgactgtgtttttcattgctccatgaggaacgcggaaccaattattgctacaggtacctcgccaggatttgcatgtttggacccaccactttcatgccccgcgccacagggaagggagagggagaacgggaagaaagcatccgaccgaaggaggccgcatcgactgccaccgaagagctcaacagggacggtagcctcccgctccgtgccgccgccagggagcttgtcgaccctccctccagtttgcaccgccaatctccatcttcatcgctcgatccgcccatggcccaccaatggcggcgagatgcagggattggtaggcaaaatcagagaagagaagggagagccgcagccctcgacggagctcgcctcgacagcggcgcttcatcccttgtcagcatgagccaccgacggatccaccggattggagaccgaggggggggggggcgtggggcgaagctcgcggcggcgtaggcctgagccgctgtggggacctcgccagcctcaatccgtgctcgccgctgaggccctcctcgatccacgccgccagaagctcgaggtgggaaatgccgccgtcgctaagctcgatatccagccgtttccttgtcctgtcgttcgagcttgacgggaaaggcgacgacgggaccggagaagagagaggctggtgcggcgagaggagaggagcgacgaagagggagaggaagacatgagggaggagagggaggcgacggagagcgagaggagcttgaggtcgaggccgcgccaccgaggtcgatccggagccggcgggggaggcgacggagagggagaggacctcccgagattagcagctcggtgccaccaccgttccgccgccacgccaccgtcgtccacggcttccgcccctcgcggacctcgcacgtcgcccgctgccgtgccaccgactccgctgaactcgccgacctcacccgtccctcgctcccactccgctgaccccgccgctgcttcgggggaggagagaggggtggatctggcgagcaccgacgccttccttcgcctgctgactcagtctgctagtggggaatggattagaggagagagagagagggggggagttaagaagtaaaaaagatagtactagtgcacccatctattatctatctatctatcttctatcttctatctatctatctattatatactaaaagtccattaaacatcctacaaacgctctcaagccgctatatggcgctcctacaattgctcctaggccgccacgtggcacaatctaatctcaccgtcgattttcatttaaattgatggacccgttattttataccgttagattagatctatgctgttaattttcatttaaattggtggatccattattttttaaccaataaaccagatctatatataatacctttatgctatatgtaatgtttgcctgaaggaagaaaacatcacgataaagatgaaaacttcctcatgtttaacatacaggcgctactaccgtatgtatgagttcatacgtacgatacaaatacttccatacgtgcaaacgtacatgatctttcctaatcttgctggaaaaaaaatacacatgaacttaaaaaagatagaagaaacacacatccataaaaattaacggtctttaaaatatgatttttgataaaatatattaattcataaatataaatatatttagttaaataaagctctataataaatatccaatcaatgttctttaaaccatcttctaaatctatctattatatattaaaagtatattaaactttctacaaatgcttttgcactgctacgtgactctcaaataaattagagaaatcctaaaaatctattatatactaaaaatctatgaaacttactgcaaacgctcctacatattttcacgtggcgctctaatttagagtaatcctagaaatttagagtaaaaaaggaaaatcatccaaccttcaattttcacttaaattagtggacccatcattttaaacattagattagagctcttaaaattcctattgctaatctctataaaaaaaataacgtgcttatgtcgtacgatcatctccctaccggaaaaaaaacaaaatttaaatacctacaccatatatgatgaaaaaaagataaagccaaaaaataaaagaaaacataaacacgtacattgtagaatcggaaagaaatactaaaaaggaaaaatcatcgatgcctgcacagatttattgtgaacagcctttaatatacgattttaagattttcatccccaatctaatattatagtcccagtgtagatagaaattcctttatggtctaattctgagcggtagtaaataccaggacttagtaatatttgattgatcacaatttggtatattccatttattataaaggttgctaaggaattcattataggaatgcttccattggaaatggtttgcttttgcacatcgaaacaaaaaattaaacgtgtggatacgtataattcggaagaatagatgagtgattcatactcagcatccctttcttttatcgaaggttctagcaattgatatcgggattttaataggtgagtgattcatattcagcatccctttcctttatcgaaggttctagcaattgatatagggatttttatttagatctaagagacattcttatcacataaatagtatattaaaatctaccatctattttacagtaaatatatttatttttttattataggataatctaaattcccttacagtatatatatagtgatgtatgattccttatagtattttttttaataacaaataagatgcccgtgtatttgtgcggaattcctttccgatttatattcaggaaatgttcttcaatttatattctatcgttatagtgtttgaaaaacaaactacaatacatacccgcgcggcgcgggctaccttcctagttataaataacttgcactgtagagcatgtatggttcttgtctagttggtatatgaggtccgataaaaacctaggacgcgctgctaatgccctaagaaaccaaactttacatgttgccaatattggcttattgctgcatcaacgctcaaatctcgcactgctcgccatacaccgacgaccagctcggaccacctcaagaaaaatgacaggtgcaacagcatcacaattcaagaacaccctcaggcgcatgctcagcgctcctcctcgccgccggggcggctcttggcgcagacgctccgctcggcgtagagctggtaaggcggcgcgtcggtggcgagccactgctcgacgtcgaacgccgccttggcgcacccggcgtgggggcccgtggcggtgacctccacggacttgcagtaccacccgtggtgcgcgccggcgccgtcggaggtcaggttcatccggcacggcggggacggcaggcacggcgcgcgcccgctgaacacgtcgacgttgccgcgctcgtagtagtcgtgcccggcgcccatgagcccgccccaccgctccaggtccccgacggcgaagccgctgccgtccgccgccgcgagctccacgccgatcgccgcgtccgtgccggccttccagatccacccggtctccacgtacagcgtgtacacgcactcgttcttgtcgttgtccccgccggcgaccagctggccacggcgcggcagcgccgccacgccgtccggtgatttcgatccggcggcctgcgtacgtgcgcgtatgcaaaaacctggccagatcaactcacaggtcacagcagcgagacgaccagaaaagaaaatgcacgtaccaagaccaccatggaaacgagcgaggcgaaggcgaagcacaagaacttgtcagcagccattgtcaaaggcttgaagaactccctctatttggaatttttggattggatgcgcgctgctgtgagctaagctgaagaggttgatatataggcagtgccagatctaacagtgacttgttagattttcttatagagagaacagttcgtgcaggtgtatgccactctatattgaatgcatcttccaacattttttatgcttggattaggtgacaacaagttgaacgagacaattagcgatgtgagatgcgaaagattattccagaacagatcacaagcaggcctgtgacaatcatgtgacgcacaaggagagagtatgggaagtaaagtcaaacaaacgagtacatgatgagcatttttagacggatttaggacttgacgagtggtctaaaaacctgataaatcaggtacgtttattcaagaaaaacataaaacatttttttgccacctactacattattagtgcgcacattaccagcagccctggcttattatcacaactcaacactttgacagaacaagcacataaactagaggacgtgctcagtgctcagctcagctctcctcctcggcggcggcggtggccgtgctgatcttgccgcagacgctccgctcggcgtagagctggtacggcggcgcgtcggtggcgagccactgctggacgtcgaacgccgccctgttgcacctggcgtggggaccggcgacggtgacctcgacggacttgcagaaccacccgtggtgctcgccggcgccgttggagacgagcttcatgcggcagacgggggctcccaggcatggcccgcggccgctgaagatgtcgacgttgctccgctcgaagtagtcgtggccggccgccatgaggccgccccacgcctgcaggttcctgatgaggatgccgttgccggccgccgtgtagagctccacgccgatcgccgcgtcggtgccggccttccagatcgagcccgtctccacgtagagcgtgtacacgcactggttcgaccccgtcgagcccgggagcagcagcgcgcccgtgtcctcctccgacgttgctccggcggcctgcgcattcaaggttatatatggtgaagctgatcacgagatggactcataagcgagactcagaaaatgtagaacacgtaccaaagccgccatggaaatgagtgccgcaaagcagaggagcttatgcgccattgttgaaggcttgaagaagcagactgtctcgacctttatctgcactttttgagatgttatgtgcaccgacgatgatctacttcagctggctaatgaggcttcttatagacggagacaaaacggataggggaattggaaatgctaccgtaagattaaactagcatggtggcccgcgcagattgcgcggctagcatcattatattttctctcatataatagcatatatgttttctcattatattattcaaatatattaaaatgaaaacataattttaaattttgcaataactttacaaaactactaatgtgtaatattcatattatattttatatacgtgttagttattaattatttttaatatcaaattttagttatttgtaaattatatatattcctatatgtactctagacttgtcttttaattttttttaattccgaattttctgtaaattgtatttctatatagactctatgctcttcttctaatattatttatttttatttctaaattttcatattatattttatatacgtgttagttattaattatttttaatgtcaaattttagttatttgtaaattatatatactcctatatgtactctagacttgtcttttaatacttcttttttttaattctgaattttctgtaaattgtatttctatatagactgtttgctcttctttcaatattatttatttttatttttgaattgttattattactaattgcatttatatgtggactctaaacttatctttcaatattctttaattttaatttcgaatttcagttacttctaaattgtatttctatatttgtattcctatattgaccttaaactcttcttcccatgttattcttaatttcgaatttcgaattttagttatttgtaaattgtatttttatacatactctaaactctacttttaattttattatatttattccaaattttagttagttttgaattcctatatggactctatactctacttctaatattccttattttttaattctaaatttctacttttttcttaattgtatttctatatggattctatactctacttctaatattccttattttaaattgggtgaatagctaatatgctccctgaagtttcacttcgggctcagtttagtccttgatgttttaaatcgtccaaacaagtcctccaaattaatcatttgagttaatatagtgcttggacccaaaaaagtgccacaaattaattatttgggttaatataatccttggacccacaaaaagtgccacgtgagcatgtcaagtcatcctcgcatgcagcggtatgaatgaaatgaacattctacccttatataccatataaaaaagaaaacaaatatttcacacatgtatggacattttagaattgtcacttacgattgctgcagcctaatcgtataaattcctttgtcggccaccctccgcaacaatgttgggcctaggttagctttttttttgtgtcttttatttcttttctatatagtatataggggtagaatagtcatttcattcatatcgctgcatgcgaggatgacttggcatactcatgtaccatttttttggtataaggactatattaacccaaataattaatttggaggacatgtatagacgatttgaaacctgactaaactgagcctgaagcgaaacttcagggaccatattagctattcaccctttttaattccaaatttctattatttcctaattgtatttctatatggactctatactctacttctaatattccttatttttaattccgaatttcagttatttccaaattatatttctatatggactctatactctacttctattattccttatttttaattccgaatttaagttatttcctaattgtatttctatatggactctagtctcctcttctaatattccttattttttaattctaaatttcagttatttcctaattgtatttctatatggactctagtctcctcttctaatattccttatttttaattccgaatttcagttatttcctaattgtatttctatatggactctagtctcctcttctaatattccttattttttaattctaaatttcagctatttcctaattgtatttctatatggactctagtctcctcttctaatattccttatttttaattcagaatttcagctatttataaattgtatttctatatggactctgctttttctttttctccgattaatgtgagaatttctaggccatgagagcgaacgtggaggctcatttttctattcctttaataatataatagatgattagtgtactgtttttttagatgaatgtgtcgttttttatgctttgattagacaacaagttgaattcaagaatgaggggatacaggattcttcaacggatcaatcgatgaatcgatcatgtgatgcacaaggatgatgtatcacgtagggggatttaagtcaaacaacgagcttactgtatattcaactgctctgctctagctggcctgccagtagagcacaatagtgctcagatatgatcaccatctatgcatcttctgttttggaggagttgaatttcattctatactcggca

SEQ ID NO: 8337 - DNA, 89480 bp, Oryza sativa
taaaaaaaattcaactacaaaggtgtagatcgcgtcgagggctacaagttcgatataaagtttatcttcattagagttcacatgaaaaagttatgaattatttttaaatataaagtctttagaccgtcctatttgatccagatgatattcaaatccaagtttagggaccggggtgacacaactgaacaagtttgtggacctaaacgagtgatctgcaagtttagggacgggatgacacagtcgaacaagtttgaggacctaaacggtcgatttgcgagtttagggaccgggatgacacagcggtaaaagtttagggaccggtgatggactttactctttataatattgtctcgacagtttggatccagctggcgaatcaagccacagtgcatatttgttttaggtccgcttttctgacctaccaaatgggctgagaggtcgagttcacgtgaatagatgtgcttttattaatggtactcgtgataaccccctttatattgatcacctcaagttgatccgttccactcctatgccgcttgttaatgtacttgcttatttagatgagtgttttttcgttactatctccgcagatgcatcatgattcggtaaatatataaaaccatttctttttacatgactaaagctaaaacccaatatccttccctttgttttaaaataatcaaacacacaattacatagccatgggagagatcgaacaagctgtactgtgaatatgtgagtatcccaaacggttttctttgccaaactcacggcagtgcaggccataagcgtgacacagaggatcgatctaggactaggacagcagcggatccgtacaccggaacttttaatttgatgaagtagtactaaacatggcagctcgaacaaaactaggttttagagatccaattcatggtggaacccatgcatgtgagcaccacggggtgatgcctcaccaaaccgccgtgcttatctgactcagcctccccttaaaaataagagacaaagaccacctgatcatgtcgaaaacgtcctaagagaaaggataataatacagccagctgcttacttatagcctatctatcagctcactcgtataatggttaactcttcactataaatatatggttcacatgtctgtctcacagattttcttggttcctgtgcctaagccggctgtaaacttacagcccgcttctcatctctctcctcttttctcctatccacttcagcattcagctttcttatagctcactattatacttgctctaatctcgatcgatcgatcgcccatggtggcaatagtttaatccccagaggccacaagtgtcaatcatcaggtcgatgggaagaaaagggcaagatgacgagattgacgccgtgcaggggattcccaaatggggctgattcgtccttttcaggtgtacatttcccatttttatactgcctgcctggagctctgcgatgaacttggacaactttatagggaagctacgtatactttgccagcctctctctccggttatcgcaagtaataaagcctaaagcggcacgttactctgtaaggaagttgagtgttaagaaggtaaagatgccatctgagcagtgcattacacaattgagttgattggtcagtctctactatagtagtagtacttacctttttcttatgggaggacagttggtagtgctagctagcttaacaatattctactttgatcatagaaaacagtactagtactaagttagtactacgttgtcgaagaggaaaaaaataagttatctctttgggacttaacaatactctgtttcctttcattagaaaaaaaaaaatcagtactgctaaataagcttatcttctggtacacgcggtacaggttctccattattttttttcctagcgagtccagcttcctgcttccctacctaggaggtccaactccaacccaacgcctccatgtgccttgcccctcctccccccttggccgagatgatgataagctgctacgccttgctcagttgctcccatgccttttgaacgcttttgagaccgtgaccaagctggcgcggcgctgcatgcggcgtgagaacgagcgtcgcagcacgacgcgcgggcaccacgacgactccacgagtccacgagcgttttcacgctcgtttcgcacaggctcacgcgttgccgcagcccgttttgcagaggcctacgcgtggacggcctaggctcgtggtgcgcggagcgggccgggctttttcagggcatcaccggtgttagttaatcgcagtagaaggggtatatgcccccgtgaccccaaatctcttcgaaagaaaagaaattcccctttttcttcaagttcaaaatatcgagttacatttatttaactggatcatggtatagtagtatcaagaggtattagcaatcttccctgcggatgatggagcccaaatcgtttaccttacagagatcaatcacaattcatttccataaacaaaaccgtatccgaaaacagtttgaatcgatctacagggtcatgtaacaacaaagatccgtgtaaccaaagcaagaaaaaaagaaacaaggttctcaaggatgggagaattgagatatcctcttaggttgacaagctgccaccaccctgttgccaaaggttgatgatatcagtggcctgattcagaaggatgatcatctgtttctgagagatccactctttctcctccagctttgctcttagctcctcccaggcatctttccgtggccagaagtagtatgggcttaacggaatgctgccatagccgggaaccaactggtcgagggctatgccaatgttcttctccatccatatgaacttcagaacaagcattggatcctgcctttcaggcaccttaaccttgtactgcgatacaaaatcaattcgtttcaaatctcataatgctaatactgattttgcatatctgagtaaaataaattgtgcagttttaacacagctcaagtcgtagtaaaataaattgcaacaactactgtacgtgttccattgacaacttcatttctctacaaaaggccccatttttcaactgtgagggtaactcccatataatcaaaactaatccacttttagtgtacatctctgaaatctgatatagtgatgaaaaaggaacttattgtgcctgttaatgttgttacataatcacgtaaatagctgaatgaaaaaaaactcctttcatgaccaaaacctgtcaatgctacagtttgttcaatagttcagttcttgcttacacatacaaccaaaaatggcacacgctcaagtttgtggacatgctttcatgtgctcttcgcctcttcatcactagcatacaccttttatctgcagaagtgcaaaactgcaccaaaaggacagcccgagtgcccaaacatgctcaactagactagaacttctctaatttactctacttgtgacttctcttaagctttcagctgtgcattgtgtctaaagatttactctactcgtgaattcacccaaatgtacacctcgtactgtatttcacctatgagctcaagtaatcagttcggtaaccaaaattgattcaagaaaaatcaaattcatgcgaaaccaaatgtgattgaactccatcctcttcaaaaaacaacacttccttctgaaattgagctcgactcggtaaaaaaaaaaaccccgtaatttcagtcactggcatggtttggagcggctactagcccattacctcctgcgcttcctcgccggcgctcgcatccccacctccgacttgcttctcctcttctccctcctccgcttcgacggcgccagaagcggcggcggcggcgaggccacggagcgagcgaaggggaagcctcctgctgccgaggtggacgaggcgtggagtggaggaggaggaggtggtgcagggggaggcggcggaaagcttgggccgggagatgcgggcgcgcgaggcgagggccggcgtggcggcggggtggacggacatcgccagcatcgtgtccgagtccgaggctcctgtgcggataagaggaggaagacgatggtgcggggctgcctcctcttatctttacccttaataatccccttctcgtcagctattagatgtgggctagaaagttatggtaaagcccaatatggcccagcacaaaacggcccggcccagatccaatctaagtaaaaagctcacagctcaatcgtctcggttattcgagaataaacgaaatggcatatttgtaaataaaaaataatttgtgaataaatcttttatatatatatttttaacgatctaaaagcaaagactgaaaaataaaccttcgataaaaaaaataaaatcaaccccaaatttaaaggtaaaaatttaaattttgactgataaacataagtataagcgaaaagatgaggccgtccgtttgccttcagcagggtttgcaaaaccgtctgtaaccgtgcgattaccgcgcttaccgtggggtacggtaaaagggaaaccgcggtaacccccttaaattcaaataaatttaaaaaataattttaaattttgataaattttacacggttaccgtgtggtaaccccggtccggtggtttgggaaaccctggccttcagtagtgctagtgcccagttgccaaccgcttgggcgtagtaaaaactgatagtggaatgaaatgaaccgggtacaaagtactgaaatgatcgtaagttttgaaaaaaaacaagcaggagtagtaactttgcaagtaaggatgctacattctctgatagtagtttcagtgttttacacattctataagaacaccgaacaaaacaagcatcgaatttcaaatgtcgatacagccttgaacagttgaagttcttgcccacaagtttaatcgaaagcattgtcaggttaacccaagaacgtgattaataattactaacattaatattagtcccatcttattcgacaatcattgctaaactatttactgtgtcatgagatcgaatcaagtttgatgccggcgaggttttctccgctcagaagtccggcgccggcgagtacgcgtgggaggcgggcacaaccacggccgtcgacataggtgccgacgaggagttcaccaggttcagtatgctgttccagtagttcttctcctcctcggtctcctggaactcgccgtcggcttccgcgtctctccccgccggcctcgggatctggttcaaggagccttcgaggagtaggcccgtgaaccccgctccggcgccggggaagcccacgtcggcggcgtcgacgtcgccccagtgctggtccttgcacgcctcgtcgtacgcctgcatgggctgcatggcggcgcgcgcggccgccgcggcggcggcgccgtgcgcctccagcacggtggcgagcaccgcgctctccgagaagctcagcgtggacgtcggcgagtcgaggccgtgagccgccgccgccgccgccgccgacgcggggggtgccgggaggtgcggcgcgcccggggtcgcggaggccgcgagcgcgcgcagcttggcctcccgagccaagcgcgcctccgcctcgagccgcgcgctctcccactgcgccgtgtggctgaggtgcgccgcggccttggcgtgctgcgcgcccgccgcgccgccggccgcacctccgccgccgccgcccgcgccggccacgtcggagcgcggcttgtgcgtgaccgggtcgatccccatcttggccagccgcttctttaggtgcgtgttccagtagttcttgatctcgttgtccgtgcgcttcggcaggtgcgtcgcgatcgccgaccacctgcaaaacaacaacaacgccaacgccggccaagaaaaaagatcaggaaaatcgcacgtcaaaagccctccattcgcagtgacaaaattaaacaaacagcactcttgaaaacgtaaataatcggcggtgtgatttaaggcgtgcgtggcgtagtacagacagagggcagagatgatcggaagctgtgagtcaaaatgggaagaggggcaggtggcaacagtggaccaaaccccagttttggtccacaatgatgggggggctcgcctccttaaatgacgagcttgaatgccgaatcatatgggagaaaagaaaggaaaattctgggccgagcctctcactgcccaaccttttcacactttttcccttgttgatgcatgcattgattggtctgtgctcacagctaatgcgtggttgttcgacgggcaaaagatgagcaatgcagcattacgtgtgaacaaaacgaaaacaagtgatgattctgttctaacgtaagaatttttagcctagcttgtgtgttaatctatggacagtacggtttgttacggacaaaatgctgaagcaggtgtgtacggggacagcaagtaagtagcacggcctgcgaaatttacacatcccctggctaagctccgtgttccaacccttgcattgcataaccctttcataaatgtctgccaagactacggtgcagaatggtggctactggctagtgtgttcttgacctgccggtcagcaacaagtactagcagtcaaaattcgtgcaggagaatcaagggttccatcgcgattacggaattaaatgtgctccgggtgcgaggtgaagaacgagcgagcagctagcaggagggagagttgtgcactacgtatcttgtatgcatgatgcatccatgcgaaaacgaagtaatcgatcacctgttgccgagaagggcgtggagctggatgatggtctgctcctcctgcaggctgaacttgcccctcttgatgtccggccggaggtagttcgtccaccggagtcggcagctcttgccgcaccgctgcagccctgcacacgattgtcacggtttgcatgcacctcagatcagagttcagagagtagccagcctcgaggatcgatcgcctcgaccgaacattgcagctaggattgcagaggttgagaagaaatttaagctagataagcggcgcttaccggccttggagggtagcgagcgccagcagccgtggccgtgctgctcgatgtaggccagcagcttctggtcctcctccggcgtccatggccccttcttgagcccctccttctcgcagcacggcgatcgccccatcgccggagaaaagcaacagcagcagcgagctctaggaaaactcctccccgatgatcttcgacgccctctggttcttcctcctctcctcttctctcgggctcaagtagtaggtctatgtgtagtagtacgtgatcgaggcaattcactacgagagatcttctttgcagggagctgtggctctctgcgagtgactaatgcagcagcagagtcagtgagagtgtgtgtgtgtgtgagagagagagagagagagagagaggccaaaagcgaaagagtgaggcacattgcgctgcgtagaggcataaatagaggagaggagagggggtacggtgtggctggctcggcacgcacgactcgactcggctcgcgcgaacgactcgatatcttcttcgggcgccgcgatctcctgccggcaaagtggcctctcactgtcagtgtacgtaactccaccccgcgagaggagtaggggcaggaccgtgatttcaccccccacggtgtacgtgtgccccaccccgtcgccgcgggaggaacgaacgaaccatcgctgccaatcgcgatcccacttcatccatccacccgatcagagggcgtgcatttaactcggcgcggggctcgtctctgcctctgcctctgcttggtatatgtggacgctacactacacatgcctacatggtcctttcctcgcgctaccgcgagtggcgtggacggcgtacggcgcctgtgtcgtcttcccccctctatcgcccaatccatccatccatccatctgcgtgcgtgcgtgcagtgcagtgcatgcatgccatgcgctttcatggcgctgccctgaccagcgctgttgctgccgcaggggagggggaatctcgcgcgctacagctcgctgcaccaaagagtggtcaggcgcgcgaacccgatcgatccaacagtgttccagtacaggacgcaaattccaacgcgaatcgttagttcgaagctggcacagcgtgcgggcgcggcggccgatcgaagggagagatcgaattactggctggtcccgcgattgttcatatatcgcgcgatcgatcgagcgagcggaggagtgcgtgctgttccttgtcaatagtagtatacgcttggcccggcccccggcgtgggcaggtgaccagtagctagctaggcttaggctagctcgctcggcttgcccttgcccccatccgtttggacgattgacttgattgcaaatctcgcggcgtttttgggaacaatttgttttactcattcaattcggtgccattgccgcaagtcacgactggcggtgcatggttcatgattgcgtcgcatcgcatcacattgcgtcgcattgcatgcatgccggtttcagttgtttgcttgctagctcggtcgatcggttggagtgtgagatccccgcgccggccgctagctcctggtttctttgcacatttcgcttgccatttcggggcgctagccatggccgatttgtggatctctccccctgcagattgtgcaggcgatcgtcccagatttaatttgctgtttgttgggccctgtatgtgttgctacgagtcgcggctaaagtgatctctgaaattagctggttgctcgtttgtggtaggtactctattcctagcgttcccatttctcagtaaagcttttgctctcctggaaaaatgtttgtcagtttccaaggaggacaaacggaagtctccaatccattttctgaatctctgatctcgccatccttaatcacgtactaatccagtactgtttatcacgccatcaagtcctagtccaacttactacccaccagatcaacagcttactgctgcgaacattgtacgggaggctgagaaaaaggaacagtactggcagtgaagggtgatgatgatgtacggggtagagagactaatggaacactctgtaaaattccgccaacctgcaattgcaaggcctgagcgcagggatggcttttgccatttattccgctgttcccggtgcccaatcgcaacagtagtacagaaggaccaccgctgtgaggtgaggggaatcattcgatcgaaacacagccgcatgtgcgtcttccccaagaattcaccgtgttctttttaccaccatcactgtaaactgtaaagcaaaattagcttcgctacttcggacacggatcctctacggtattatacttacagtagtattggctaacaggtgaacccgatcccacgtgtcagcgatagctaatgtagatacaatatacttcagacgattcccactgtcttcacttgcaccatcacatccttcagactttagaacttgctgtgaatgtcagtatgtcacatcacggcataaaattataggcacctgccagttgcttatttactgtactagcttgatcgatggcatggctctcaacgagacttaatcgatgctttgcttttgtttgatttcgtatttccatggcctacgttgggttgcagatagatgctgctgttactattctacggctagctacgatgggtatatacttagatatgcatgctagtagtatcgatcaaattaagtcctgaacagtggaacgcacagtacgtgctgcggtgatttggcactggcaccggtgtttaattagccatgcatcagtagcagtaggcaaaaaacttcaattgcctactgaagtagatcgacgccattagtacgtagctagtagtatgtagtatgagctaacctgtgtctagtctgcaataggaaggtgagttaagcccatccgctccgctgccattgcaccgtttcggaaagacgatatggcctcgccaccagatcatctgaaagcgaacgttttctcggacggatctggtagaggttttacgtccaagcctgtgtccagaattgctccgtcctaggaactgaaactctgaaaaggcaatgcgcgagaaatgggcacggcattgattgaagaagaggatcgatatgatgatcgtctgtatgcagtggagtgcaaaccagaatgtttgcctctaatgcatggctctagctgggatgcagacttaattcatttagagtcgagtgattgcctggaaaacgcatcatggtttattacaaactctctatcgtttagcgtgcagacagaacagtacaagggggggggggggtgaagtttgagttaattcaactgttgatcgcctgacatggccattgctcatgccggctggaccagctgattgacgtcgagaggggaatctgatcatctttatagcgctgacgatttgcaatagcgcttgtactactgcagcatcagggcagaagtttttcatctaatgtttttgcagacagcagaagttttccatctaatgttttgcagagatgcgatcaagcacatatatttccattaatgttataaaatcttataggactactatgtaataagaacatgcaaggcagaaaaagagcagctcgccatttagcaagtctgcgtgagctttattattgcgcaaaatggtggtcctgatgaacctttttctagggtccttttcttctccggctctgcgtggttttcctggtttttggcagcaacgtagcaccctggcctggtagacaagtatttaaaggtgtgagccctttacattttcgtcctacgagtactactcatcttttcttttttttcttttgaaaagaaaatgatagcagcgtactgaagtccaatccggtacattaatactccgacctctgttctcaggcctggtaggaccgtaggactaaggccgagtttagatacaaagttttttttttcaaactttcaatttttttatcatatcaaaactttcctacacacataaaattttaactttttttgttacatcattccaatttgaaccaaacttttaattttagcgtgaactaaacacaccctcagtatagtacactttttggctgtgtttgcaaaatgggtttggaatatgattttccaccccttcaaagggtaagctttaatcttagccatccattcttctcacccatttcatcatatccctccattcatttctattttttaatcccacctctcctaacccattttccaaacattccaatccaatgggtttcagcatcaacgctgcagcaatattggtctttagacccgaaatttgacctagttcactcagccaagttaaaaaacctactccctctggtcataaatatgtggcatttataacaagatttgatagcactgttgatactttgtattgatacttagactgtaagtaacttttgaaatgcttaggtaaaaacgaataaaatatatagtttgtgtggctttgtctagaaaagtaatattaattataatatcataagcttattaggttttacaaacttctcctatatcaaagcgttaaacttttgaccaaactttgtgctaaacgtttactatttacggaaagggtacaaatctgtcgacagattttttttttatggatatctttcgatttctggtccattgatttcgtgattagatccgtgctggttgccagagataaaaaaacacagcaaactgcaagatcggggattcgatcgtaggaccaactggtcgcacgcatcacgccttaaccaagtgagcagttattcaaatttgaactgaaataaaaattacacattagttaaacagtaattacatataacttacactgattacatttgaaagatttttctaaaaaatctgttgctagaattttagatagtccctaatatttatgactagagaaagtagctcatccattaaacgaccggacttgtttcaaaggtcgatcttatctccgaatgcttatacaatcctctagaattgaacttctgcacccctccatgcccccagaagatcaaaaagataaacaaaaatatagcttttggcaagggattatctttgaaatgctcaaatgcaaaagtccagggaagcagcttagggcacctccttatgagacacgattacacagtgcacggttgctggcttggttaaagcagcgatcactctatcccacttataaatatctctttagctcttttttaaacctctttgatggcttatatcttttaaatcatatattatttaaagatctatttgcactattatactccactaaaaatatgtgacaaaatgagatcaatgttgaatatatttaaatattttattaattaaaagtaatttatttaaactgtagaagtaacttagctatgcaatagaagtaactctctatagcattagcattagaagtaattacattatgtctgagttgatgtaagaaactatgtagagtaaattcacaagtaaagtgtagggaatattttcaagtaaatacatacattatttaaagtaattattgtattattttttaaaaaaaaacaaatcttgtgtcatatagaaagtaactcttcatgatattaaaagtaactacactgctggagggaagtaactttttaaacaatagaagtaactcttgataatattagaagtaaatacactcctagagggaagtaactataaaaaaataaaataaaaataactcttcaaggtattagaagtaattgaaccgctagaaagaattaacttttcacggtgttagaagtaaccttttgcattattggaagtaactacactagaggagttaagaaaattttttttgaataatttgaatatattcagtatgggtgtgtttggttgctagtatgtccctagtctggctcgtatccctcatccagggtgccctcaacctggataggataatgcaattggctatgtttggttgtctgcatgggtttatcctagatgatatgagatgatgtttggttggttgtatgacaggatgctgtacactagagatggtgtttggtttgttggttggaccttgggtctgggtgacctcttcttacatatggtgaccatggtgttactatttaagccaagttttcgaaaatctcgttaatttcatatatttgacaaatttaaacaactagctgtcagtaatcatgtaattttttaacaaaaaggaatcaatgtgaaaatcatgcatgccggtaacatatatatatatatatatatatatatatatatatatatatatatatatatatatatatatatatatatatatatatatatatatatacacacacacacacacacacacacatgtatatatatttctctacctctcaacagccgtcgtcgatatcattagcatgtatatatgcgaatattctgataaaagtggtaaccatctagctgtggaacataaaccataaatttataaatttatagttatccagtttaaaaatcaaaatcaaagtgaccatctttcccaatctctaacagcaaggaaaataaaaagaacaagggcagaccaaaaaatcatgcccagacatgttagaaaggagaagaagggaagacgagcagccaacgacgggggaagatgagcagccagcgatggtgggagacaagcagctggcgacgggggggaggagcagctggtgacgggggaagaggagcagccggcgacgggggaaacgagcagctgccgacgaacggagacaagcagcctgcgaaggagggagccggcgctcacgcccgcctggcgatggaggatgggcgcagtgaggttcctggcgagcagcccaaaccctagctttttttcgttgtgaaaaaatgaggaagagggagaagcgctcgaggagttgaggcaacgcgcggtgaccccatctctttctgcctgcacacgcgggtgcagcctcgtgccctgtcgctgcacgccacgagccaggccgcccagcaaagctcaaattggccgtttcccctcagcctggctcgacgggcctttttgcatctcctaggcctggctgagtcccccgtccaagcaaccaaacaacctgcaggttgcacgccagatgcgggccaggtgcggtccaggcaaccaaacacgccctattagactcattttgtcacatattttaagtggagtatgatggttcaaacggatcttacaaataatatatgaataatatacttctaaaaaatataactcatcaaagatcctataccaaaggaaaatatacttttgtaacggtatgttagcctcagtagtatgcacgtgaattgacatgacaactagtagatagtatgtggtcctctttttctagcaagtggtctcgtttatctgtttcttggtcaatataacattcatgtgtttatatatatcttagccatcatcggacgacttacgaaagggtctctagttaagaccaaatagagagagagagcacactgaatagattttaccctccttatgccatctaaatattatccctcacacccaatgacacactcacacccaatgacacactgtcccctactaaagcaagccatccccgttgaagatcgatgctaccgtttccttaagggtattgatatgccttcaccaccatagccaacaatttcacccttgttgaagcctgacggcaacctttggcaaaagctttgccactacgtcttcttcaagtccacaaccttaaaagagatcactaccgccatcccttgcaaaagatagaatttcataaacaatacattcttcaagcaacatatttttttttggaaatagcttacgtggcactcaaattcttgagtttcctcgtatgctactaaaaatatggcatttcccttacaagacaccaaaatccagcgtgtatacaatctctaactgtaccatataacttggttgaaccgttgaaatgtatgaaatcgtatgttttacatcatatctgtataattgaacttcagcgagaaacagttaggaaaaacatttttattttttttgaactttcgaaggtaatttaagaaaattcactttgttttttaataaaacaaaacctttttgacatggttgcagtacatctgccacaccgggaaggcagggaccatggcgagaccaaaattttgaatataaggtaccaactaaacggtatgttttacaatgttattagaatagtattttaaggtggagaagcaccaataaagttgtggtatgcggatgtgcttgaagtgaagtggtggtggctagggttcaaactctatcaatatacattacacaaacatagttgtgttttaaatagaaactaggaaggtagcccacgcattcgcgcgggcatgcaccgtacactatgtttgaaaacttataaaggtgaaattttaattggaacttatgaaagatcattttttatttggattatttgagcacatttagaaaaaaattggaatattttctctaattaaaggcactcgattttttatgcagcggctcaaactattcttgtttacgtagtgaacgtttaatttagctatacatgtttcaaaacatgtcatggtgcgtccctgtgttgttgaattatttcttttccttttggcaaattaaatatgaaaattttgttctgataatattgatttaatttagctatgcatgtttgtagaatttttcataatgatatataatgtcttttcataatttttacaagctaaattatagtcaacgggtgtattaaattctaatttgtgattaattgtaatttgtgattttaatcataaataacataatgatataaatagaacgtataatttggtccgacagaaaaagaacttccttaaaacagaaacggagaggaggtatgtatgtgcgtattgtttgcacgcacgctacttgcatgggaagaggggacgtctctttgttagaatgagaaaaatcaatctaatccaatggcttggagtagtgggcctattaattttagagaaatcaaaggctagttgttatttttctcagattttctataatttattggaacgtcacgtggtgtcataggagcatttatatgagcatcatatggtggcttaggagcattatagaaattttcatggacttttactactcccttcgtcccacaatataagggattttgagtttttgcttacaacgtttgaccactcgtcttatttatttttttttgcaaatataaaaaacgaaaagttgtggcttaaagtactgtggataataaagtaagtcacaaataaaataaataataattttaaaaaaattgaataatacgagtggtcaaacgttacaagaaaaaactcataatcccttatattatgggacggatggagtatataataatagaaaggttagatattccttcaacatatttggagaattattcaagctgacatattatatatgttatcaacttttttaaataaaaaatagttcgttgttatatttggttgatatgcaaagaatatggctcatagaataaatatatcttgaattaaataagacatgtaactattgaaattgaagattaggaaagggaagaggagatgaggggagtgaggtagtacgtacaggtggaggtcaggaggggaatatagaggaggtggggtgtagcgcccgttccgtcgtggcgcctagcaggaaaactatctcttaaaaaccctatttacgaaatctgtttctttgcttgttgtctagtgtccgtgccatctcagatctcaaatctccgatctatcgttgagttcaatcccgaatccaaatccttcccgaaactccctccgcaaaagtctattttgcctccctcggattcgttgggccgaatctctctcggcccatcttcccctccctccccggctctctctctctctctctctccctcccttcccggctctctctctccgctctgcccgcgcgccgtgcgcgcgtgcgcgtgagccgcgccgagccgagccctccgactcggcccccgcgcgccgttgttcacgtgtgcgcgccctcgtagtcgccgcctgtgccgcgcatgcgccgtctgcgtcacccggccccgctgccctgccgcgcctgcagccgcgcggccgctcggccccgcgagccagcacgcgtgcccgagccgcccgttgcttcccgcgcgcgcgtgccgtgatggccgaccgcctggtcgccaccgccgtcagcctctgccgcgcctgcccgcgcctgtcgcccgtgtcgccgctccgctccaaaccgctccgccgtcatcgtcgtcgtcatcgactcggccccgcctctccccgcgcatgcttccaaggaaaggaagcagggctcctcctcatcgccctctctccctcctccttttcccaaggtggcaagggggcaagccccctttctctcccccttttctccctttttccctctcgccggcgtcacctcctgtcgccgttttggccgctagctggagcgccagctcgccggcttgaccgtccaatgtcggttcctctctcccaaaccgaccttgtcgcccatttaaacccaagctcctccccctccaatctccctcgttttcgtctctcgccgccactgtcgcccctgttcgccatcgccgttcgtcgttgcgcgtgtcggaggagccggcacgagcaaggacgtggaaggggacttcggccgcaccctcttcctcctcttcctcggcccgaggccgaaatgatcacgtttcgcgctgtcggctctcgtcactgctgtcacatcctgatttttgtttcaggatttataaattatttaataaattaataatagaatttatattaaatgttctttaatttacaagtgaagttaaatgtgggaaataaaatttcttaaatataaagcatggatggatttaatttttattaaattctccatgattaagtcaactctctgaaattttctcggatttttcagagctcaattcctaaatgatacaaagaacagttcagtaattatttgatcattaataatctaattataattgttaagagcttttcttgtttaaaaatccttaaattataaattgttgtttaattggaattattagaatttattttaaaagcctagaagagaagatctaattttaattaataaatctcaatataaaatggggccagataaaatttcattaaatactttgcttaattctataattcctagatttttctgggatttatttgagctaaggaagtatttttaataaatagaattgcatttcatgaataatttaaattgaaaaaggtttttaaaagtctctttttggctttgggccgaaagccggcccaaaacctctctctctccccggcccaagtcggcccagtccgcagccgccgcgcgcgcgcgtttggtcgctgacaggcgggacccacctgtcagtcttcgtctacctctggccgccgccgcccgaaacactagcgccgccgccgctttccaattcggtcgctcctttccttttccggccgaatcgattgaggggaaacgatcttcgcgatctcctcttccttttctcttttggaagcgtcgtctaaatcgctttggaagttcgtggattcgaggtcgaatcggatcggtctctttcctccgaacccgaggtttccttcgcgtcgccggtcgccgtgggccttcgccgccgcctccttgcccctataaaaggacccccggtgtctcctctacccgccgccaccctcgccttcgcctctcgtcgccggtagagccctagcgccgagccgcctcacgccgccgttgtcgccgccgctccagccgtgcgccgccgtcgctccagtcgtcgccgtcgcttggggaggtcaccgtcgtggtcgccgtcgcgtcgccgtcctcgtccgccccttcgccgtcgttgaagaccgccggagcaccgtcgccgctgtcgacccgatcttctccgccgcttcgacctcgtcgccgacgtcgtccgttgctcctccgccgttgctttggtcaccggtgagttcgccgcgatgcccgcaccgttttggtgtcctccgttcgcgccgccgtgccgtcgttcgccggcgagcatgcgcgccagagccgccgagccgccgccggtggtgacgtcatcgtcgacgccatcgtcatcgtttccccgtaagccgccgtagacccgatcgatctcggccgtccgttttggatagggttgatctcggccgttcgttcccgtgaaccgttgccgtgcacccggtccaccgcaaaccctagccgctgacgcaataatgtggttcaagttgcaaaagttatataaaataaagatctacatattaaaattatccataaattgaattaaatttatttaattctttttaaatgggctttaattagatttaatcttgtaaaattcataataaattcatatgaagtcagaatgaggccgttcaagtctcataattcatctaaaattatgatctacatgtttgtttactttttatgtattgtttatttggtttttattagtatttttcttcgttttgcgtgttagcttgtcgtttccgtcgttgcgaaggttcgtgagtgcgccggaagtattcaagaagattaattgaagaccgattattgcaaggcaagtcacacagatcctaaacacaatcctttgagcatgttgatcctatatttaaattctctatttatttcaactgtgcatttattttcgaatgtcactgggtggtgtgaatctattcctttgttatggcctgtttgcattgattactttattccttgataccttgggttattataacttgactagttgagctttatatattggttcagctagatattagatgtaattgcttagccatgcttagaaacattggcacactattgggataacttatgactcactattatttaatgatggcttaatgatagttcacgatggttaatcgtgattggttaattaattacttgccaactaaaacttgataatggtgggttgtgagcacatggttttgagagtcgtgctcatgacaattaaggaccggttcgcgagctactgttgtgaaacattaaccgtgccaaccacaagccagcgtgggcaacggctttaccttttgtataacatgattcattgcggagcaccagactgagaagtggcggagataagcccacgggggtcgctggggagtccatgccttgttttataagggggtgattatgatccaggaatggtgcactgtggtgagttgtgttgtgcagagggtattgtcacagcctctattcgggtactttccagtatcgcgacgcatggtagacatgatgttgaggctgtgtcttgtgggtacagtggtacacctctgatcagagtaaaactattcgaatagccgtgcccgcggttatgggcgggttgagcaatgtttttcgtgattagtctcacacctctcacaataattatggatgttatacctggtaataaattgtttagctcctggtttggagttagatctgtttagccgggtgtggttgttcaggatggttgggcctgtgcagcatgggtgtgttgctcagtgttgattaaaatttctgattaattactccactgttttatttttcttaaatgttttgctaaatgctgcttttgcaaatgagcctatattatgccatcctttggtatccttgtacacttgcatatttgttgtgtggcttgttgagtatgtcatatgctcattcttgcaataatcaatcaacctcagttgaagaaaaaggatccagaaggagaagacgtttggcttataccccagttgagctgcctgtgggagtggggctgaagccatcgctagaccgttattccgctgctgttttcttttctcttgtaagtgtctaacgttattattatgatggatttgtatattaaattgtcagtttgtgtacctcggctgattcctggacgaggattttatgcacaaataagttcggaaattactagtgaatttccgggcgtgacaactgcgcccgcccgcacggtagtgcctccctccgttcttcctcctcgctccttctcctccccttagactcgggtagtagcacgagtagcctccccgtagctagccgtcgccgccccgactgctgccatcgctcgccgtgtgctcgccgctgtcgccgcccgagctcggaagcgccactcatcgccggcctcgctcggcgtagctccgcccaatccaacgctagcatcggattcccgtagccgcgtagatgctctcgccgccgggaatcggcccctcgtgacctcgtcgccgtttccctcttcttccgccgccggttgccgccgccgcaatccgctgccgtcgagcatcccccggcaaatccgagccgttggctcgactcccctcgtcccgcgcaaccagccggtgtgctcgctttcgcctagatcgccgtgtttcgctccgccgctcgccaccgccgtccgccgtctattccggccggcgtcttcttcaacctcccgccggcccgcgtggctgccacgtaggcgccacgtcggcgccagctcggccaagaccgggtcgagccgaccccggtcagccgctccctccggccccgctcgcgggcgcggtccaccgcgagccgtgaggctgcgcgtgggcccgccgcatccgcgtccaccgcgaaccgcacgcatgcgccgcgccccgctccacaccctagcgccgcgccgcgtgctccctccgcacggtgagccgagccgctgacaagcgggtcccacccgggaccacgcgagatggactcggtccaccggcgccctctctctcccctccccgcgccctattgggccgtgtcctcttgggcaggccggcccatttagctcggccgagccgccccttttctctcgggtcgcgccctagccgcccgagggaagtttatttcccctccctcttccttttctttttccaaaagggtttaattaaatccttttcctttagaccaaaaatccaataatcttagaaattcaatatcttcccaaccgtaagtccgtttgactctgttcaacttccaaaattcctcaaatctctagatctatctaatggcacgcttagaggtcattaatagggctttattttcgccgtttgttgagttgtcccgttttgcgtatagtttcggagcccgaagacccgcagtgcgaggatttcgaggatcaagctccagatctcgagcaaggcaagccacctttgaacatcttgagcctatatttgaatttaattatgttgcttgaaaaatattatgcattgataggatcgcacttaatctgtttgtcccgtctgcaaggcagattgacggacctacctaatttgttgcatttgatccttcctttgttaattgttatatcatgtccccttgtaaccatctagttgcgcctcgatattcgtgcaccctgtgcgagtatcgacggtcgccttcaaacttaaaatctgaaaaaacttcttgggtaaaacttgggttttacaaaaggcttggaaaacccgacacctgggtcggtgcttgcgaactaaatgaattttcaaaaccgcggaccggggaacgtaccgggtgtacggtttcccgctcttgcacttaaggaccgtttccttggaatttcatccgaacataagacaagtacgaccacatgggtggaatgggacacccctggctaagtaattagcttatcaggggagccttgatgccgagagacatgtggattcgccggggtggtgtcggggaggacccctgggcttcctggcacagtatggtctgggacctaacctgttgttggtctgggacccctctcgtcggcatatggtaaatctgtgtcggctttggaaatgccttgtcatgaaagcttggaggtctcccgacgtggctgatccccacgggctgggtgatccgggttagtaatgtcgtgtgggtaaagtgtaccccctctgcagaggttaacaaactgttcgaacagccgtgcccacggtcatgggcggatgtgaggtgattcctagcgtagttttgtttgactactgccttgtgaaattgctgttgtgaaaaggggatcgttgtttggaaaatctgcagctgatgggatcggctaggcccgggtggccgtttgaaagttgttggcccgggtggccgtttgaaagttgttggccgggtgccaatcttgatcaattttaaagactgatacattgcacatactccgaccggacgagacgcactgtctcatccgtgtcgtttgagaagcactcacttagttgttttcagaaaagagttcaaataaaatcaattgcaaaaacaacagccctttctttgaagcctgcattaaacacttatttcccatggcttgttgagtactcccgtactcacccttgctctatataaataatcccccccagttgctgaagaagatgaagcggatcccgctgacgaggagttcttccaggagcaagccggctacgatgagttttagggtttcggcctagtttccaagtcgcgcctgtgttgtttggtccaagtcttggcttccgcttcccttttgtaatgcagttgtgagctcgggatctgtccgcagcccgacttgattgtactcctactctataataaagagacctctgttgctgtgataatctgtcttcctgtgataccagcactgttttctgggactggtatcgattaataggttaatttggagcgtcacgggctagttccggtcgggactagtttggggcgtgacatggggaccggtgtggagaggagggttttattttttttatttgatctaatggttggtaatattagacccactaatttaaaggaaaatcaatggttagattttagactgccacttggcaacttagaaacgtttgtagaaggatacgtgatggctaaggagcgtttgtaggaagtttcatggatttttaatatataatatattagttaggttgggaatttgccatttatttgagtatgttttagggactcaagtgtgtacatgtgagattagggatttgggaaggacaggggcgaaggcaggaagttatcaagggtaaggttcaaccatatagttctgtttattgtttattatgttcaaattttctatgatgtttagtgttttttcattcatttttttaagtcccatgtggggcttaagcccaagctgcctcatatgtggcatatgttgtaggggggacgattgtgggtgtctctagggtacatgtgtgtataatgccataggtgtgtcatgctcaaagagctaacctcactaaactctgttaaaaaagcatccgtgtgtaccatgtacatattattcatggtcattagagttttgagtcgtagttcatatttctttttatttatttattttgaattttttattctaaattcagttaacgaagaaatttaccatcctttttttctactttaattacgtgaaatacctgaattgttccaaattcccccaatttgctaaaccatacatacacgacttcaccatcacaacacgaacgcttctcttgctcgaacccactttggctgcaaataatctgcaatattgcacaccgtcatcgctaactagggttttcttaacacgtcaacccaatcgaccgtaattgcagttaaggaagtatgggagcaccgaagttaaggatacaccggatatttgtataggtttctgtttagcttatgaaactttagctagacatcacatttatgcccttttaatggttgttttagttgttaccgagcttagatactactaaaatggtcctgatcaaagcctacatacagaagctaagtgccaagtaaactccctttcctgatgcacgtagaattgtactacttgtgtcgcggttgtctcactaggccgggcatttgggtaattcattttattattgtctataggaagttttactataattagtgcttaggggtatcagaaaacagagtaatcaccagtgaaatatgcggtatttcctccgtcacataataagttaatttagtacgagatgcgataatatgtgataatattagtaactgctctctgtgtgattactgattgtctggttagataacttgttaattaatcacctcgttcgatcggatcaggcagttgagtagtactactacgtacggcaacgacgtacctactgctagtctactgctactccatacctaagagcacctacaatggtaaagtaaggtgctatctataaaacatgtacatctcagcaatagactagattaatagtaaatcaccttaacagtatgtctacatagttatctatagctctctcatgcattgcctcgtttttctctatagactatctctatgttagtagatagctttgctctctctcttcatttaatatcttccaagtaggaaaatatactgacatggatctcttatagagagcttatagataaccattgtgggtgccctaagagaagctccgtggtcaatgtaggagagcgacgtgactcgccttttatttgagcttaaatgcttaatgacagggggtactgtatatattaccgtacccgtgtagtcgtatgttttgacgtagatctacgtacagagactagttatggcaataacttactgctacatctctcataataactatttttttcactctttctgtttatctcaaaataaatttattttttaatgatcactgcattggagtttatctaagtagaagataaatatattaagagcggataaagtaaaaataattataaagatcaccaccaccattagatctatgcgggaatgacgtttggctagatcggagctcctaaaacatataagcgagacaaacgcactactaaaaaccattttcacagacaccatatttatttctgcaggcaggctaaaacgttcccaattatgatcgttcgtacaaatatataaagttgtacctgatcaaaacctgcctgcgaaaattgatttccgtataaagtagttttatactggttacctggaaaaataaaaacatttttgcaagcgaacctcttaaaaggactgtctacaacaattgaaatttttgcagacggcatattaggagcaccgctaccaaagataaaaaaatcagccaactatattctttttcccaaaattatcctctcactctcgtaccactcctttcttatcctctcctctctctccctcttcatcttccacacttatcctctcctctccctctccttctccggttctccctctcctatctctctctcaccggtcggcatggagcagcggtaactccacgaaaaggcccggcggcggtgactgcaaagcgagcatggctcgcggcaactcaacaaagcggcccaccagcgacggctgcaaagcgggaaggaggggcgtagcggcggctcagtgaaggggtttggcgcatctcctcctctgctcccgcccgcctctaccaactaagcccatagtcgacgagcctcgagaggccgcatcagaagccaacagccttgggtggtgacgacgacctcgatgatgtgacgatttctaggaacaagctcgggggaggtggatccatcgccggtgagcttgggggaggccgacgatccgttgccaacaagctcaggggaggtggatcatcgtctgcgggctcaggggaggccgattattcatcagcttgtttgtaacctattgtttgttctagtggatctaattatagctgtgttcgatgttgttcttgtttatacttgtcttttcttgtttgtctatggatctgattctaatttgaatatgatgcttgcatgcaatgaaaattgaacatttccccctttttttttttgccccaaaataccttttacacgcggggtgatattagagcgccacctgtgaaaagtggattttcccaggtggggctcttaggatgcctatttgagaaaatcgatttttgtaattggttggaggctccgcctgcaaaaatcaatgattttagcaagccttagcatacaggcggagcgttagccgcctacgaaaacttgttttagtcacatgtaaatggttttctagtactgacgtagaactaagttcagggcaaggcaagattgccccgcctctaatgctgctttcatcttcgctccacgtcttgctcgtgtctattttttttatcacttagtgtttgattcaactctaccttctctagacaacgatttgagatttagagccctgtcaaacaatataaataaaatgaaaaagaagagtgcatatataacacaaaataaagtcaaatagaagtacaattttgaatatgtaaattcatataaaactgtaaaagccaatgctaaaaataaacattaataaaaagcataaaattcaattttaaaatgtgttttaaaaatcaaaatttagtagtggcttgtaagctataggacaaaagatgaaagccatattttatttgcagaggaagctcctctaacatgagtcactactatgagctatgagacccacatgtcagcaacttgtcaaatgatagtgagggcctatttgagagagcttaagattctgataagcagctgattggtaggcagcttctaagaatctggtttctagttcattttctggattctataactatagcttctcagaatctgaaccaaaagttgtactgtttggggagcttttgattttaggagaacctgcaacagttaaaagctcctctaaacaaggcctaagagcatcaccaatagtttccctttttcattccctatcctaaattttgaggatttttggtcaaaaattgaatccaaccgattccctatcactgctcccaaaagatctcgttcccttctccggatatatcgatcccaacttccaaggagcaatatttcgttcccaatcgcgtggtttttctctctcgcgcgcgctggagaaaatgttcccgcgctccttctcgcgacctcgttcctccatggcggcggcggtggcctcttcctcggcagcggcagccacttcatcggcagcggcggccacttcctcagcagcggcggcggcggcggtagctacggcggcctcttcctctgcagcaatggattggtaccttgatgcggtgcgtggtgtggcgacgacagaaaaggcattgggcttcttcaaggaaaaggcatcaatcatgcacgcaaagtcattttggttgtacaagcatattccccttgtatatcatactatattcacaatgattttactcccaactcggagaatcaaagggatggaacgtgcacgtgcatacgtgtacatgcggtattcagctgctagtgtcaaatactccctctgtttcataacgtaagtcattttagcattgtatatatagattcattaacatccaatataaatgtgagaaatgctaaaatgatttatattatgaaacagagaaagtacgattttgtccttcgctgactagcaatactgtagtaggaggatacaatacacacgatgtactcatgtacatcccacgatcgtgcagtcaagtcgtcgttcgctgcacggacgccgtggcgcgctggcctggggtaaaagtgcagcggtacgagtacgaccgaacggttgatgaacctgacgtgagcatgctcgatcggctgcccgtccggatccttcggaagatcggcgaatcaggctagagcacgcatccgccggccgccgctgtacggcgcgcgtatacagcgtatgtagttacccttccgtctaaaaagaatccaattctatcaataaatctaaacatatacgtatccagaattataactaagatttatttttttttgggacggaggaataggtagtagtactactcctacggtacaagcaaggagatgacggcgcaaccgacggcgaacgcgcggcctcgtgctgtgtggatcgatcggatcgggccggacgacagcatcacgtggccagtggttactgcggcgggagaggaccggccggcggctggttgctcgatcggccaatggcaagcggaagagggtagtagtaggctagtagctgcctgctaggctgctactgcctgcctgcctgccggtttcagcggccgtcggccggcgaccttgctcggttcgtaagcgcgccggcgcggttagcgcgcggcactcgcatcggatacttctcccgtttctccgagcgacaaatcacggctcggacaaatcggggcgggtgatttgctgccgctttgccggcatctcctcgtattaatggcaccgccagggtgcagcggatgcggtcagtcagtcggtaagtcagtgtagtaccttgcagtgttttgttcctttgcttcatcgtttacgggaggactattatggtcaaaggaggccacgggtctggagtctggacctgggttatgcgtgaaggtagtacgatctaccgtgcacggtgcacggacagagagggtcagggcgttagggtgaaatgctacgtacgtgctcctaactaacgacgtaccgcctgcctctctacgagtctgctgagtccggacatggagccatgtatgcatgagtcagagtttgcccgtggcgtggagtcgaaaattgatcgaggaaaggagctcaggaaataccggaataaattgtggagtaatatatgcgagttgtacatttctctcatttatatgcaaaaagaaagatatatatcttttcattcttcaaatagtaccacaggatccgtggcgcaatggtagcgcgtctgactccagatcagaaggttgcgtgttcgattcacgtcgggttcaataataccccgaaccatttcggattccttttttttatttctttaatgaacgtgaactgttctctttttgtttaggctgccttttctttagacaggccgcatagggcttctcactcaattaatgggcctggcgtttgcaaggccgagatgccgcatatggcaacaggcttatcttcactctttagatgggcctcaacaacggttcatcagtacatcaaagccccaaagacctgccgacctgattaacaggtatacatgctggctttttgcttgttaagccttttgtttggcctcaaacacccgccgtttgtgtcagcctcgcggcgtggcatatgccatacaatcccattgcgaccgcgcggtcgcacgccgtacgcgtgccgggcgaccgacgcgaatgctccgcgcgcatgcagaggggcggaaagcgacgcgtcgatcggtacacattctgtccctcgcgcagtcgcgcctcctcctatacgtgcgtacaaactatccgccacatgccaacaatggactctagcttagctagctttgcatggaggcgcgcgtgttccctctcccccgcttcccccacacccatggggatcgttgtccgtcgcgccccgtgaacgacacatctcggcttgcctccctgcacgcgcgccaccggatggatcggcgcgcgacaaacgaccagagcgtaagtacatacatgcccttctctagcgctgacgccatgcacagcgcgcaacaagctagatcgcgttgcatgcggctgcagctgctgctagctgtagattcgtatacataggcagtcgccaataaggtactaggtcggtaagtcggttaataataataatctagtaatctactactagtagttatattagtttgtgctacttggcgcaagggaacaagctgggggagtgggggttactggtgagcagcagaagcctacaaggcgctgatctgatgagggggtttggaatattttctcgtgggagagattgatggcatggcttgacagttccaacgacacatcagagctggaatatatatctagctatcgccaagttgtggcttgttcttttcatagaccgataggcggagagccaagagttagccggtttgcagcccctctcgacccctttctttttctcggtggggttccgtgatgacacagcaggggttgggcatgggcataataaacatatatatagcggtcgattttataagtgaagatcgagttgctatatatatgaacacttgtataaggttatgatagaggataattaatatagttttggtgtcaatttcattcgtttatcaaactgctaatagttttgcccacagaatccaacctagtatatttctgaaactctaaactaaccatctgcctttcctttcttgagttcacatgaaattctccacttgttatatcctaaactgaccgggttggaatcaactaattaaaggtgcatcttgcataaacatcaaaggtactgtataaaatagcaacctaaaaagtgaggggaaaagtcaggttaattacccacctacacccttctctttacatctaccgcaaataacatacttaacttaattacttgttttacaaaccaaagcattcacttggagaagcaccatgtattaggatgatggtggaattgtgatgtatgactttaaccatcggaattcaaatccttatgtctagaaatatagttgtgtgcatttcttagttggggtatagggcggaagttgtactaccattgtttgaaagaaaaccattcacctcacaaggcactataagagagaatcaagagaatctcttgttggatcgtctctacctaggtatgtttctattttcagaagtattctctgtctcgtgcgcaaagacggagagatggttccattgcgtccaaagcatcattttacatttgacttaaatcaaagtttttaaaagttaccaacgaaggctggttatatctaatatgttaattgagtcaacagtttatgtcccacttactaaaaactaattaattttattatagtattttagggatatcatcattatctccttatatctacttcctccgtttcataatgtaagactttctagcattgcctacattcatataaatattatgtctagatttattaacatccatatggatatggacaatacaaagaaagtcttacattatgaaacggagggagtattagttattagctataaaatcaaaatgtttgttttgagcatgtagtgatatcaaatggtacactgaatttgcacgatagctaagaatgacaagtggcaccaccatgggaatccatgttcattttttgccaggctggtgaaatatcgacgaagaatgaagttgtcagaaaagcattacaaatactcaacaaccatgggtcattgagaaaaaggcttacgagagctcacaccacacttacaacaaatttaacacactaaacaaacattaattggttaaattaacaaatattcttattcattgcgaagaaacctacattttattatgtgtttgtcattcctctagtataacggacaagcactcagtaacatatgtatttacagagtgttccgttcgaacaatccgcaacttacaaagtgctacatgaataaaacctgtaacactttgatgccccttgatacaatcccatccttgtagtaactccactaaatctaaaaattacctaaagtagatggagagagagggagagaaaggaccaacgttgcgcgctccaagccctaaactaattacttggagtatacatataatgtacatgaggtgtccacaagactccattttccattgcataatgggcaagtagcttcatggggctatcctcgatgctggagaggttaggttattgacaataaggttcatctatccacttatgcttgacttgtcactttgacatagctcacagtactaattaatacccctctctcacgagtcccataatagacgttgtgcacaacttgaatatatccatgattttagtactgaaaatctagcatcgtcgttacttattattatccatcatctactaggctactcgtttggataataggaaatgaaagtaatttcctacacatcatggggttacttttacacactagctatctatttttttcccacctcatttcgtcctaattcttcgctcatttcgatctctatcccacccaccagccctcatatctcattattccaaggcaaaatagcccctagctagtgctggcattgtgactgagctacacttcaggggtcccaaaccctaatgctgatccccaaactacattttttcagctactcgctccctcattgacattgacggtctccattcacaatgagagatatgctgctttagggggctcgcttttgcaggatgttatcttgattgtgaatgaaggactagcttgctctattaaaaagcttgaatgcacactattttgttcgttatgtttttttttgaaaatatctttgtagttttcgagatcggaattcgtgcgaaaggtagttttgtgaattgaaatctgaacatttccatgttgaaagttttacaaattaatctagctaattacaagtatttaacaatgacaaattaaagaatggcacataattaatcatcattgtttaaatgcacctgatccccgaatcccctgcaatatttcataatcgactgtatatatcgatataactactacatgaatattctatttgatttgttgatgttgttagagatttttgcataatattaattaataacttttctagtttcacatataattaagttgtttttatattttactttctttgttcgtttagtttttttcctcttcgtctttgttgggccggggtaggaaagtacaagcacaattgagattttttttttaaaaaaaatagcttatttgtttgtgtgttgcaacagaatcaaaggacaaattgggaattgggaatcaggagcatttgaattagggggcacaaaaattccacaaatattctcacacaagtgataggggtggcggtggcccactatcaacattaaagtaatataaaaaaataaaagctgtacttttatctgagaataatggaaaggagactaataaaccacaaacagttgtatatatcttggagtaatatctctagtacactccattaaaatgtccaataaactaagcggatgcaacaatccattgtacgagtacaatagacatatgcacactgatttaatttgatcgagcacaatggatattgcgttggaagtacaaagctttatcaaatggacagttgtctttgctgacatctttaattggcaggatggaatagaattcccgagggagatgatgtccaaagatacgagacacactaaacaaaaggagatcgtactcatataaaatctatgcgagctgccctacatggtttttttttttgggttacagcagaagagttttttttctctataattcaggactagtaggcataagagatctactagaagcagcacagttgtccttgcagcatttgctagctcatggcagggaggcaaaatgcaggagctttgattagttgacctaactggcccctgttagctgccacatataattatatttaatttctcaggattttgattgaaaacaacatatgggctagctctatggagaagccaccatcaatcagggtgggtcccacacattcatatgacaagtgcttgctcatatcattaggggccccatgcctgcgtagagacaaggcatgggaaccaaattggtgacatgtagggcgttgtgtgttcttgtgtgtgccaacctaagctaagctgcatagatagctagccgggggccactgttgtgtcatgtgcactgtgtaagggttgcgatgtgatgtgatcgcccaaggacaatggagctactagctgatcactaattggggattagagctttgtgtacgatggttgagatgtgctagtcatggaccaaaccgaatcatgctttaaatgctagattagctatagctgatggtaccagctactatatcacacagcaggtcaaacttttaggttcaggatgagatcacagttagctattagtctctgctagctttttagaaagagctaaattaagcaactctaactaattaactggcaactgaggagtggccaattgcttaactaaccctccaaacaatactgcatcgatcattctgatacgaattacaaacaaacaatgctaattacatctcccaaatcaccaaataatctacacctataggtacaagcaaattaagcgaaccttggtagatgcctcgatcgcgatctcatggttttatttacagtaatcgctacttcgctaatcgcccgcgattaacgtacacggcgctgatcatatcaaaccttagtagccccatagcgcggcctcgtggtcgaatttttggccggaggatgacgagatctccgggttcacgtcggaggtgaggccggtgtcctgcgacgcgctaagcctctcccgctcgccgccgcacgccgccggctgcagctggctgccggacgctgccatgtcgacgaggccgccgtagccgttgcagctctccaggagttgcaccaggctcacgccgtggtgcagctgcccgtactgcgtgaagctcgccatgaacggcgaggagtcgccgccgccgtgcccgtgtactgccgtcgggttaaagaactggccctccagcgcgttggagaagcaggtcacgtgcgccgtcgtcgccgggtcgacggcgccggcgccggctccggacatgtccatcagcggagggaggacgacggacgacatggcgatctcgtccgccacggacgacgacgtcgaccctcccctcgccatctccatcgtcaccacggccgccttcttccctcccgccgcgcccacctccacgaggctcttcttgaacaccctgcacaacacccactcgttctacgcaccaacaagaaaaacccacggcgtgtcagtccggcctgctcaatcgatcgatcgatcgatcgatcaaactggtcacaaccaaacacacgcacgcggcgtacgtgcgttcgtgtaccttggacgacgcgggcttgccgtggaggaagccgagggcggcggcgtggagcttgccgtggaggcggtactcgtgcatgacccagccagacttctcccccttgggagcgcgccccgtgtagaaaacgagcgtcttcttcatgccgacgagggccttccgtctgaagatgtccttgtccttccccgtggccttccagtacccggactccgtcgccctgttcgtcctcagccccgtcgggtacttcctgtccttgaggcagaagaagtaccactccttctcccccatcttcgccagagctgccaataattccatcgcagcatcaacagatgttagctagctagccaatccaatgatccatgtatatatcaatcatcagttcatcactgcatgcagattgcagaggtaattaagtagaggagaggttgcttacatggcaggtcccagggctcgcacttgttgaggtcggcctcggcgacggcgagggcggcgaagcgggcgtcggcgaccttcttggcgaggtagtgcgtgatcagctcctcgtcggtcgggtggaagcggaagccagggggcaagtccatgcctgcctggccctgatgctgctccattgctgcctaagctagctagctagagctttacctggctaactgctccttgcttattgctgctatatatgtaagatttgttagctgttatgccaactcctgtcctgaaacatttgtacatatgcacacagatatgcataaactaggaccggagatgattcacacacttttaaaggtagagcaaaccaaatcaaattaaagctggtatgtatccatgacacctctttgctagctagctagctaagctagaacaaaaacaaaccacacggatgcttaaaaaatcgaatcgaaccaaacggacatggtatgcaagcacatagaacacacaaaaagaatcagcacatgagatgtttatgcacagaaaagtttaaaaagtacatctaagaaagtagaagaacacacttgagggatgaggtgataaatagttaggatatgctaattaccttttgcagcagaagtagattcagggtgacaagaggaaatcgttgtatagaggaaataaagtgggaggggtggtggtgccccttaaatactagaggcgagctacatgatggtctttttagtagaaagagacgtgggtgatgaaggaaactcatcacaggttactactccctccatttcaaaatgtttgacaccgttgactttttagtacgtgtttaaccattcgtcttattcaaaaaatttaagtagttatttattcttttcatatcattcgatttattgttaaatatactttcatgtacacatatagttttacatatttcacaaaaatttttgaataagacgaacggtcaaacatgtgctaaaaagtcaacggtgtcaaacattttaaaacggatggagtactagctagtaggtgaaaaatgcatgggaagagatagatgagatagctatacaggacagcgtagtgttatgtaatagtaccttgtaacgagccaaaacttgcttccacacatgatcaatcaccggattaatttagtggctagtgatccatcagatcagagtgttttaccctaggatgactttgatctgatctggctggatttaaggatttggtgcattactaattaaatgagtcttaattaatggaaattatgagtactactagcagcattaagtaaagcgtcatatgcgacacgcgagccgagcagcaaccgagaaagcgaccaaaccaatccttcgtctccagaagcttttgagaacgaattagagcagactccatggcgagtagtacacctactatttgtattcgagtactgcaataaacgggagaatttattagcttcatgctaagcatgagctggttcgatcatttggtacaaaatcactaattcaaataattaattaatatctggggtagctaccgacgtccaggcgcaaacaaaagatatattcagtccatagcaaaccttgatatttggtctttgtgcgtaattttctgcagggattgtacagtagtacgtataatcatttgccctgaacctgattagaatcaggggtacttaaacccttaaaaggagaatctcccaggagataagccaatcaaatcggtgacaaactggcagtggcacgatgatcctgtagcccagtgacagcacattggtcacaggctgatactattgtgtaatagcagtggatgtgcacaacattctgctgcttgtatacatgcaatccaatgggggagaattattctctccgtttctgcaaaggccgtaagataatatgcagatctgcagagccaatgtacctgtgttctctttgcagccctgcaggtacatgcaatgcacagcacagcacagaggatccacttggttttgtggggcttagaacggatatgtgtgacaaacgccatgctactgtgcattattctccgcggctgtcagaaatggggcaaacgtctgaaatgtccccggcccccatatgttcaggccgcagagaatactgctgatggggaattcaaatgtctggttaaagaattcatatgtctaatttacactactacatattacttcatccactgtatcaaccaaaaatgtgcgtaggtccatgcatgatgattatgagtgtgattttggttaacaagccagaacaaacaatgagatatttgacatcattttcgtgcgaaatatctgctacagtggtgcttctgctcgcgcaataaattcaccaagaagctcttatcagtttgccgatgcatcctgaatcctcggttagtgctgtgttgctgtcaacaaacttaaggaagagacaaactgaacacaacggaaaagaaaaacgccatctccaagacgagttcggagttccgtccagcatttaacgctttgcggaaaacgcagaaaaagatcgaatattaccacacaagggacttgaaaaagctagagccgcatctatctacaaatgggaggagcctgcagccagttgcaaaacaccatcatcagttagtcatctgctacgacactccgttgcaaaggaagaactctctgtgatctctccaacgcaacgcgtgcatcagctgatgctttaagatgtgtggcatgatgatatgtactctgtgtgtgtgtgcgcgtgcgcgcaccaaatggatcctacacgggatgattggtgtcatgtcgatgtgccatcgaggcaatcctcgtctctgaatttctgaaaatctctggagcctgcccccttccatgctgtcatgcatggcgatcatgggttctgctcatcggcagccgacaaaacggcttctttcaaagtacacgtccagcacaacgcgctgctggatcaataatcgatagtgctgctacccccctctatcatgagctacggttttcgggatcaaatcattgcgtggtctcggtctccggatgtgaacttgacctgtgagaatttgggacacttaaccgggtatgaacccgagctgtgattttctgggatagacagagaaagctatgtccgatcctcactcacattgcaacgtatattcccgtacgttcagggccaggccagcctaatggtgttttgtcaccaccgtacgttggaaacttttacgcgtcttcgctaatttattttgtacctacgtgacaagtgtttatcgtactaacacagtcgcgtgatcgcgtccgtcgaccaaacaacgtaaccctcctgcaagcaaacaaagcccgacacggacgtacgcgtcacggtcgatcgattcctccgcgcagccgcgcgcgcgcgccgatacgccgatcgacttccgccgagaaaacgctagcacacgcaccacggccgccgatcacccggtgttgctcacgcgcggccgcgcgcgcgcgcccctttcgcgcggcaaggagccgggcacgccgaaacgggcaggtcacagcgggaggcgtgtagtaggcgatcgatcacgcgagcgccacgggtttcctttctcggtgtgggcgaccaccgcgacgcgtgtcgtggcagccgcgcgcgcgcgcgcggagagagaggagtcccgcccgtgcgggggatctcacggtcgtctctcttaccggtcgatgtccacatccaccgggaaaaaatgaaagaaaaaataatccccgcttctcacgcgcgcacgcacggcactcgcatcgccaatcaccatgggtgccacccggctacgtagcggggcgcggggccgattcttctctcttttttccccctctcccgccggttgaacggctcagactgccagatcggcttggtgtcacgatagtgcatggcgaatcaaaaaataaccccgggggggggggggggggggatatggcatcacgcgtacttacgacttttggcatgttgaggtggccgggtacgtaggcttgccccgttccgtttcgacggggacgttttcgttatagaatgatatctgctgctttgtcgtggttgcattgcttctcgttcgcttgctgatttcttttccgtcgtgctgattggtttgggcaaatgcttcgttgccatgtgtgcgcacgtacgttttcttgtgggtatatgatattgcacgtacgtagaaaaatgccccataggtgattgtactcgtgactcttagggaattgtagacttccacgcgtccttcagaaaaaatgtagtatactatagctctgagttgttaatccataaaactactgattatcacctcatgccacggatcggattaggcgttgaaaaattgtggacatattttaggctgtcaaataacatgtaggaatacctgatatatgggcaggctgatgcactgtcagattttccggctttctgaaaagaacaagagtagaattgtttaggtggctgctttggtaccactgaacacagacattttttttatatttggcgtccaattcggtcgcgtcaagttagccagattctggcagagcaaagtttctacaagtatgctagcatgacaacaaattgtggatcaaaccatgcaaatcccaataccaaactcaagtgttgcaaaaatgtggctacaaaacaatatggctgagatgtgaatacggttgctgctaatgccatcataatgcaactgtcaatatgttgtcattcacatgccgatcagaaaggacacgagtgctttcagtgagaactttgtttctttaacgatataggtgttcatagcatgcatttttgactcgattcctttttcgaatcatcacgtctctcgtcttgtagcacgcacagatatgtatttcattagtttcgccaaaccccccggtgcaacattctgataagtttggcccctttataatcatatcctatttgacgtggcagcactttctcatcacatctgtcaacttttccataagggcttttatacttaactctcttaattgagattcagatagaccatatgtccatatcaagccagtagcacctgataattctgggtgaaggaaccagggaatcactcgactgacatgacaagatgctaatgttaggttgtcaacaaccaatagcagaaaaggaaagaaggccaagtgcttggatctctctctctctatgctttaggcaaagacatctttctagatcaattatgtgctgtttgctcggtttaaaataaaaggagcactagttagtattgttgtaccaacaaggtctattcaattctttgcagacagacagcataatgttcatgcataagaagtcagaaatatatgttgttcatatatgactcataatgctgaaatattaataaatacgagagaaaattgtactcactatcctgaaatgctggtcaaatcaagatccacaagatctgttagggaagcagacaccaggtgaccagggatcattgaccaaaaatgtgcttgttgcatatctcatatgcttatagctgcttactctcgctggccaaaagaactatttctgagtggttggaacgacgccgcgcagaaattgacctcttctgatgccatcatcagagaaaaaggatacattttcaatagccgatctgttgggaagataataaagaattggaatgtcagatgttctatatattgtcggctccaaatcgagtcaatggctacggtggccagattacaggagatgagcagccaactagtgcaaaacctgcatgccatacaatatgcctagctcattatatattactcaaaccttccatccaggtgttcatttgtcaaaatttagaagagaaaagaacaaaaaaaaaaccaagtcccaactactccagggtgatgtcaatatgtcacggtccgtttagatctgttctgtataaactaaaagttccataccattcacaagtgttatgtacattgtgtaactagagaagaaaatggtcagctaaacatcacgtagaaatgattttgatgtgctatgtcagttctgtcgtcccttccctgagtcattgtctcacctctagcatgtccggccaataggtttaaaaatcgtcatgtttaagcacatcaagataaaaatgttttccctgcatcatcagaaagtgataagattatcaaaataaccaaatgcaaatacgataccacttaaagaattaggcacggtcaggacaacaattttgtcactgcctgcaaataagcaataacatcatcatattgataggaactaggccgagaagtttggatgtttgaaaccttgcatgcgtcattcaatgaaagcaaattattaccttctgttgttcattattaggatttccagctcctgagtttttgggcgaagggttcaatacaaaaagagtccatacaagatgtatgtccaagtataataaggttgtcaagatgaagattaagattaagatgtcacgatttatcagctagttggctatactgattgaagactttaactaatgcatttttttatcatctgacatggcatataaacatgtcatgttcaaaagcaatgccatctaaagtattatgcaacagattaagttgactgaagtgcagacaaagaaaactgtaggagaccgatcattcttgatttcctgtgtttcactttattgcccatgtgtttatggaagaaatacattctaccacattgtaacgaaacattaaaaaaaaagtaccctcagatcgatactactatcaacattataattctgcgaactatatctaatgtacaactaaaacctatatgtttctgcacctaaaactcttccaacacagtaccataaatatctcactatagttaccttgattgctatctaccttatgttgataagtcatgtgcatagcacttcataacgttatataatatgcagtaataagtgatgaagaactgatactacatcagggaaaagatgcatttcacatcaggtaatatatatccagtcatcctaaaataattgaacagtgcattgtgcgatattagagagtaaaattaatccgattactagaagtaaaaatattccaacaaacatttattgaagcctcagaacctattggtatggtggttatgaaatttggtacccaattcattcttgtgattcacataaatgtctaacttctggaccagcttccactctttccaccagatttgtgctggagacagatatctgttatgcatatgttctttgaagcagctttgcacatgtcatagactgtgagaccagcaatggcaactgctgtcattgcttccatctcaacccctgtcttgccactggttgaagcttctccttctatcataacactagaatcttcttcgttaagagtaagatcaacacgaacatgggatagattaaggttgtggcacagcggtatgaggttgctggtttgctttgcaccagttattccagcaatctttgcaacagttagaacatctcctttggcaatcttgtttgatgctaccaaatcaaatgcctcctggcctagcaagaccctgcatgtggctatagcaactcttgtgctgtcatgcttggatgagacatcaaccatctttgcctggccactgctatcagtatgggtaagcattggttgtccatcccctgatccattagtgggccttgctggttgctgaggagttgaacctaaaggactgggtgaaggagattcaccaaacacagattccatttcctggtattgcaaatgtcaagataattaataatttattttaatgaaaaatgataaataaactagatggagatgttttatgacgatgctgcacaacaccaagttacatatctgcatttagattttacttttgctttctaaattatatcaattaattgagacggtaagttctaaatcatgcacaaaattgtaaagtaaaaaaaagctatattgtgcatcattgtagtatggataaaaattggcaagaactcaaaagtgcatcaggacatgttaagatccgactattttgttcctgctgtagtggagtttacttgtaaaaatcatatagtttacattactagttcaattaagtggtcgaatacataagcaccagcttacagctctggcatatattagaaactatctgatcaggtaacagttcaggtatataggagtatgagcaatagacagtttagtttcagttaaaaactctatttccactctcaacaaacaataatcaatgtgatctgtattcaaaatcatgtggttgcgtttgttcaaaataaaaaatgaacattagattaacccaacacaatgatattgaaatcccaattagatatcgatgaggtcatatacatcatactcagtttcagtgagcttcatgtcagtaacaccaaatgagaaaaaaaagggttttatagcagccattaaacaaatcaccaagccacaaacatacatgttcatgtcagtaacaccaaaaccatagctgcaaaaggaaatattcagggcagagatagagatcaaatccctcaccttattgagctctgctatagtatcggaaggaaacccagtagcaaagcatctccaaccattgtttcttgctactgtcgggagaatggagcgaaggactgacattgttgtcaagctagactgctgttatgcttctgcaaacaaggaattgctaaacgtgtgaacagacaacacaaataaattttagcacacggcactcgatgcataaacaatgtgagaaaatcccttatatacccctgaaatttttcctaatcccttctatacccctgaattttgcttacttccttatatacccccaaaatttgattttgatcccttgcatacccctcccgtcagttgaccgttagttgaccgtgtattttctataaaaatgaccattttacccttggatgaacaaagaaattcatgaattacattattaaaaatataaaagcttctcgcatgagactattatagttatgagtttgttgtgcgatgcattatttatcccaaaaaaatatttttagataatgaaataaaaaatacgtatttattttttaaaaaaaaggtcataaaaatgaggagcattcatataaagataggtataccaatgttcacaacattttttttatgaatgctcctgataaaaaaatccattgtcctattaaaatttcaaataaaaattttaattttttacatttattttattttcaaaatttatgtcaaaattttctgcactaattatttagtctcattagttttataaaatgcacacgatgtgcactcaaacaaaattttcaattatttttgaagcttatatttaaacctaaagcatcaagggcaaaaaagacatatgcaaccaaacgtaacagtaaaatgatggaaaatgtaacggtaggggcatggaagggatcaaattgaaatttcaagggtatagaaggggtcgggtaaattttaggggtatgaaagggattgagtgagttttcaggggtacacagggaatttactcaaacaatgttgagaccattgctgcatgataagagctgcaggttgcagagagagaattcttgagaacaatgaaatagcttggtgattttactcaacaagccagttgctttacaacttagatctcataagtgccccttgtggccagtggcggacccaggatttcgccaagccccgagccaagcctagttgttatcacaaatcataaatatactacccgtaaagtatgatggaaagaatgcgaacttaaccatgctgagatattgaagtacaaattatttctcagacctataatatgctctagttcagcacttatcatatcctaaaatgacaaaagaatcctaaaatcaaatcctctatatcatgatcttacaaagaaattttttttaccaaaatcccgcatattgaagatgtgggtagaaaaaccaagttaatgccagcaggtttcattaagaaaaaaatacagtactagcaagtggtttcttagtaaccttggttctcatatttctcactctgaatcattttcacacttccacagcacagcaagattactaagatcattacaatgtaggaaatgtggatcccctctcacatcggtagtctcaagttagccttaaggactataaaatcacatcattatctcaagttggtcatctacaaattctctctacagtttttttttaaaaaaaaatcgaatcgatctgtacttgtcttgatctaggcatttgaaaattgaaagtgaacaaactaaagaatgaaaataactaaaatcactaaatgagaggtttgagacctagaggcagggcaagaggcaagagagatcggcttgttgcaacacctagttggggtcctcgtcggctagcaggcgccacatgctcggagagacggggagcacagactcgacggcacccagagaccggagtgggacacagtggcggacccagctttttgaacttgtgtattcgaaatgacaaggggtaaaaaaaaattgttcatacacctaatagcctaaaaattagcttgtatagtataacacactaataattcccttgtctgcccacgactcatttggctggcacgtggttctttgtacatatgaagacattacaaaactggttccccaatcgaaatataagctgcaaactgcagcaatttgctacttgacatgaaggtagaagataaagatcctctagtttctgttcatatggatactgaaactattgcaattgaccaatagaatccatatattttcgttaatcaacgagaggactacgttgaagcagagtattcttactagtcgcagaaatccttcccactagatacaaacttgctaattgttaattgtatgtgtgcaataaacaaaagggactaaaaacaggaagatgtttacctgcaaaccgcttcacctcgggcacgcctcctttcttcctccagtcgttgaagtccagcagtgggtccttgtgggcggcctggtatctggcgctcagcttcttcctcttcctttactaaccccggccacccggccgccaacgccaagccgcgcccgccgccgcgccgcagacccgcagtcgccgccgcacacgccggccgtcgcgcgaatcgcccgccctccgccagtccggtccgccgcggcgggcgccgctccaacccctcactgtctagggtttaggatttgccggctgttcgccggagctcggagtggagcggtgctgcggcggcagagatctggacggccggatttcaggagaagcaaggcggaggtggaggctggggatgggagcgacagagaaacgcaccgcccgtcgagcagagggcgaggagggaggaatccactcaatattctctgtgctcgagtggttgcatcaccttctagtcagcagctagcttagctccgtcctcacgcaccctgctcgctacgcacgcgccgtccaccgtccgccgccgccgctcgccgacggcgacgcctgcgtgcgtcgttctcttcgcgagaaaggggaggaggtgggtgggtttggggaatagagtggcaaatgtgaagtcaaccaaaacagcccatacaagcacaattacggtccaaaacttacgggccggttttctttctacggcccaaaaccgggtttccaggcaggccttacactttcacacaatttttccgttccacagtcacaatttggacagtttatgctaagagttccacatccaaactgtatcaaagatatcgaacgggcttgcttatacatttatgaaaggaaacacacacagagctaattaaattagggaagcaaaggaacaaaaaagacgtgcattaatattggtgcacgcacgatggatcgcgctggtcgatcggccgggctgctggctgcaggatggtggtcgtcgtatcgtacgtacgtacgtctatgatcagtggcgccttgcgagcgcgaacgcggagagggtgatgaggacgacgagcaggaccatggcggcgaaggagccgatgagcgagccggagatgcgctcgcagaaggagtcgaactgctggcagatggagaaccagtttgcccgcacgttgcccttgtgcgccaggtacacgatcgccgccgccgccgacgcgcccgccgtcagcagagccagcatcgcctgtgcatatatatatgcacatcacacatacgtatatccatcacgaacaagagcaatttctagcaacaaacatgtagtcagcgtcgatatatgtcgttatttcctcaccgtgtcgaagaagacgaggaacagccggctgtaccgcgccctgggcctgaggatgtgcacgatggacagcgggatggacagcaccaggtacgtgcacaccaccgcgttcgccgccacgaagaacctgtccgtccggccgtgcatgcaaaaaatcgaactagctgcatcaaacttcctgcgccttgcagcagaacacagatactattgaccctgagctgtgagtggcatcatgtgtatagcggatcgatggcttacgtgaaggacgggaggtcgctgtacttggcctcgaactggatgaactgcgtgaagaaggggagcgtctcgttggtggtgcccatggcgatggcgctgccgatcgtgccgatgatggcgatgaaccggaggaatgtgtccaccaccgcgacggcgcggttcacgccggccgccaccggcgccaccaggggcgccttcgagctgatctccccgtgctccatcactgatccgtccttcgtcatgacacgtacgcaccacgaacagcaagcagctgctagtacacctagctagcttgagtgtggcaacaacaattaactactgcaattttggttgctaaatctaagcgatcgttgcaactcagaggtgtgagaatgcctgattaattgcttattgcttgagagaacctgcatgtggcaagaccttcttatacttggcaaaagaagatttatttccggtaacaaaaccaacatggtctgtttggtcaatcatgcagcacggggcaagggtgttgatttaggtggctttgacaattcattgttgacaccaactaaagcacgccttgccattggttgactctgcacctgctcttacttgctcgagtgaggctatgggacgcaacgtaccaagtcgcaaatatttctgcttgaactaagccctctttagctccaaacccacagtgtaatgtcgatactcgatactcctagtcttttgtctacttttggcaccccctgaaaatctggacttggtaaggctcctggctctcccctgcacaatgatgcaaaattctttaatttcttcggtaatttaaggctgcgtagcgagttggtttcatgagaattattgttgaagcagttcaaagatcacaccgatgcgatgtgcatgtgctgtatttgatgaaggcatacagcagtttcctcaaatgcagggacatactttctggagtctggacagtgcttgccatctcatgttaacctacttgcttcgagtgcccgtctccacgatcgatttaaaacgctccagcccagctcatatggacctgaacatcatgggccacaaggaggcccggatcctgttcaggtccaagatgtatggggtcgcgcgtcggccggaatttcgtcacggcccatcttatatgggcccgcactcgagccgcaatcctgttctggcccaacgaaaaataaataaaattaggcgcattcattcttgaccttacgtaccgagatcaaacgaaatcatcacgtggttaaacaacgcacttttaagttcaaaaaaaaaaaacaacgcacttttcccgattaaaattccgctctgattcgcaaactataacaccaaacaaacgggcgttgagattgagaaactcgtgagctccatccgcaaccgcaaatgacgcttcccagccgcgaaaacgacatcggcgaccttccaaaccctccataagctttagcttccaattccatgccctctcatcgccaccaaagccgttgacctcgcagctttaatccccgcccccagcctctgtcccgtggactcgcagcagcacacggcatccgtagccgagggcggagcagggatcgacgagcggcgaggaggcgggcgagcggctggccggcatggaccggaatctgagcgggttcctgatcgggtgcgtcggcgccgccgtgacgctgctggcgtacgagcagacgctggtgtcgagcacgcagtgcatcgccgccggcttcgtcgtcctcctcttcgcgctcttcgtcaaggagggcttcatctcgctctgattttctgcgtgtcagcggcgacttggtttgggggttccccttctctgcagctcgtttccgattctttgcttccgtttttctgtacctcatgtcctgtagaagtgtagagtagccactagttggaaaaggaatagcttttgcaagcaaaaactaatcctttccgaactatgaatgccatcttggtgacttggtgatggttgggtcatgtaatcctgcaattgctgatgcttgttaccaatcaaattgtattagtagatgactacttgtatctctgtatgtacccttcttccttaacacgatgaactgcatagtccttgttgtagcttccacttatcatcctgatatctggtctgtgtgactgttactctttgctttgcttctgaatacatacagatatactttgtttcgttagctgaaacataagtcgatggttctctatgagttttatcttcggctgaacttttgaataaaaaaatcagtatcatgaaaacataaattgttggataaaatccacctaaattggtacttaatttactccgagtgttcttttttttttcccgaagagataatcttgatctgctagtgttcagcccaaaatatttaaaagcgatgcccggcaaaaaaaatattttaaagcaatgagcaacaaaattaacacagctgcaataaaatgcttcaatacattcaagttcttacaagatacaacagattcagatggagtgctgatatcctacaaatatcatttggcattttgactaactgtactatttctgacaacagagatacagatacaaggccaatagctcccatagctcaaacatacttacgatcccgaattaaagcactctaatcctcgttatctgtactaccttgcctccactacagaatctcaggatttaatcagattactctgctgactgctgacattgaggtacattacggaattgcgttgctacaaaaacgtacacaaattcggacatcggtgtttccatgcctaatgtgcatctcttgacttcaaaactcatagaaaatcttcttcagagaagagtacgtacccgtcgcggcaaccaacgaaccgagcacgatgatcgcggcgatcagcagggtctcgcccctgccgcatcgcgtcaggccgaagatcttgaggtagcagatgcaggggagcagcatggaggccatgacgctgagcagcgagccgacgagcgccatgaggtggccgaagaagggcaccgtgagggcgatcaccaccgtgctgacgacgatgagggtcctgatcagcacgttgacggacctcttgttgccggcgagcagcttctcctcgatcgccgtcgcgaccggggtcaccatcagggcgtacttggagaacgggttgatcagcgtcgtgtagatcgccagcttcgagctgatctttccctccgggaggttcagtgtcacctgagatttgacgtcgtcgccgtacatgaggtagccgagtatggccatggatccgtagttgacagtgcacgccacgaagcatatgaccagtacctatatgcaggtagaaccgtagaagacagacagttcagtcagtcaggggtagtaaaatgagctactgtaggagtactgtccaaagttaaaaaaaaaagaaaataaagagttaatttttactacctccacccaaaaatgtcgcaaactagtatgagatttgacccaacctagaacaaagaatttgaacaaaggttctatcagattcattatcctaggacggataggaagtagttgcgttggatattgtactactgttcagtcatcgtcagacattttcattttcagatagctatcaactatatagtgtcagattcattgcataattccacagttcatatgagaattaaagcatttctttttgtcaagcaataatatgtggcaacagacacttaacagctatttgatgcaacttggcattgttgagcttgacatgaattattcgatgctgcaatgtgcgtgactgttttactactcaatatattcaaggttacttcagagttcaatatcagataaataaagttaaatgaaataaaaagaacccaaattcaccagtcaagccttcagtagttcagtgacatcaaaagtgaaaacagtgggcagctcaccctggagaacttgtccttttcctgcatggagttgcagagcgtggggaatatggcatgaccgcagtagcagaaggtgtacaggccaagagcagtaggcaggccactgacattcagcatcctccccttcccgtggaacccgacgccgtcgaacaccgccgcccacagcacgcagaacaccacgacgacggacgcgagcacgccgctggccgacacgtaggcgagcacggcgaggctcctcagccacgtcgtcggcaggatgacgacggcgacgaccacgacgaacagctgcttcccggacaccacgagcccgccgacggcgaggctggtgcccgggaacagcttgtccaggttgtccccctccagtatcaggaacccgatggcgacgaggtagagctcggcgtagaggaacgccgacacggcgagccggcccttggccccgaacgccagcgcgccgatgtccgggtaaccccgaacggccggcgacgcggccatgcaccgccgcaggaggaggccggtgtagcagcagaccatggcgacggcgagcaggagcaccaggctcagccaccctccctccgacaaggcgtacggaatcgacagcagcccaacgcctgaaccccaagagatcaagattaatcgagttaaacagaccggacgaacagctcctacgaccaaatatcgagtgtttcttgtactcgcctgacagcgcgttgaggccattgaagcaggtgcgcacgaaggtggcgccgtcgccgtcggcctccggcgagcactgcgcctcgtggtcccgctccaccggctcctgcttcccgcgggccggcacggcggcgtgggcctggaggaggggctgctcgaagtccggccgccgcgcggtgctgctgtcctccggcgagccgccgccgccgccacggggcgggtgcggcggcgctgctccgccaatggccatcctcctgcacgcgacgcgacggaggggggagcagagaaccgtggagcgaacggaacagagaagcgagcagagcacgcgcgagtcgtgcagtttgctagtttttggcgtcgcgggcgaacccgcagctgtataaaagggcgagagaactgcgctgttgttttcgtgaaattcttgcgtgcggcgcggcgcacgcgaagttggagagcaacactgcatgcaacgcgatgcagtactgcagcgagggggatctgcacacgactgcagctaaaactggtggcatttagttcttccacgtgggttcaaacatcttttagaaagcattggggatagactccgtctctatttttatcaagattcgtagtattagaatatattatattcggttatttattttttatgaaatggagggagtatactgctaatgatttctcccgtttacttttcagttctttcatttcatggaatctccgaagtttgaaccttggagattaatgtgccaataatcagaaaatctggaagcaacaagctcacttcaatgcgtgcctggtatgctatcatcctaggagtggtgtgtccacaagagtatgacttatgaggatcagactgcacctagatggtgagacggaagcacgcatacagatatttccaagagagtattgttgattgaatggattgcattggatggatatggaccatatggttagctagctactggttgcaaagatttcattttgattcttggatttggctgcagcatgcagctttgctagctagaacgtgacaggccgctccatgttgataagaaatgttcttctacggtttatggagaaaccggtcggtacctactacgttggtactggtcattggtcaatctttttttcccttgggcgtacgtgtcgttctcgactaaattgaagctgaaagagagccagttgacattcctgcgtagctgaaactgaaagagcatttcaccaaactaccaagcagagcaaagctgtgcgcctgcggctgcgccctttcttttttttttcttgacatggggacatggattcttatcatcagcttagaaaattgtgactcaatttgtaactaactaagcaatttgcacctatttaacactttgtatatagtcgttgctttcatccggtaatcaagcatgattaaagcgtgaattaagtagctgtaaggaacatcgatatcatactactatagtattcacacactagctagctatagacggagagtcgtatatgatgctatacatgtggttcgattgagccgttgccaatttgtccttgccgttgagttctagccatgtgagctatgagcagtctcggcaggactccctgtccggcctgatccttttagctagatggatcgttgtgtatttcgtcgtgatcgccccacagagcttggaaaaaggttcgtccgtccggcgcccgccgctagctaacctgcgtggctgtgtgtcacgccatgtggtttgttcgattattaattcgtcgtcgcctcgcgagcggcggtgctctcggtcgatggcgacatgaaattgaagctatagcgtacgtgctgaacggtacatgctcgatcggtacaacgttttttgggcttcaccatcgtcgtgcaacgtttttgggcatgtacgcacgtagctagtacgagtacgacaaccccgatcgagcggttgaacaattgagcggcacctagggcaccagatagaattattgagatcccaataatttgcaaagagaccttgtacgtacgtttgctggagacttgcagctaaacttattcttctaccgcgtgcagacacgtattgatacgtacgttgtcgtacgctctaggtgagcagctatttgcgctcacagctcacgcgctgagtgatttgcaccacacaagacaggagcgcgctggtaattggcaaaggtaacgttgctcatcagcagtccgcacgatgtgacgatggtgacggtagtgcgtgccgttgcgtacgcagtcagggtgagggaggttgtgcgtgaccaggccaggcagagcatatgcggatgtcaacgaggcccatagatccatgggacgacagttttggtccttctccagccggcccggcccatgcacgttgtcctcgatcaaccgtccccggctataataaagcggcctcggctacggcgtggtgtaaaaatcatgtctacatgatgaacgccacttagagcaagtctaatagtacagcccactactaactctaattcatctatagccaatctaatagtcaattcatacaatagttgcttactatactattaatatatggtcccacctgtcatacacagtgtgtcttggagtccgtgctgcagctggctacagatctgtagtccgctgctattccctctcattgtttatcttattaaaaaatgtttatagctggctaatagcctgctattgtacttgctctcagagcaagtataatagtgagttataagcctactataagattatgtggaggagagaggtaaacaaaagagaagggtgttggctctcatacaaaacctagcttaacacaaactccaagacaaatacattaaatgtataagtgagagataaagatagaagaaaaaaaattatagctaactgattttagtataggctaatagtagaaagtggactatattattatccttactcttatacaacaacgtggatcaaatcttcagtgttttgtcacaacaactcgtaaacaaagttacgttaagagtgcgtcctcgtgacagccaccagctagcccagcgctatatcctgccgatcaccgcggtctacttggcgacggtgccagcgcagcggcgcgggtcgacggcgccccgaagatgcggaggtagcaggcacaatatgcacgcgcacccacgcgctgagcatctacccaaccagcgccatgagagcaagttcaatagtactattaatgtatgcttcaattaaacttattaatggtactattaatggtgtagtatactccctcatcataaaggaagtcgtttagaataatgtttaagtcaaacatcgggaatataaatcatgaataactcttaagttgttgagtttaaaaatataaaaataatatgaacagatttgtcttgaaaaatactttcataaaagttacatatatcatttttcaataaatatttttatagaaacaagaagttaaagttgtattttggagaccatgttgctgcccaaaacgacttcctttacgagtacggagagagtatacttaaattcatctatagtcaatctaatagcttattcacacaatatatggtcgcacctctcatatacacacgacgtattgaagtctgtgctgtagttggctacaaatctatagctcactttccttttctctcttctcttctcttctctccatgactttttgaaagctcctattcacacctcctagtatatttgtttgtggcaacttgttgacatggactcaacaataaataatcccccttctagcagcatgtccactattcaggtacgatcaagtgttcaactcagatcagaaaagaacagtccagatactgaaatcatatcatttcaaaccttcttcactgaataagagaaaaaaaaactgtggatatattgaaagcatatcatttcaaaattcttgcaccgaatgagagagatcatccatggagccacatctaccacacgcgcaaagaacagatggataatggtacgtgatgcaggacatcggtgctagatcactagggttcaaacaaacataatttcttggtcacttggggtcaaacatacatagaaacaagacatcattgctggcatgttgctatgaaaatactccagaatgttgctgcttgcatgtagatgtagtagcccacttatctactgtcaccttaatcgtagtagtaggagtttcatcagcgataaaaaagatgaatgaaaagaaaaggtgaaatcaggttttccccaattacatcttatacatgtaagagcatggtcaccttgaaattgtgaacagagtgcatatttttcaagtcgctatgaccgccgaacagagtcctactcttaacatttgggacgataaaatactttaacaattattgtactaaaactacgttttattatctttgttttctttttctcctttctcataaagtaaaagttataaatgctagggatcgatattaagccgttgtcatacgtaacaacgatatttctttctcttccggccccctcttttccatgttagtagacttacctgataaacaaatctaagagattgctattgattgtcattgtacatgttctcagattcactactcttttattgtgagcatatttctgaaattatgaaatggtgtgtgttttaaatactttctatataaaatttcttttaaaatcatttttaaaaaatttacaatactcaatacttaattaattatgtactaatgcctaatatcattcctgcgtccctaaccaactcagatgcagtcttagttctttcatcaccgatatgtgggacttaccaagcctaacaagtcctttcttatcatttgatagtcctttcttactattcgatctagtagccactgcctaacttagacagttggcagccttagtcagcccacttgcatgcatggactatggaagggtggagcccaacaaccgtcaaggagaatatttcttggaatgtttcgtttggagtggtatatttcatattaatttggagtaaatttcataaaattgcatatattttgcacattctatcacaaaactacagatttaagaacttatttcacaaaactacagatttagtgtctacgtttatcacaaaactataggtactttccacaatacatcacaaaactacagatttaagaacttgtttcacaaaactacagatttaatatcttcatttatcacaaaactacaagtttagtgtcttcattatcacaaaactacatattttagcatttaaaacatgtagttttgtgataatgaagacactaaacatgtagttttgtgataaaagaagatactaaatgtatagttatgggataaacgaatacactaaatctatagttttatgaaacaagttcttaaatatgtagttttgtgatagattatacaaagtacatgtagttttgtgataaaagtagacactaaatatatagttttgtgaaacaagctcttaaatctgtagttttgtgataaattgtgcaaaatacctgtagttttgtgaaatttactcattaatttatcttatcaatctggtaaaaataaattaaactcaacttaaaagaaactttggtttttgtaattgtagaagtcaaatttaatattttatgtttgtaaggcgatatatctcatactaatctatcttacaagttatttttaaaatataataaacgagggatattcccttaaaagacaaatccatctccttataacttatactatttttctttcacaatagagttactgatttatatatacaaaacttataacaatgttacccgtgcaatctatgcacccttgcaatctatgcaggccaccacactaatcgacgaaaaatcaatccacacactcccataacaatttggatcaaatcttcgatgtattatcacaccaactcacggataattttcatcagggaatagtaagtccccgtgacagccaccagcgagcccagcaccagtatcccgccgatcgccacggcctccacgctgctcatcgacggcgccccgaagatcctgacgtagcaggcgcagggcagcagcatgcagacggccacgttgagcatcgatcccaccagcgccatgaggtccgcgaagaacggcagcgcaagcgccacggccaccgtgctgagcaccagcagcgtcctcaccgccacggagacggcgcgcgctcccttgccggcggcgccgcggatcctctcctcgacggcggcagcgatcggcgtcaccaccagtgcgtacttggtgaccgggttgagcagcgtcgtgtatatggcgaccttggagctgagcctcgccgacgggaggttgagcgtcacctgggacagcacgccgtcgccgtacatgaggtagccgagcaccgccattgcaggaagcatatcactagcatctggttgatatttgataataattaattgatcaataatcaattgaagagttggtcagtatattgatcgaccatcaattaatccattctgattatgcaccagattgtttataacttgctttaaaaatatatgttttctcaaaaacgtgatttcttctactacattatttctcaggattatctatttgtcaagagattttttttcttatctatcaatcgcatttttaacactagctagatcaatatatatcaacaaactcatccttatgttctttctccttgtggtgaagaaaataatattctaacctaaaagtttaaaaaatattttttggtatatcttctatgtcccttctatacctcttccattagttagccgttaaatttctatcataaagttcattttgccctttggtatcgagaaaatataaatttatgaaatatattgatgtagtgtataaatttattgtatgggactattatatgtatgagtttattttgtgagatattatttaataaaagtaatattttagtttcgcctcgcgaagggaaaacaaaagtaatttttatctatgacaatttattttagataaaacaaaaaataatattttttatcattgaaaactgtatatatatagcatagtttgttatagtagtacgcaaatttttataagataaatcttgttatatgagataaaaattatttttgttaaataatatcttacaaaataaactcataaatataatagtcgcatacaataaatttatacactccatcaatatacttcacaaatttatttttttataccaaagggtaaaatggagtttatgatatgaatttaacggtcaactgacaaaaggagtatagaggggattcaaagtaaaatttaggagtatggaagtaaataatcaaatctcaggaatatagaagggattggacgaacttttaggggtacatagggaaatttctcttcatataaacataataatgcactaaattggtccagaaaatatttttttaaaaaagcaaagctaaaagttgcagtgttttttttatatatagtagtgtgcaagtttagtaaatgacctttgcaaattggttgactaacggataagaaaaaatcacgactgataaatagcatagtgttatgcgcatgcgtatacgggtatacctttggaaactgagacttcctcttcatagatgtgtagagcgtcgggaacatggggtgtcccccgtagcagaagatgtacagcccgagagccgtcgggagccccgcgatccgtagcggcgtcgtcgtccctcgtccggagaatccgacgccgtcgacggccgcggcccacagcacgctgagcacgatgacgacggacgcgaacacgcccgtggcggagacgtacgcgagcacgccgaggctgcgcagccacgtcgtgggcgccaccacgagcgcgacgagcacgacgaacagccgcttcccggcgagggacaccgtccccagggtgactctggctcctgggaagagcttgtcgaggttgtcgccctcgaggatgaggaagccggtggcgacgaggtagagctcgacgtacgtgaaggcggacacgaggaggcggcccgtgcggccgaacgcgcgctcgccgatgtccgggtacgtccggatggcgtcgtcggcgtccatgcagcggcagaggaggatcccggtgtaccagcaggcggcggccacggcggcgagcagcgcgaggctcacccagcccccctcggagagggcgtagggcacggtgagcaagccaacccctggtcgatcagagaatatatagcggcatgagtgcgcacggtaaatcaacgcaagcaattaagcaagactgcaaggtagctagaagatctcgagcaacatgtacgcaccggacagggcattgaggccattcatgcaagttcgcgcggtgccgaccggcattgtgttcccgtttatagttagtaaataaatctggcaatattagtataagaggctcagcatggattaatgcagggtcatcttggagcagtatatataggcaatagccaagccccaaaacaggctggaacttggaagcatttctgcacttcagcgtctcgcttttgctgcatacagcatacgttgttgggtgcatcacctatacctacctatgcgcagctatgctagctagttggtcactatgaaagatacagtagctaaagctagttggtcactgtgagagaactcctatgttacgtttaactttaaaaaaaacatggttattgataagtaaatcatgttatcctaactgtagattgtataatttaatttgtgttgtcctgaaccacctaacacttgcttggtccagactgcttcttatgtaacgagatatgccctcccactgatcctccagtgactgcccggcgtgtcacagttgtatactacacttcttctaatatattgatgtgtaaagtttctacgtgttcatgaaaaaaacccttgcatacaatacaatctcgagaatgctctaccaattgcacacctaatggataacgaaatattggttttgctttaaatttcctagccacccgtttcacagccttgtgacaatcctcctttccctcctctctcaagcctcaagcaggtcctcgtggtggagcgaacggtactacttgttttcattaacagggtcaggggcacggttgccatgagcaatgaggaggaatcggagggggggggggggctggctccccgtgcgctagtggggcccttgatatcggtgtgcgtcaagacaaagtgatacaaagtttatacgtatgtatataaaagtatatacatacatatatacatataaagaggagagatgagagactagagggggcgaactcaccgcgcaggcttgcccccgtgtgaccacccatgcattagcacccctcagcgcggcacccatgtactatctatctaagaatctataccattgtacatgctccgatgagctccaccgaaagttagggatgggaacggtgatggatattcccaaccgatccattattgttctcgtagaagttgtgacgtttctgattctagacataaatttaaattgtctaattcctattagtatcatattgatggtattactaaaatagttgaattggaaaatatagagaattctccaacgatttcatccctaccatccactcttacaaaaacagtgctcgatcagttgggaatttctatcaccattttcatttgtcacatagttgagagttctcctttgtaatttaatatatggatgattcaacatcacgtccattaatcttttaattcctgtcccaaaaaaactgttaaggacttcttagaaaaaaaaatcgccgtattttctaagggaattttattaattgatcatggagaatatcctgtggaactcctatgttcaaaaagagcactaaagtcccctgtagtgatgagtgtgaataaacatgtttttttaagaaacgcattataaatccagttgctcatatcgtgcacgcatttatcctataaacgcacaaacacacgtggaacacaccacctctacgattgaacctccgaaagactaggttgacatattttgagactaatgcaaaagtcatcacggacgccttgatgtcgacagatatatcgccttgaaagaataattagccgtaaatatgagcatccatgtgaccatgtcaagtttagaacttaaacctgaataggctggttacaacttaagttagttaaggtaagcatattttgtatgtgaatatatttatatatacacacacacggataagagacaaaggtttgacaatgtcatgatgtcaagagaaagaacagaaagcgatcacactatcatttgtcaagtttcgctatatagaacttatatttcgtgacaaacaacgaaaatcttcaatatataacgcctcctgcttcgtaatggatgatttttagagaaatttcacaataataattaaactagttcatgtgaaaatcatgaaaattaacgtctcaaggagctctaaatccacatgcattcattgatgactccaactcctggtaatttgatgcacatgttgcatgctagtaacttcactgatgaaaagaacaaaaaaaatctacaagcaggctagtaactcctggtatattgtatagattaattagttaattaccgtgagttactagcaacactagaagctgaaacatacgacctcgaccatgcgttcggtgatccgtaccaacatgagattttgtataagcactcgaggttgcttggtggctggcaaaccaagtgtaaaataattcacgatcaggtgcagctagcgggagccatacgttcttttccaatcaaggagtgatcaagctactcgcacactcgactgatcacatcaggttcaggaagcacttgcgtgctatccactgtgctgctgcatgcatggttccatttctttacagttaataacacagtatgatacgtctcttaattctgctaagtatgcttattccctcctatcataaatacttgaaacgttttggataagttaagattcgatctaacattttaaacttcagctgtaacaaactttgaaatatttagtttaggagtagtagattcgtcttgaaaacacacaactccctccgtttttttcataacacgattgacttctaaagatagctacgaaagttaatatatttttattaacttattctagtaactagcaaaatacatgtgtcttataacatgttctaataatactagatgatctaatctattatattattaaaacagctttgaaagaaggcaccacgttcactgtgggactagaaattttcacattaatcggagaaaagaaaaaaaaagaaaatgagagttcaagtagaaatacaatcttccatataagaacccaatacgagattaatcaaaattcgaaataaaaataaaataaaatccaaaattagaaaagaaaaggatagtccaagtaggaatacaattttaaaatagctgaaattcggaattaaaaatatggtatattaaaagaagagtccatataagaacccaatacgagattaattaaaattagaaataaaaataaaaataaaatctgaaattagaaaaaaaagaagagttcaagtaggaatacaatttaaaattagctgaaattcggaattaaaaataagcaatattgaaaacagaatccatataagaacccaatatgagattaattaaaattcagaaaaaaacaaaataatatccaaaattagaaaaaataaaagagagctcaagtagtaatacaattatgaaacaactaaaaataaaaataaaaataaaaatattaaaagaacacaatacgatattaattaaaatttgaaaaaaataaattctaaaattagaaaaagaaaaacaagatttcaattaagaatacaatttataaataactaaaatttgtgataaaaataaagactattgaaagaaaaaaccatctaaaacacatgacgagataatttaagtaacatgcctacaaaggagtagagtggtggcggttgatacggaatataaaaactgttgataaaacaccaaatataatccaaatgacgattaaatggagggacgacaagcaggctatgaagcaaacgagtaaggcggttgccgggacttctaaaaaataataaataataaatcccattgataatcatattcgatttttaaaatctcaatgacaataaaaaggagaagcagcggacggggtgtataggagtatagttgcaaagccgctgattgttgacgggacttctagaaaataaaaaatgaattccatcgatagttatgttcgatttttagaatcacaatgataataaagagtaggcggcggacgggacgttgaggagtatagtggcatcgtttgacgagacttctaaaaattataaaaaatgaaactcaacaagacaataaactctaaaaactacaatgtccaatttttaaaggtttggaacttctaaaaagtaaaaaaaacaattataatcatgttcgattttaaaatctcaatgacaataaagaagggaggcagtaggcgagccgtagagaagtgcaatggcaaagccgctgatggtttggcgagacttctagaaagtaaaaatgaacccaaacgataattatgttcgatttttaaaatctcaatgacaataaagagaaaagacaatggacaggcaatagaggagtataatgacaacgtttgacggaacgtctagaaattataagaacgaaacccaacattacaataaactctaaaaactatttcatccaatttttaaaggttccaaggagaataaatagaaatagtggtagatcaagcaagcaaaataaggaaggagatgatataaggggcagcaactgatgtgacttttaaaaaactatataagtagaaacactagatgataaggtttggtgtttcaaagtcttaagacaatgagatagctatttataaattttaagtaaaattatattaaaaaatatattattttgtttggatgctagtcgcgcaattgcgcgggccatccagctagttaagactaaacgcacatgtaattattatcttaaaaaaacgcacatgtaattaactggtggcggtggcagacgaacgtacattatcactggtttcttttaagattatataggtatatagaaaagttgtaattgaagtcttaaaaattataaaagaatgaaacgccttaaactcttatgtcgatcggagggagtttcgacacgagttttaatctgagaacgtccgtgtgctcagtgctaggaacgagacagatgacaagaaggaagtaaaagtaaaattgctttcgctgtgttggtatcaggtgtgttggcaaatgacaatggcatttgaaataatcgtttccatgaccacgagagtccttgtcagactttagtttgttcgacgaaaaaaaaatagttactactactacgttgctcgcgtacggcaggtttagcattaatgaacgttgaattatgaccaaggtgattatttttgtgctcagtttgttcaacgaaaaaaaatactacctatgtttctaaatattttgacaccgttgactttttaagcacatatttgaccgttcgtcttattaaaaataattgtaaaatatacaaaactatatgtatacataaaagtatatttaataatgaatcaaatgataagaaaagaattaataattacttaatttttttaataagacgaatggtcaaacatgtttaaaaaaatcaacggcgccaaatatttagaaacggaggtagtagtagctagtagtagtagttacattgtgctaactactttgtgtttaattggtcatgttcgtcaggtttagcatttatcaccgtgttgaattagagccaagtagccaaggtgattgtttttgtcgttagtaacttgggcacgataaccataatttttcactgtttcagattttaacacgacttgaacacaaagatgtgctttgtgcagaacgcgtatatggtcaccaactcagcgatgacctttcactttcagcgagctatcagtagtaacagcagaaaaaaaaattgagaatatgccttttattttaacaatttacgtttatatccctacgtgggaagaaattgcagaaatatatgtatgccgcagaccgaaaacgtgggtgcgatcacaaatcgtgttgcggagacgcaggactgctggtcagaccgtccccgcagaatgggcaagaggaacccgcgtctccacaacacgatttgtgagcacatcagcattttcaatttatagcatgtgtatatttcaatgatttcttctcatgcaagtatataaacaaaaaatatttaagaaaatgtatattatcattttttttcagtaacagcataatcaaaacaagggttttgcacaagtcggcagtattttttgcgcataggacatctctataagtgaaaattaaatcccacaaagaaactaggatatgtcacgtcatctaacaaatacttaccgtcagatgcacttaaagacactacatatataaaaagtgattctcggtacatctttacatatatagccgtagagtaacccaccaataaacataccgaataacgtgtgtgttatggattttatgtcaataaaattgcaataaatcctacattcgcaattaaacaacatagcaagtctaaaattatcagatgtgcaggtcatagaaacaatcataaattaataaataaaataaaaaaatatctaccacctacagaaatatatatatatatgtaactaacaaatagaaaaacaaactgatatgcataatccaaaactatatctcaacctaattgcttgaacattgaaccaaatactctccaaagttcaattcttaacaaaatcaaataatataattcaaatccgcaaatagaccaattaaattttaacatacgtaatcattacaaacaatgtactatcatattcgaaaataaaagacaggttatggtcgcctgtaggcacgacttagatagctagtgttaagtgatgataatttctagaaatgtgcagttatcgactcatgcaagcctgctcaaatatatagaaattaaatttagtaaagtttaatgaaaaccaaacaatgcgtatgaatttcgagtggttgggtcgcatttcacagtacggaaaggcctggacaacgcaccgggagtctcaagggctcaaggcttcaagccgatgatgcgagtctttttttttacgggctcaaaagcccaacgattctaacgtagcccatggttgccctcgcttggtccggttgtacggtgtacggtgtaccacgcgctgccaccactaacgacagcgcgccgagcacagatccaccggtcgtcgatggctgtcgcgtacgctcagcgcttgcatcgatcggctgtctgtccggtcaagtcgctgatggctgaagcgaactgaaaatgtcgaagagaacatggtaattttgatcaaggacaagcgcatttcgctggtttactgcatctgcatgcgtgcgaacttggaaagagggttacacattacattggcctcgactagcatacgtgtcgcggcagcctaattagcttgcccactctagcttgacatctctgtacaagtatctctataacaaaatcgttcgaactccacaaggcggaaacgactcagacctcaagacaaaaggagctagaagaagaggaagaagaagagaattgacacttaaaatatatatatcccgaccatcgaccatggtactgacccaggcgagtcatcagcaactcagcatttgttgtgtatcgggtcggaccctcgccggactcgacgcttgctcatcctgtcagggtcgaacaccttcgaaggagaggagccggtcgccgtcgccgtcgccgccgcggccttcacggaggcgtcaaaggtggcggtggcggcgacggcattgccgccctccacgagctctcgcggccgctctgttggtggcgaggcgctccggcgactcgcggcgaacacggccggggttctgacggcgagaacctcgtcggaaaaggaggccaagaggacgacgacgagaaccagcaccgccagtgctaggttgagacctctcattctcttctaaccaagggcgcgttgttggtacaagctaagctagtttttgcgagagaaatctgtgtagatagtgtaagcttcgaccatgttggtaacaatggccgcatcctgtgcctttgttctgctagatataggaatagggaagcagggacacttaggcagtgttaggccacatctgtaactgggatggctgagatctcggtccaaaagcataaagctcaaagagatggacacccaacaaggcaaccaaatcactttatacttgaaggtgattcttgctgagttgctggctcatggtgttgcgcatttgcatgtaacccagtactagtttggtagaaagagaagggcgttgcgggtctgcctgacaagctactgaaatatactcctatcttagacgtgacatgtgagtgactgaggtactccctccgtcccaaaaaaaagacaaaccctgatttctgtgtccaacgtttgacagtccgtcttatttgaaaaaaatatgaaaaaaaaattaaaaagataagtcacgcataaagtattaatcatgttttatcatctaacaaaaatgaaaatactaattataaaaaaatttcatataagacggacagtcaaacgttggcacggaaacctaaggtttaccttttttttttttgacttagggagtaaatagtagcttggtgttttggtaatgcaggattatgcggtgatggttaatcaacatcaaaaaaacaaaggtgaccgtgcccactgggaaaagaaagcacagcatgcagttgcattctgcggtgctgaattctattttagaagaatctgccaggtggaaataaagatgctggggaatagctagctacactacagtgtcacttggaggaatttaggaccaatgcaagactgtcactgggttacctctctactgtctctttctttggattataaaccgtctctttttttggattgtagatcagccaacccaagctgttgctttctcttctttgtgtactttggaagcttctctctgaataaaggagcacgcctccccatgctgaaaccaacacaacgcacatcctgctactcctgccgtgctttaccttactgtgccatatagctgttgctttatgttgtgttattctacagtatcattcttggcttcttgtcgtgtaacaccatttttaccttgggaaatttttttcccttccgcaatgaagcttgttttgccttggattgagtggatcagtccaaaaccaaaagccaatcttggcccgttcaaagatccaaagtgggaaccaagccacgccacacagcgaaaagcctcccactgttgccgctagtagcgacattcccttcttcttttgctttctttaggtaatccccctagggttacttaggctgcgttctttcaaaggagattggggagattgtcattcgttttccgcgcgcacgcttcccaaactactaaacggtgtattttttttaaaaaaattctatatgaaagttgctttaaaaattcatattagtccatttttgaaatttaaaatagttaatactcaattaatcttgcgttaatggctcacctcgttttacgtatcttcccaattttctcaatcccctcaccatcaaacacagccttagagcaaacacccttgttaaccccccaaaagagaaggaatttcagctggttacctacatatacttacatcaatgagatcatcaggatggactgactgcatcataatcttcaaaggattatgacgtataataagcagaaactctgatgtatattgaggcaccatctatggagaggagagagagagagagagagagttctgaatcgattcgttttagtatttaagaaacaaacgaaaaaggcttcaggttggaagcatgaacagctcagcaaatgcgatatttacaaaagcaatagatcggggatgccaacttactgctagaaatacatcagatacttgcctcttctaaaggcaaggttacctccagagtttcagcgcctctttggattgtcaagctcaccttgtctccaacgccataatcatccagaaccctcgatagatcagatttgcctttgatctgctccaaaagatccaacatgagaaacagagactggactaaggctaccttagtacatagcatccaaggattctgacagaaggctataaaatcagtttaatgttaaccaatcaacacttacaggtttaccgtccacggcaacaatgacatcaccaagaacaatgttaccagcaaaacccctactggtaggaacaagaccagctttggctgcagcactgcccccaggaacctgcagaaacagaaatattatgaacagaatccagtttggccaacagaaaatatgggttacaccaactcagtctacctgcaatattagagatccagtgcgaacattaagctgatatgcgattggatctggagcaaactccacattcaagccagcacggcgaaccttaagagaggagtgtaagcataatttaaaataaaatagaatacagaagctaactgctaagcacatgtgtcggcaatggaaaagaaagaaggttcttaatagcaatctaaaatttatctgtgctcaaaatttttgcaacaaaaacattcaagcaatagtgttcacaaagtttcaagagagttttcaggaggggagggcaaagttttgggccaaactcagaccaaaattaatttaactatctttggaaaaggtccctatagtatttacaaaaacttatcaaccgaaagtttcctcctactgctaacacctaaagttgactctgagcatgtttcacagcatgttggtctaaaatcatgacaaccacagttattgattattgataaagaatcacaatccataagatgccatctaatgcatgaaacatatacctacatatggcatctccataaacataacacattattctaaggggatgattagaaaatacgtatgttattaggttgatgatgatgttattgaaagatatccatgcaacatacttttccaaactgaattaactgaggagctattttcagaacagttgatgacgggatggcaaaaccaacaccagcagatgttcctgcgacattgaagaaataatggaatctcagactaacataggaatttaagttacattggacatagttggatctgaatatctgatttatgctctaccaaatcaacaacaaaaacaaatggtctaatgcacagcttcaaggaggtgattttgagtcaactataatcaattatgtcaattcttacagcccattaggatgcaagcaaataacaatttcaaagaatgctgtgaatccgaatataaacatgatagatgataccactcactaatcatgccatcaaaatagaaagtcactcaaagtgtgccatcaaccagagtactctgggaaatgaactgatgtacagggatcgaggcaagctttgcaatgtgttatgatcattttagtttattgaggatgaacttttactaattggacatattctcttttgaatgctaagtgcagtgcttgacatctgtagagaaagcatgaacatctactaatgttacctccgcaaatcagcatgaaacaattcagtgctatttgattaatacatttcatgttgagataatctaacctgtctgtgtgaaaattgctgtattaataccaatcatatgccccttcgaatccagcaatggaccaccactgcatggacatacatcagtatacatgcttagtaaaaccctctataatacattttcagaaacataaatatccaacacatattgtataaaccactacttacaacatgatccttaaccctagatgttcattgccccagagtacaggtaatgcatactaaatcacttcaaggacgagggcatacatggtcaagctgattttgaccacaaatatgatcaaattctaccctaatatagtaaactggtagcaacaaatattaccactatgccaactgccagagctgcaatttagccccaatctatgtgtcctgactttagatgcgatgctagaaactcaagaaagtaagaagtaaaatacttcctcttctgtgtcctgagtcaactgttttgcactgttataggcaagtactatcattttgtgcatagtagaaaccataaacagtaatacagtatagccatcaagtaactagtgacaaaagtgtttatgcttgtcagtaagtaatatacagatgtaaaccagtacaactaatggtagtttccaggttgggttctgagaccagaaaagggtaatcagttgataaatcattaaagaaacatatctacaaacctgttcccagggttaatagctgcatctgtttgaattccacctccaattgttactccagcttgactgaaaatgtctcgatttaaaccactgatgacaccaacagttagagcatggtcaaagccaaatggatttccaattgctaaacactgttgaccaactcttagagctgaagattgtcccacgttaattggcttcaacagatctgtaggagcatccacctattgcatgtccataatccatatatgaggtactatgtctgacaacatttgagctcaggtgaaaatcacaacaggactttacgcactaacaaaccgtaaaattatctaatacagcccttccattggttgtccttgaactagattccattgggacaaggcaggcataagatgagtaggtaaataaaaacatcttggtatctaaaaacatacatatactatttccgtaaaagaagaaaggacggggcaaacaaaagtatgtattcttgacctctgaaaggaacctccccccctccccccccccctcagtttcgtaacttaactcttcaaaaaacatttcaatcaaatagcatgggacccctaactcaacagaagaaaatgttgtgttactgtcacaaataaactattataccataacaaaacaaaacaacaaaaagggaaaaactgaagcagttggctaaagagatgaatttttacttatgaaactaaaactccaaaagtatcatttttttctttttctgttacttccactttctactccctttttattttcttagtccatgacatatgccatgtgagataaaaatgagcagatagttaaatccttggctaacgacagaaggatattaatgagagtttgaggcatgtacatgccaggccaccagggagatgaaatgaattgaatgactaatataaaatgttgcacaccgaaatgagatgagagaaacctatggtaaacatagtgatgatagatgacaattctctatagctaatcaaaagacttctcaccttgagaacagcaagatctttagaacggtcagcaccaaccaatttgccttcaaaatttttctgtatcctttcaggtagatataggagagcaccagagcattaacgattagttggcttgcatatacaaggaacattgcaattgtatatacattaaatcatgaaactatcctgtaaaatgcagttttattagaatttacccatcagcagcaagaatgttgacacgcgcaacaacttcgccaggctttggtttttttgaaagggcattgccaaccactgtcattgcaccaacaattaaaatgaataagatgagtgtgcaacagggtgaaagggtcaagcaccataattatgtatgaaggaatttagatctctcacatatgatgggtttttaatttactgactgccataccatggtagtttgtaacaatatggccggaatcatcccaaactacgccagaaccatttccttcgggaatctataatgaatattaagaagtttctttcaaacaagggcttctaaaatttctattaaaagtaacaataagactctacacatgatatctgcgaaagatatacaggacatcaagacaataaatcagcaattccttgtctaactttagcttgatcgaatcaccagttcagaaagaaagaatgccagacttgtcctatcctagtgcttctatggagaatactagtgatgcatttgtcaatttgagcaacaactaacacatactcttgactctactctaacctataacacgaaagcacattttagttttacctcaacaacaccagttacattgagctgagggcgcagagttgcatcaaaaatgttgacaacagagtaagtatttgtttcaaaaagctctgcgatccgtttctgccatgcaagccataaaagaagaaatatccaaagaaatgtaaatatatttttggaagaagtaaaataggataaagtgggttcaactaagtactgacctcagttggaaacagtggaccagatggaaaaatctttggagtgacatcatcaattttaacagatggatcacccaaagcaagtgctgtatttaaggagttgtaagttacaaagcatgaacacttatagagtaaattaaatactacaaaagcaatcatttgggtaggtgacaactgacaaggatcgagttaatttctattaacacctaaattatcatgccacttagtccgaacctgagaagtaccttgaagaatgtaagcaaaagcaaaacgatgataatgcaacaagcttcctccttgacgcaagcaatacaggtttacttgacatttcaccatatgtttccatcattgacctggaatataatttcagataaacataaacagatagagtgaataggaaaacggtcaaccaactatgaatacctaatgcaggtgcacatagtcacagagtgagcgccgtgcaaaagacaaatactactaacagaacatgagaaaatgtggacgctgcttgatggtgagttaactaacacgaatgttctcgcacatcgaattttcccctaaaaattcatcaactactactctactagatatcaaacggaacacaactggaataatcaataatctcccgctagaagcaaccgagattcagcaagcgaaaggtacccaaattgggccatcctacactaactacgcaatacagttatccagaaccaccagattgtaccgatgaaaaccacccggttagaacaaaatttctggcgcaggggcaaggggcgggcatacctcggggccgtttcctcgccgtcgcgggtgaagggggaggaggcggcgcactcgatagccatcctccggcggccgccgccgccgacgcgactgcccggggcgcgcgcggccggagcggcgcaggcgaggcagtgcatcccaggttccgagcaagcaatccagagccccgcggggtctcgaatgggaggagtggtgggggtgcgtgcgtgtgtggcttgcgagcgaccaccgtgaagcgagatgatttgaaacctcacaccaattctggggcgtgacggactgacggtatcgtgggggatggccggatgggagaggtgtacgggcatacggcccagaccatctcagcccaattaaacaggccacacgatgctgtttttgacagagccccctctttccaaatagcccctatttttgtacttttttttcagaaaggtccccatgtatttgcactcagtccccttaaggccttgctcggtttaaagagtgttgaagaggattggaggggtttgtggggattaatcgaatatagcctaagggttgaaaacagtatggattcggatactcgaatggataccaaattattttagcggattgggatttggtgtggatgtagcgttgaaaatgatatagagtcgaagataacacggcctataaacgaatcaaaaatatcggatgttgcatacatatacaacgtaatacaataataacaagaattagaaacacttaacatcacaccacacaataaagctaattagacttacaaactagatagagagcttatatctactattataaaaatttaagatgtttttatcggtactttgatacgtcatccgtgtttgaatcggttttaattttattttcagttttaatctctgtatctctatctctacttaaaaagaataagaaatttccaaagtcggtaaaaaagaaaaagaagtccgactaaaaaggtaaaagaaaagtccgactaaaaaaaggataaaaaagcttctatcgttgtaagaaagaaaatcgtccgactcaaggaaaaaaagggggaaaaagtctcgccagtaaaaaaacaaaaaaaaaagtccgtttgtgtttttttactggcgatttttttttcacgctaaagagtttttttcctgcgcacgcgttattggtttttttttctggttttttcaatcacaccgcgcctcccgggcgcttttgttttttttttgtcaatttttttcaccggttttttatcccatgcgattttggtttttctcatctggttttttttaatccgatctattcgcggcacgtgtaccaagttgaaccctggcgacgcgctagcgccatatcgatcgtgcgttttccctccaatttgattgcaaataaaaaaatcgattcctactcctccctcatcattctctctatgattttcctcgctttattttgtcggatttaatctaacggttgccgatgatgacggcgatctttcccgattatttttatcccgagttttatgctctgattttgggtaaaacggaaaaaggtgagtggccggataaaaaaccctcaaccaattttgggtgattgaggaagattcgtccggatttgatgggtcgaaggaagcaggccaaacgaaggaggtagcggaccgacctagggctaaaaacggcttcactcgtgactgggtcgaaacaagcaagctaaatagagggaggtagcggactggcctagggctgaaaagtaaggaatgctttcgccccaaaacccaagaaagattttcattaactttttttaattataatatatagcgatcccaatattagaattttcattaactttttcaattataatgtatagcgatctcaatatttcaatttgttgctcagctcttaatatatcattgaaaaaacgtatttactcattgcaacgcacaggcattttttctagtaagagaaaaaaacaaacaaatcatttggttgagctatgatagcaatataatcatatggctagttattaaaaattgaattatctggatagcactttgttagataattcgcattaaaaaatcggataatatgcatcattgaattttagcaataccatattctaatcctaatacgccagattttacaaaatattttaccatattattagttctattggattcggaccaaaacagaaaaataaccgatccatttttcatcccttctggtaaaccatggacctcgaagtcttaactccctcaaaggttaagataaaatacggagaaaattctatccgtgatccaaaaatttatcccaaatcaaagaataccacaaaattttcacaataccaatcaataccacataaagaaccaaatgatgcattcatctttctctcctcatcccctctcatctgatctttggagtggattcatcctcttccggagcttgagatagatgccattgtcgtgtctgccattgccaaggacgaggtggtcacaccgaggcttcggctggagctcgatctagatggcgtcatcgctgctattgtcgtagtcttgatgattaatcaattcaatcttggctgtcatgagaggagaggttagatttcgtggtatagatggaaaatttggttattagatttcgtggtatagatggaaaatttggttatctttgtggtattatttggcattcaaaaaattttgtggtattctttgattggagaaaatgtttgttatgggcggattttcttaaggaaaaagtacaccaaaggtccctcaacttgtcatcgagttacaaaatcgtcccccaaccacaaaaccagatatgaaacatccctcatcttgaggaataagaagcaacccataacaaacatttgctccgagaggagagaagtgagagagggagatagaggaggaagggagaggatgggatgacgtggcatcctaacatgtggggcccatgtgggtcacatgctgactcggccactacgtgggataaaatcgggctcaagaccactgagggacctaaagtaaacggttttgtaagttgagatggatgtttcatatctggttttgtggttgggggatgattttgtaactcgatgacaagttgagggaccttcggtgtactttttccttttctcaaaggttagctatcaaccccgccgactccgctggaggcccaactcggcccacggccaattactgggccgccgcctgtcgcgcgacgcctctcccttcttccccttgccccatgtcgccggccgcctcctaacccgacctactaccctccatggccgccgccgccgccatcgccgccgcactcctccgccgctccacatcctctcaacaccaccggcgcatcctcctcctcccactcctctcccacctccagcgggccgcgccccgatccccttccccctgggacccaccgccccaccaccgcttcttcttctcctccgacgtgaccgccgagggggacagtaagccgcggccgcctcttgacgggaagcagctatggcgcgaggtgtcgacctcggagcccgccaccggcgcgtcgcgcctcccgaaggccacgtgggacgccgtggtggcgctcctccgccgcttcggcaaggacccggctatgtccgaccaagccctcgcgctctacatccccgcctcggcgttccccacctacgcccgccgcttccgccacttcctccccgcgcgcctctccctggagtccgccgagcacctcctctccctcccggccgacgacgcgcacgccctcctcctcccggccttcgctgagttctgcgtgacccacctcgcggacgagctgaggaagcacgagtctgtcatggccgcggcggacctcacggcgccgcacgcgtggtaccccttcgcccgcgccatgcgccggcgggtggtgtaccactgcgggcccaccaacagcggcaagacgcacaacgcgctcacccgcttcgccgccgccaagtccggcgtgtactgcagcccgctccggctcctcgccatggaggtcttcgacaaggtcaatgccctgggcgtctactgcagcctccgcactggacaggagatcaaggaggtgccattctccaaccacgtcgcgtgcacgatcgaaatgctctccacggaggagccctacgaggttgcagtggttgatgagatacagatgatggctgaccctgtcaggggctatgcgtggacacgagccgttcttgggctcaaggcagacgagatacatctctgtggtgaccctagtgttctgaagattgttcggaagatttgcgcagatactggagatgatttggaggtgcatcaatatgagcgcttcaaaccgcttgttgttgaagcaaagacactgcttggagacctcaagaatgtgcgctctggtgactgcattgtcgcgttttcacgcagagagatatttgaggtgaaactggcaatcgagaagtttacgaagcacaagtgttgcgttatatatggagctcttccaccagagacacggcggcagcaagcaaagctgtttaatgagcaggataatgagtatgatgtgcttgtagcaagtgatgctgttggtatgggattgaacctcaacattaggagagtggtattctatagtttggccaagtacaatggggacaggatggtacctgttgctgcttcacaggtaaaacagattgctgggcgagctggtcggagaggcagtatttacccagatgggctgacaaccaccttcttgttggatgatttggattatttgatccagtgccttcagcagccatttgaggaagcgaagaaagttggtctattcccttgctttgagcaggtggaaagttttgccatccagtttcctgaccttaccttcaatgaactgctggataagttccgtgaaaattgccgcgtcgacagtacatacttcatgtgtcaccaggaaagtatcaagaaggttgctaatatgcttgagaggatccagggtctctccctcaaggatcgctacaatttttgttttgctccagtgaatataagggatccaaaagccatgtaccatcttctgagatttgctacaaactatagccaaagccgtcgtgttagcattgcaatgggaatgccaaagggttctgcaaagaacgacactgagcttctggaccttgagacaaaacatcaggtcctgtcaatgtacttgtggttgtcacaccattttgaggaagatcattttcctcatgtgcagaaagctgaggaaatgtcaataaatattgcagatttacttgctaagtcacttgccaaagcaagctggaagcctacatcaagacaacaagcaaaaccaagacgagaaaatgaagaagacaacgatgtggagcaggcatcagatgataatgcaaagaatgattcagaagatggttatgaaaggtcaatatcacgtataaaaccgttcatgaggtacagcttccaacccatatgtttcacagatatgctgattcagcaaaattacatacattttttttctttcatatagttctcgaacatatggtactttttaaatgcaatagctcaagatatcagatttgtcttcttatatcaacaaaattagtattttaaggagctactgcaatgcatctgtggaagtgttttattggacccaagaacatctcctgtaaacgaccacagctattatatgaatctgtgtgatggcaaaattagagcaaaccttgtctatttcatgagcctataacataaagtgttctctttagtctttacttgttgaggatggtaaattggtaaggagtaaggacaactatattttgtatgaagtcaatgggcatgctggtgctgaaaacaggcacttctttcatgttcaaactaaaaatatcattatatgcccactaaatgtgcttagaattaaatttaaatctgtggaaaggggctgtttgatatattataatcctacataaaggttgctagttgctacaaccagaaaaaaaaaaatctcatttgcatattgtgtctgctgacttaaggccatgaagtgctatgaatgtgtttgcttttttttgctcatgataattgccaggaaagttgtagcggtatgtaactgtttgtcaccagttttcaatgctggcagtaacttttgattaaactagtggaactatatggttatatcattccattggaaactccacagtgtttcttcaagtttcatgacctcattcattttgttttggctaaactaaattgaaaattcttaataatctacaagaattttatcactgacattggtcattgatgtttcactgatttgaatgatcgcaccttgtaatgtaacactagatcagcagggtttttttttttttcatattagttaagttcctctgaagattaagtccagctaagtttcctgataatgcagaaatttgcttttcatttgccttttttcaaaggaaaatattttttccaattattatcatatacgtacattgatatgtttgaacgaggtgaaaaggaacatctgcattcttgttctcaaggtttaaaaataccatgttaaaagaagaaaaagaaaaagatcgcagagttgattgcgtggtggggccagattttgcccaagtaatttcgtaaatttagaatgtataaaacaattttcatttagaatgtatataacaattttcaattagaatgtagtttcagatacagttatgatggtattgtttgtttccttttgcaggaaaaggctggatagacctagtcaggacccttcttccttgaactttgtggcatgaattacttgtggcctgggtgattaaccccgactgattgcttcatgagatcgtgtgtagccaagtcgttgcagccatttcaacctcccagaactggcagttcatctatcagttctggtgtaggatggttggttatgttggctgaagtttggaattgatcttatcctcaaaatgacactgaagccatccagaggtgtaagctagtatgctttagtggcgccacgggatactttaacttcagttttgtagattatttgcacgagaaggatatatcgacatgaattcatcagaattaagttattagtgttttcctgatatgaacaagggagtaagggactgtggtaataagttagctgggggatatacggtttttttattgggtattcacttagccttggatgtaagggactagaaagtaaacttgttttgtttcagttctgtttgaatcaatggcagcggtataaccttctgcaacgttctcacctgagttttccagtgctcataaaaaaattcttgtgctcagtcagcacacaggtgtaactactgtttctaatcagggatgaacgcgtccatgagcactcatcggcacagtgtaacacgagactagaaaataatatcgcactttgcccgttccataaaaaaacgaacttaatttttcatttggtgcaataaaagggcatctgtttcatgtgttttcaattcctataagattaaagatacatgctactctctcggtccctaaatatttgatgctgttgtcttttttaaacatgtttgaccgttcgtcttattaaaaaaaatttaagatttttttcctatcatttgattcattgttaaatatactactaccactactactcaagtagcttaggataggttagctgttggtgtggtgttgtagttatggttttcgctcagtttcctaattaaccgtgcgctgtaaggtttgatcctgttttctccttaaaatggaatatcttcttcttaatataaaaagtcagcaatggcctgatcgtttgaaaaaaaaagatagaaggtgttgagaggattaaattttaatatatatattttttcatcgatttttgtatatatttacatgcctttgaaatatatttacataaatatacactctccgcgggatagaaacgagccaccgcaccgtcgacgtcacgcggcacaaaaggcgcaggatcgatgggaggggcggtggtgcggcacccacacgcgtgaccgcatgtgtgtaacatggatggattaggtattaataatacaatatatttacaacaaactattatataaatagattattagattgattatcgatgatattttaattaaacttcctcttcagagaaagaaactactatttgtttcaaagggacctagcccataagaaaatgaggcccaacccaacccaactcaaaccggcgaatctctgcgcgcggcccgatataaaagggctcgcaacatacagcacccaccatcccctaacccctgaccacccccccgcctccgcacccgcctccggttgcctcctcccctctcggcgggcggcggcagcagcggcggcagagtcagcagacctcgccgggaagctaaagccctaaagctcgcggaagggtttatcgcaacgggcgatggcggcggcggagcagaaggggaagaagccgaggaccgacggcgcggaggccgagcccgtcgacgccgccctgctgcagtccatcgagaagctccaggagatccaggacgagatcgagaaggtgagtcggcgttggatcctctagcacggcgtggttgctgctgctggggcgtttgtatttttttttagggggctggggttttgggggtttatgggttcgcggagcggtcgcggctcagggggcgcgcgggatttaggagaagttcgactcccgattctgattctgttgtgtttatgatatcgtttcactgcggaacgaacggttgatgaatgattggtttactatggctgggtagacatatggtttgggagatcgggttttcaatttttcggttctctctatggctcaagttgggacataagtgctatgttagatgctagatagcttgtccatgttctctctatggcttgacctgtttggaggcctgatattgtggaattgtgaaagttagcagtagatgttgtgcctgttttgttctgtcagatacttaaaatcagttgactgtgaacccatggccattgaactgtagacgtctagaatagattgtgctacagttaaatgctttatgagcactttgagatgcatgtggagctcattggagagtagttagctgcaaaagttttttcacattcaacttagaggttggaggcttcaaaatgtggtcagaaatgctttaggaaactcgtctgtctttgttcaattcctctggcaatttaaattagttctataatgtaatcgcagaactgtacaagctaaattgggtgctctaatgtccagaaactccacatattctcagacaaagctaataggtgcaaattctcggtttctctggaatgagaaaaattcttgcatgacttggttcatgattacctgatctgcacaacattgcattccagactcccttgtctaccagatattgtgcatcatggattcagcttcgtttcaggctttttatttgacttcataattactccattctattagttttagtatcaggattagtgatttaattgaactaagtgaaaattatcataatcaatgatgcaatctctaaaattgtactgctaacaaagtgttcctttccagaattattgtttgagtacctacaattccaatttcatatgttgattggacctgatacaatcagctggaatgtttagtgggttttgaatgttaggctcttagttcattgcattaactgagttcaggttaatgaggaagcatgtgataaagttctggagttggaacagaaatacaacgaggttcgcagaccagtttatgttcgacggaataaaattatcaagcaaattcctgacttctggctgacagcggtctgtaatatgtttctacaatgatttttatttcatgctctttcggattgaattgttgattgattaaaacctttcatctacttattaattatgctatctactgttcatcttgcagtttcttagccatcctatgcttggtgaactattaactgaagatgatcaaaaggtacctttcttttgtggactactaacattaactttgatatacttttaaatcaaaagtagtatgaggcgtactaaagcaaggaaatattgattttctcagtagtcctatgggaacaatcgacgcacaatgaacacaatgaaatatattactagaactacgtcatgagctttcttattttttattatagattttcaaacacttggagtctatcgacgtggatgactcagaagatatcaaatcaggctactccattactctcgtgagcttctttgcacttgcaagatattatttccttatttcttttaccgtgattacaattgcttgtcattgaactgtagacattctcccccaatccatattttgaagatacaaagcttacaaaaacatattcctttagtgacgatgaagcagtcaaagtaaaggctacctccatcaggtggaagaaaggaatggtatggtacccttttgatcgatctaagtgtttctgttgctatgcttgtgcaaagagaacctattaacctaataacatttttaacatttaaggatattgccaatgatcgtgcgtacacgaagaaaggggacaagcgaatcttaattgatgaaaggttgttatttctatctgtttcacaattttggtcttctcttttctacttggaagttggaagaaatagtagggaccttctataaagtaatcttagcatgctagctttattccttgtttcattcctggtaaacctgctggttatgttgcttgatataattcgataaccgactagcaactgccaaaggcacatgatagcattcttttcactattttgttagctatcatttatatgaactatctgttttttgggtgcggtggaggctttctgccatgtctatatccatttcttacttttatataatattgtgttctttgtttgtcacaactgggttcttggcagttaagttgttaacacgtcttcattttcctttgcagtttctttacttggttcaatagtgaaaagaacagaagttttgctcatggagctatggatgaggtataatcgtcccactggctcgtgctaaaccatgattgtttgaaactttgtttagttgtaaattattcgaagttctatcacaagagttttggaatatcctatgctctgtgaagatgttctctgagaactttatttgcacaggtggcagatgtcatcaaggaagatctgtggcctaatcctttgaagtacttcaacaatgttagtctttctaccgtaataagtggtttgttttatttctgttattcctaaatcctaatatcttgtcctatccgacatctcatttgcaggaatttgaagaagaattagagctactggatgacgatgacgaggtaatcctacctcacatttgtaaatatataaagcgtgatagcttatcagtgtgctcataatggttactcccagtacaacattgcatgtcatcctttcttatgctggtgatattttaacttttcagtaaggttattttagcaatatttttttgcgcttgactggtaggtgaattattactgttgaactttaaccattgtatatctgtatttatcctccactcgcaacatttttaggtatctgatgatgacgatgaggaggaggatgatgaagaccaaggtgaaggagaggaggatggagaggagaactgagctctctgtcatgtcagattcttttggcctggacaacttatgtctgcagaaagcggagaccgggcctcctggagggctgaaacagcagggcgtccccttttgcggcgttgtggtgctcgacttagctggcagtgtagggacttgctccgaaaaactttgttctatggagaaataactcgagttcaatagatgattttgttgcatgcgcgatcgaaatgttgcgtgttgtttggaagtgttatttaccttgccgttggattagtgtttataacgctattatatatagagaatgatcaaattaaattttgcagcctctcacgcgccgactgccagagttaattttccagaatacctgaatctgaatggcacacccttgcctttttgctctgttctgagtttccctgcgcggcgtatctggagcattcagtaggttccattccaagctgaacaatgttaccaggaatgccgtgaatcgggatgccgacggatgacgaatcctctccgaaaatactgtttcttctctttccaacaagatgtcatatgattatattatgttaaaagaaaaacatgtgtttcaaattattagaactcaaagtttcatatgtgatagtaatatgtttcaatgcaaatctttagcgtgtttcataaaactatctgccactcctctctctcgtctctcttcacctcatccatatatgcatgtatgtatttagtgaccttcaaaacttttttctcctaaactacttatctaatctacgatccgatcccactgttatattcgttgcaattaaatctttagaacaagttatcgtatgattatattctgataaaagaaaaacatatgtttcagtctgttaatacgtaatgtttcatacgtgataagtacatgtttttaacatgtgtctccactgtgtttcagtgattaaagttttttgtttcgtttcactagtgatcaactacaacatttaaccgaccgatatttttttaaaagaagatagggcgccccattcaaggaattcttcccaacgctacgtgagaatgtgagatgggcggttttgtccctaaattttttgctggaagcagttgaattcaggcggccgcgtgagatgggccgctcgcttcgccggcccgtccgggcctccgagcgtccccgctcgtcgcctcgtcccctgcctgcgccgcagtggagcaaccggcactaccgaaccgctcggcgtagcatccacgcagcgcaggggaaggaaagccgaagcgcggccgccgcgcgtgagatcgacgcgcggcgacttcgccaaccttccctataaagcgctgccccaatcgccaagcccaccgacctcctcctcctctccagtctccaccaccgacttcttcgtttgatctcgggctccggaggaccggaggatgtccggcgagagatgcgccgggcggccgctgttcggcggcgccatctccagtaccttccccgtccggttccaggtactccctcgcctcccccaccatcctccttgcgaggcggcggcttctcgttccttcacgctgtactgcgcttaccccccccccccccc

SEQ ID NO: 8338 - DNA, 43446 bp, Oryza sativa
ccccccccccccccccccccccccccccgttttcctttggttttttttttttggtcaggatgtgagcaacatcaggcaagtccccgaccatcaggttcgtgcacctctcgcttttgatcccttttgagtttggttttgtgttcggggggggggggggggggggtggcggagtttctgcgggtggctgatgcgtatactttgattgggttggggtttgctgcgcaggaggtgttcgttgacccggcccgcgacgagagcctcatcttcgagctgctcgacctcaagggcgaggtagaggacggcggcagcgcgctctggttcctgcgcgacatcgccaacgagcaggacgcgggggacaacttggtgaggataacctgttagtgcttcagcatactacttcgtcaaacattagagttaggagtcgatgtaacgtaatcaggagttcctgactgtttgtgttaagattcgagggctcatgcctttaaactgagttaaattcatgtttgttggctaggtagttgagcattctgggacgatcgagctaggtggtctgcgatttggagatgctcctgcagtggctggaactgcggttggtcagctggtaagattatttcctctttgtgttgtgctttgccaactccagattattctgcaccttgcgataaatcaatatccagcacattagattttcaccttctttttcaacaatacaaatatatgatggcacaatattgctggagttgtataggtttaggtgatcacacttcatacttgaacagctgcacattacagagaatggaaacagattttggtagcaattggcatgcctaagaaaaataacaatgatgtatggataaatactagggattactggacgttttgttggttgaactgtaggtgggctgaaccattctcatataattgatgacccctttaaatcatagtgttggaggtatatgtttctaggttctacatccttctctttccagataagtagtaatgcagatgtctaagtggaaaataaagtttgggagaaattaatgatcaagaatcctccataacataaatagatccatgaaacattatgatttgtgcaaaattatcgaactactgtgtatcatgatttcattaactctggtagttcagttcattgatgcacattgatacttgatagcttggatatgctgtataatcaacactggatggtgaattgaccaggaaagtgcaaaatcttgtgcttaattttcttcctttttgtaggctatctcaaaaggaaggcaaggcagagaagcacagaacattgttcgagtgagtgcatccattccttcattagtatgtacaacaggaaaattgtgaaatcttggttcttcaaactgagttcttggattacctattgcagctttacttggccaatatacgcctcaagaatgcagctactgatgtagttattactgcatatgagccactgttgataaagtaagcgcagtatatcactaattacgtatactttctgttagacaggtcatttctattagtttgtacttaagcagggtgaaaagctcatttggacttcccatcacagaaactaccattcagtgtcatctgttggtcatagcttggctaatatttgattatgcattctaagaactacggattgtctgtatcagtctttcctttttaaagtctggtcgcatcttgacatgtttgtggtgagtgttgataatcttgtttggtgaaacatgcttactgtttaggaacacacctgtgcttacaaaatgaaacagccctattgtgttcagcctgatgtttgaattttcttgtcatactgattgctagtgcactggtggatagttaaacaagacgaaactagatttgtagttaaattctgataaacagcattaggtggtaatgttagattgttagaggttattgaagactttattacagcttttctgcccttctatatcaaagtttacagcataatccttcagatattgtttttgtaaattgagaatttgatgttgtttctgttgctattcattcagccccttgagtgaaagcgccagtgcagttgcagccggtccagcagtaccagcagaacaagcaggatgcttagcaatgtctgagatcttcaagctcgccgtgatgaacttcaatgtccatgactggaatcttttcaatggcagcagttgaaacagggtggatagtttatcatagtaccactactgagcatcgcatgaacttttccttggtctagtatctgaacattattttagatcggcaacattcgttttgttaatgtagtgtcatcagcagacccctgttgaacttgagtatcatgttagcttcaggaatttactcatttggcccatgatagttaatagtaagcactaaatcagtaaagaagaattatgtgtatctatcaagttagctatgagttctggacttctagttagctagagttctggacttcttcatttttgagtccacaggttcgaaaagttcgttctgaaatcaattggatttccgaaggaaaatgtcgtcctccctacattgtatggactggaatatttgtcctacacagtaccatatattcttgatccttgctcattgcaacaggcaccaaggatcaggatgacgaacatgtgaactatgagttaccaaatgaacacgccccacgttgaccaggtcatgatccatttggattggggcaatttgtttcaaccattcatcgcgcatttgacgcatcgtctcgatcgtggtaagatcctctggtcaccgttaaattttgtatctaaaggcggtctcgctcctaattcattacgtatttaatttccctgtgagttttacctttaaaagtcatttacatttcctcatgttataagttaattaagattcacgcatcacagaaaaactaacaaaaatggtcccaagcaacatgctgaaattctataccagaacctggcaaccggtgtccggtagtatatacggtattacacatgaacattacacagcattgcgatttccaattgccggaagtcgataataatccgtgccggacagtgaaaagtcagatgaggtggggaagaaaagcaaagaaagaaacaagaaactgtgttgggcgctcgaaacttcgaaattctcattacaaaggatcgagaggaagaaggaagaagtctggggaaaatttttggagcgaggtggagttacaaaggcagcagcagcagcagcttctacgttctcacttccactggttggcgacgatgtcggcgaggtcgacgaccctctgcgagtatccccactcgttgtcgtaccaggcgatgaccttcaccatgtcgtcgcccatgaccatgctgagcgacgcgtcgatggtgcacgacacgtcggagcacctgaagtcgacggacacgagcggcacgtcgcagacctcgaggatgcccttgagctcgttggcggcgctgtcgcggaacgcctggttcacctcctcggcgagggtcttcttggacacctgcaccacgaggtcgaccacggacacgttcggcgtcggcacccggagcgcgatcccgttgagcttccccttgaggttcgggagcaccagcgccacggccttggccgcgccggtggacgtcggcacgatgttcagcgccgccgcacgcgcgcgccggaggtcacggtggctcgcgtcgagcagcctctggtcgccggtgtaggagtgggtggtggtcatcgtccccttgatgatgcctgcgccattgattggttaagcatcagagagagagagagagagtaaaattggtcgaggatcgctgatgcgcgcgtgtgcgcacgtaccgaacttctggtcgaggatcttcacgaagggggcgaggcagttggtggtgcaggaggcgttgctgatgatgggctcgtcggggctgtactggtcggcattgacgccgacgacgtaggtggggatgtcacccttgccgggggcggtgatgagcaccttcttggcgccggcctggatgtgcttgcccgcgccgtcgcggtcgacgaacacaccggtgccctcgatgacgaggtcgatgccgagctcgccccacggcaggttggacgggttgcggtcggagacgaccttgatcaccttgccgtcgacggagatggcgttgtcgcccacgggcttgacgtcggcgtcgaagatgccgagcgtggagtcgtacttgaggaggtgcgacgcctgcttcacgcctccggtgtcgttgatggcgatgacgtcgaggggcgagctgtcgccgcgcccgtgccagcaccgcaggaagttgcgcccgatgcggccgaacccgttgatcgccaccttcagcttcgcctccgtcggcgcccgccgcgccccgccgctcgtgccaacctgcgcccgccgcaacacaaacttcaacaccccgcgtcacgcacacgccgcctcgacgacgcaacaaaagttttccggtgcattgcttcacgcacgtaccgcgtgggtcctgaaggagaccgcgttcatgaagtcgtcggaggtggcattccgccgcagcggcagcgacgacgagctcctcaggccggagaactccgacaagccgcctccctgcacacataaccacacacacagacaccaaacacaatctttcagagcgattcttgcaaccaggagagacgagcagtaagcaactaaccaaacttacctggagtggcacggtggcggcggagagcatgggcgacgccatgtccgacgatcagatcaagaagaatgcagcagcagcaagctaggacggcgaggccgggaagtgtgtatatatgagtgtgggattgggcgcgccaggggtttgtggtgcgcggtgcagcgaggtgtcatcgtgaggcccggattgggcgagagatgagatttcggatagcccaacgtatggctcccagcgttctcgcacagccatcgcgtcacccacacaaacacatgtgtgtcacacacatctcaaagttcagctgctccatccattatgtgtccgccgttttttctttttcccctcggtgattcttgtcgcggtgaagaactgagcgttccagcctttcaggtagtacgtgatattgtacgcggtactgcatgggaggccctctctgcgacgcaggcggtgatggctacgcagctgatggatattcggcgttcgattctgtcattcttgaggaggtcgagctcgctttcggaggtaaaaatgccaaggttggctgctcgtggaccgagcggtacagctcttgcgaatgcgagattggcagattgcgtcggtaaacgatgggcgagggggaggggaagcgaggatttgcgagatgtggccatgcgggctcgcgcctgctgcaatgcatcttgcggtggccctcgcccccggtccatcatcagttcagtctcccggatcctcttgtttttctgaggcctggagtaagcttaacatccacgtcgctctccggtctcggccaacgtagcgctgttcttacgttccgggatgttcagaaattcagatttcgttgggcgcccacgttgccgctgccgttctttttctttcttttttccccctgttacacagaaaacacacgtgcactgtgcattgtgcacatacactatagttacacatttgcgggtagatctctaacacacgtttaagaaaaagaaagatagatgataaatcctctcaacattactaaattcctattaaaaacacacccgcacatgtggtgtgggatatgcgctagccatgcactgaactcatgactagcggttaaaaaaaaagccgatggtttcgaacggcttgaactcatagccatagtatattgagtcgagctaggtttttagctcattagcttaataagatataccgttagctacttgtgtagcttgctaggccatgaggtcaatatatatttttatacattttatacataagtacattagtccattaattgcttataaattatttggattcaatgagttatttatcatttggtgtttattcattatattaatatatgataaattggtaaatcaattcaaagatgcaaatgtgatattaatgagagaactcgttaacgagtcaagttgtgagtcgagccaagctgagttatgcttttagatcgttaaggttaccaaaccgagttaagataacaaacccaaacgcactaagctagctcaatatcctcccttcccacgactccaccatcgcatactgctccaccattctcttccggacgacttcaatgttcacgacttaaccatcacacgccctgctactgtcattctcttccggacagtttttaatcttcaattctataaaaatagtgaaataggacctacttggtaaaatttctatcttataaactgaactttaaaaacagatcgatatagtttgcgtctaaattgttcactttatgttttaattagcacaaaattgcaacggtttttattcattgtggcaattcacacgctgagtggtatagtgaagttaaaattttaactgtcattcacagttaaaatttaagttttaaaacttaattttagttccaggttgatttggggtttcttattcatagtctatctttcaaccttaacttttaaatcacaaactttgctggtttcttcatttatatttttttatagcctgtcactcgtggctgaaccaatcagagctatgattgtattaggtaccacggcaatacttgtgacaattgtatgttttcttggcaccttcctcacaacaatgatacaagaggaaatgtgacggttttgtcccttacttattgctagctaaagtttggctctgattttcctagccaaaccttatactaggacttcatgttagcttaaagagattattgtgggctcctccatctaaacgggctcttatctccttcctagcaatacaaagcccatctagatgacccacacaatccaaactgagacgagccggacataggtttgtccagggaaataagttcacttaggctcccttaactagtggtcgaatctaattcatatccctgaaccacgataccggatatctcgacccccaactattaaaaccagtgcaatttgactccctcagcggttttgaagggcagtttcgttgacgtggcgcctacgtggcggcattgaacagcggcgggtcgctgctgaccaaagaggggatcatcgacaccgccatggtcaccctcttcgccggccacgacacctcctccatctccggaggggtgagggccggagagatggtgtcgccgctccggctctcgcccgctcgctgccgaaggggagaggaagagaaacagagagggagggagaaggaaggatgagagaggggggatgacatgtcggccccacatgtcagtgagcctaaattttttgttgtgtgaatgacgaacgagtccacatatatgtttttcactagttaagcggctgaatctaattcgtatatctaaccacaataccagatttctcaaccatccaactattaaaaccggtataatttgacttcctcgatagtttggatgacagtttcagctgatgtgaaggtgttgacctggtcttcgttcaatatggtattgatatggtattagaatttaaaagtcatatgtgacctatttatcattaaaaaaattattatggggcccacaatcatcctctccttcccataaagctgaggttgagcggtggcaataagagatggagcggcgacgacggcatcaaagagctgggcggcggattcaagcggtgccgcgacgaggagagcaggagcggcagcagcgcgtctcgcggctggtggcggtgactgcaattgaggatgccggagacgagagcggcgacggtgggtgggcgggcgagagccctctcccttctccatcccccggcatagcctcggactgcagcagtgcttcagtaggcgacaacgcggaggtagaggagtagctcgacggcgcggatgatgctcacgagctcggcagcgccacctctctcctctcctttctagcccttgcccgcccgcccaccttcgtcgctccagccctcgcccgctgccgctgccactctcgtctccggcctcctcggccacggccatggccaccagccaagagacgcgctgccgctccagctctccccacaaatggcaaagggggagagaaagaaaggaaagaatggaaagggagggaggaggaagaagggaaggagaggatggttgtgggccccacgtgtaagtgggtctcacaatattttttttgtgaatgacaaatgagtctcatatgtatatatttaaaattcaaatgctatataaacgccacgtcaatgccacgctggatgaagatcggatcaatatcgtcatgtagacactacgtcagcgaaatcgttccctagaagcaccaagggagtgaaattgcattggttttaatagttagaaagacaatatatttagtattatggtttagaaatacgaatcagattcccgcggcgtttctcaccactcgtgggccgtggtgcgtccgaagaatgaacctgtgcgctgtacgagtgcgagagtttgcggagccgaagaaacacccagcgccccttttgatctaccccacaggccacagcagcagcagccaccctcctcgcaaaaatgaaagaccaaagaaagcggccactcgttcgaagttctcgtaagcattggttaactaatcacaagcttggtttccttatcaaaaaaccacaagcgtatggttcacccagtaaccatgcatgtatatcgagagcttcacggtcgcatgtgcccttggaattctttatccaaacttggcagcacggaatctttctggaactgcgccaacgaccaagctagtgccaaaacgttccgcacaaaattctgtcacacgctcacaccacctccagctccaaaccacacgcacatatgcccccgcgcctcctccgcccaaccgtgccgccgtgtgtgaaccgaacaggctcgcggcggcgcctttgcgtcccggcggccgcgcagcgcacagcgctccaggccagcgcacgccgaacacggggcggattcccccgcctcctgcctgcagctgcaggctgccgttcaggtggttcggttcggagctagcagcagcagctgctgctgctgctgctgcctgacgcctgccacggcacgcgcggctgccggccggagcggggcgcggtacacgggcagagtccatctgcgccgagcccatctgcgctccacgtgacggcgtgcagaactactcctaaaaaccggcacatgcgagggcctgcccttctagctttgggctgggtcggatgatcgtgttcgcgtcggacgcgacgcacctcggtcggtcgggccctaccgtggactacttggtcacatcactgactctcactgacccagtcgctccctccccagctcgtgccagccagccaccatcattcgaccatgcgagtgcgttgcatttgcacatatactatgctccaccctgatgtgcccaggacatggcccttcctgtcacacaccggcctgatcaccgggcacgggcagcctttcgttcgtgggtcactcacaggctcgactgttcaagcaggatcggccaggcccatgcatcccggagaaattttaaaaggaaccactggtggtctctctgcctacgtacaccggtacacgaccttttgttctgctgcggagtgagtgaccctacacagtggtacttggattcgtacgtgacaatagatgagtagaagtaactcgatcggtattcaatccgatatctcttcacgtagtgtaggatactggaagatgtggggcacatgaccggcccagggagtagttatgatatcgtacgttgtgtttaacgttactcgcaaaataatgatcgagcattcgagctgcccgttatggtgctggggcaatcagcctatgtacacggaccgttttataaaattgttgccttgtagtctgaataatccgtatctcccacctccacggttcgttctcatgcatgttgccattcagcggcatacggcggcattattcgttcgctggaaaatcattcgatcgagcggcatctcctccttggaggtcatgggcgacatgcatggtcctggtcgacaagctaggtagccagattatggtttgtgagggatggccatggtggaggcaggaggcagctcgatggtaccagtaagtgcctcttgataagcctttttttaaaaaaaaaataaaatcaggaaattataaacatattaaaaaaaatgtttgtacagtgaaagagaagatatctttccttctgttgggcttaaacgtgcttcatgacttttttttttcatttttgtcatttccacttcggtttggctaaaaaaaagttaacttaatttgtatttttcacataaggtttccactatagagcactagactttatgcactacttctatgattttttttttcaaatttgaaacaaaacaatttttaccaaaccataattatagtttacccaccccacggtaacaacatttaccgcggttgatgtggcgggaaccgttgctatactgtcaaccctatcatagagccattcgaaaggaatatcatatggtccaaaaaaaaaaagtacaagcctttgttccatagggccgtctaggaaaaattctatggaagcaaggagccctctcggacctctcgagttaaaggcaaaaggtaaacactagacatacaaaacgaaaacttccatctttgaagccatgccgaaatcctcaaaggcttctagaaggcttgaagatcactcgaggcagattgtaaaggcgcctcaaaggctcaaaggtgctagaagagactttcttatcaatggaggtttgccctggaccatgggatgatggaagaaaatgatgttgaatgtctcatatgcaaattgaagcacttcaaaacattccttgttggtatccaaggaccacagctagctagttggcgtcgtgattcgtgaaaatggcttgatccatgggccaaaccaaatggagatttaccacgatatcattaggttatacccccatgcaagggcaagcttgtacttcctctagtcataaatatttgaggaattaacttttgaaatgatgtttgacaattcatctcatcttattcaaaaatttacttcaaattgcaaaatgtaagtaaaggatagagtaacattagtaaaaacacaacttacaatagaataaagagtaatttcatattattatatgttattttttaataagatggatagtcaaaagttatatccaaaatcaattgcgagaaatatttatgaccaggtagagtaacttccctacatgcatcatttaggcttcgttcggattagcggttcgattgagatatttagcagcatgcgaaatgagacaagttattagcttataattaattgattattaattatacaaacttaaaaaatggattttataaaaaaaaacttctatgtatagtttgataaacgtgcttatagtctcacgtggaataaggaagttgccatttcgaatagctatttagagcgcattattaatcttaatatatcatattttatccattgtattagccctatacatataagcggacccgagaaatatttaataaacaaagataattttctcacactataagaggagttttagtcttcgaatactccttgtatcactactacgaaaaccatttttcgtggcggccattttagggtttttgctggcgaaatttagagccgccacaaagcaaaggccagtcaagatcttcgaccgctagcgaaaatgaatttttgctagcggtcgtcttaagccagccgccagcaaagatccatttttgctggctgttgtcttccaccaaccgccagcaaaaattcattttcgctgacggctgtgttaaatcgaccgccagcaaaaatcaaaaccatgcagctgccctagccgccagcgaagaggcggaaatttaaaaagcaaaaatatattttaaaaaaaacactgctccgtccacctccgtctgcgctccatccacacataaatttacatgtacaatttacagctaaaaatttccattctcccaagcattcaagcatcaaaaatatccacacatttaacaaaaaatttgaacaccaagcatcaatccaaatacaatgcttcacaaatatcatcacaaatattacaagcatcacaaatacagagaaccgctgtcgccggcgtcgtcgtccttgaagtcccctgcaccatcaccgttgccactaccgagccccgtcggcctcaaccgcctccgcctcgacgacgctgctgccgagccccggcgacctccaccgcctcgacgaccctgctgccgagccccggcgacctccaccgcctccgcctcgccaccaccgctgcaaagccacgcaacgctagatttgagagagggagagggggtggtggcggcgggggaagaggaggagtgaggagtgggggagagagacctgtggatccgccgccttgcgccttcccgtcgccggatccgccacctcgcacctccccatcgccggatccgccacctcgcgcctccccgtcgccggatccgccgcctcgcgcctccctgtcgccgagcgccgccgcccgggccgcctacgcctgacctcacgccgtcctctcctccgtcacccgtgcccgagcgccgccgcccacgcctgacctcaccacccgcgccccgagctcgccgccgcactctcctccgtcgcccgcacccgagcgctatcgcccacacccgagcacgccgcccgcgccccgagcccgccaccaccctctcctccgatcgcccgcggtgctgccgcctgtggatctgagggaggaggtgttggatctggagggactaggaaggaagagagggctggatatggagggaggagggaggagggaggaggagagaggataaggacgggtaggtggatgcgcggtgatttcttaatggcttgattttttatcctaagctctgcattatccgccagcgaaaattgtaacaacttcgccagcaaaaataggctattttgctggcggttttcttaacctaacaccagcgaaaataccaatttttgctggcgtcaagttaagagggccgccagcgaaaataacatatcttcgatggcggtcggcttaaggcgaccgctagcgaagatgtgtttccgctggcggcccgtgacccccgacccccgccattttctgcgctggcggttttttcacttagcctccatgaaaaatattttccaaatgccataaaaaatcgtttttctagtagggtattcctcatagaggagccttcgcttctctcgtatatagcccattctatccattgtatcatataggatacaaatccctataaaacactatatgttcctgttgtccaaaggaggattaacgcgagttcgagcactacaatgctatattttcctgttgtccaaaggaggattaatgtaagttcgagcactacaatatggaggcttaacgcaagttcgagcactacaaagataattttctcatgccataagaggagttttagtcttcgaatactccttgtattcctggagagaggagccttcgcttctctcgtatatatcccattttatccattgtatcatataggatacaaatccctacaaaacactatatattcttgttgtccaaaggaggattaacgcaagttcgagcactacaatgctatatgttcctgttgtccaaaggaggcctaacgcaagttcgagcactacaatatgacatgtgtttagaccatattgatgtaacatgaataagttaagctatggatattctaataactacaaattatttttaaaaaaaacacatggggatgtctctaatttattgtgttattgcacacctgacactgttagtggatccatccactggtggagaaaccatctttggtcagtctggcaaaatccacaatagtcccagatgcaaaaaaaaaaacggaactaaagattgtttttagtcccggttataaaaattttgatctttagtgatctttagtcccggttcatcccttgttagatgtatgtcagggggccgaggatctttagtcccggttgttagtaccacccgggactaaaattaaacacatagtatataatccctaacacttatcctctcctccacagttacaacttagacatatcgaatctcaccccctcttcttagatctatcctctctaactctcttctccaactcttccccttcctcctctcctcccccttctctccccttcctcctccccttcctggccagcctccccttcctatccggcgggccggccggcggtggggccacgcgcggcggcagccagcggcgggcggcggggcggcgcccggcggggtcgcgcgtggcagagggcggcggggcgacggccggcgaggccgcgcccggcggcgggcggcggcagtcggcggggccgcgccggcagccggcggccggcggggccgtgcccgtcgttcgtggcgaccggcagcgatagcgcattctttttttttaatttgtgatgattcaaattcactgagatgtatttgattgagatgttacaaatttgtgattcattgtttagatctgtgatgtatttgagtaatttcttaggatattgtgatgtatctgatttgtgtgtataagtaactttatttgtgatgtggattcagtgatgtgaatttgggatgttagttagatttggggattaattttgggatttgcctacttgattcgggagaaaataaaaaggaaaaaagaaaaagaaaaagggaccatctgtactgacgctattgtctctttagtcccggttggtaacatcaaccgagactaaagatccactctctttagttccggttggtggtaccaaccgggaataaagatatatctttagtcctagttatttcaaccgggattaaagatgtccatctttagtcccggatccttactttcggttggaaaaccgagattaaagggggttcccaaccgggagtaaagatggtttctccaccagtgatcctgaatcttgatcatagccaaaactatctaaggatgcatatgtttcatgatccgtacaaagacaaggccagtcactaagcaataaggacctgagatcaagtaaaaaagcaaacaaaaataatagtgccattagttccaaatggataaaacaaacatgatagaccatacgtacaagaaaacgtaaaatggtgcaccgtagagtactgaagccataggcgtcaagccgcaggaatctggtcgcgccatcaagaccggagcgtatgtgaatatgtgaccccactcttgacacatggcctgtcagcctctagccaaagccccgcgattagagcatctctaacggtatagctatctcactctttaaactaaaatttgataattttgaaaaaaaaacgagctccaacagactagctatcccactatcccactttccaagctatatggctggccaaataacctccctggccagccaaaacaggctctccaacggtgggattgtaggacccacgttctctctatctgtatcagcgatggtggacaacggcgacgacaacgacgcggctgccatccatgcgcgcatcctctcctatgcgaggcggcgttgcagccgccgacctccgctcgccgcgccccgcctactccgctcgcagcgacagccggcgccactccctcctacctccgcccccatcccaatgcccgacgagccgccttcaggctgctgccgcgccgacgccgccctctgcgccgcctccgccgcgcgccgccccaccgcgcagctcctcgccgccggcctccgctcgccgcgaccgccggccagccgccgtcctccgctcgccgcgacagccggcgccacaccctcctacctctgctcccatccccgacgccgacgagccgtcttcaggccgcggccgcggccgcgccggccggcgcccggctgggcacggttgtgctgacgccgccctctacgccgcctccaccgcacgctgcccaaccgcagctccccgccgccgtcgccccaaggccaccgccccgccgccatcacgccagaccaccgccccaccaccgcgcgccatgcctagctgcgccgccgcactcagccatcgacccgccgcgcgccacgccgcccggccccagcctccttccaccggcgccccggcctcctcctccccggtgcgccgccctgcaccaacccaccaccaccattcagacgcacaggagcagaggagaggaggaagaacaagaaaggaataaaattagttttggtggggaagaggggaagaaagaggattaagaagaagggagaggctgacatatgggtctcggtgtcatagagtcaaaatagagagggtagatgaagatactgttggagtgaacaattagtttgactagctaaatcggatgaagagttggctatataagtgtttgaagagtttgatctgaaaagactgttggagatgctcttaggctacacaaccggagagcgcgggacaaaagctacaagaacacaggctcgatcggcaatttgccgaaccggccggcaactcggcaaccatacggccagagtggaatccagtcacggagaactgttcgatctaacgtgaaacgagctgggccagcccttgaccgcagcctccctggcccgtgaccgcgcacgcgcgcgtgctcaccacaccacccgtcacccgccccgcactcgcccgtacgtgaaatttttcgcttgccaaagcgctatcgcgccaccggactcgccacgctacgcagcacgtacgcgcggtagcagagcagcagcatccgccgcccgcgtcgccgcgttgctcgtgtcgcgcttggggggcagcatgtgccgcggcctagagattcacgcttggcgtttgcggtttccgctcgtttcttgggcccgtgccgttctcgtcgtgcagctacggccacattgtttaaccggcgcggctgcttcagggagacagagaaaaaattgccccggcaaattgtggcctgtgagtgcgtgcgcctgcttccacgttctcgccatcctgttccccggaaatgacccaatcatttgcggcgcgcatcgggcatactgtactaatgccaatcttcaagacaagacttgcttggatgcagtacaaatacaaggcggccaaattggccttctattagtaattattgtagtataccgacagttccgttttggtataaacctagcacgtccaaggtgtaaaacgttagagccagctagtaaaactggccactggaagagacagagccagccaagcagaaggaagagcaaggaaaagatactactgtactacatgggggacactcgaattactaccaagatacgagccacagtttggcgtcatgtactcatttgtctgctagcttcgcttggccggagtggtccactgatttgcagcgtgtgcatgcaaggctgcggcgctgcgccatgaaaagtgctttcctctccccgcaagctggtccctaacctggacggattatctaccccgccatcgaaatagagaaggctaatcccgattgagttatatctatccccttcgtaagcaaacaaatcgaagataccctccactttgcaaagcatccccgtttccctgcgaggtgtctcctttgcacccattcacacacacgtatatatggactaatcatagtactatccctcccttatttattccaagggggacattgcagtagttggcaccttggcatcctcccggagcaaacatagaaccgtgcagttgtttttacctttgctagatgctatcactaccactctactaccgctcgatcagttaatagttcattcggttattactataccatctctacaggctacagcgttgttccaaactctttaataaggcggcagcagcagaagcaaacagtatggcgaggcgatcgccgttaactttggtccgcactacgctgcatatcactactgaaacgaaggcaacatatggatgcacgcatatgatccgcaacccggcgtcgctcctgcgaacttgcaggcttgcagcggcgcagatagcctgaccagctaagccagagacgcatctgccgccggccgtcgccgcgccgcccgcgcgccggcgagaggcgatcgactcacgctgacgatcactgcccttttggcgggtaccgcactatggaactgagcgggtgggccccacctgccgcaggccccaagggcatagtaggagtctcgtgatgccaaaatttcccgggcgcatcgcggccgtcggtgcgttctcctctgaccgatccggcggtcgcccttaattgcctccccggtgccagcgtttcgtgctcctaggattctttgaccgccacgatgaaacttttttttaataaaaaagagatttgaaaaagaaaagaaaaacaaagtgtgatccccacccaccgccacatcttgagaaattccggttttaatcttgttttgctccgctaatcccgtttccacatgctaattcctctcctccgtgcaaatgtctaatgacgtagagtagctgcttaggctgtatactttggatctgacgacatgtgggacgatcaagcagcagtttgaattactgccaagtttttcatcaagttggttttttcagtttctttgatctcgctcacatgctctacgcagaaagaccatgttttacctcggttattctatccaactccctgcatctgaatctggctgtgagcagtacatgtcgacgggttgactagaattttctatccacctcgagtttactgggagcataaaaatatggagatgcagtcgacttattgcttcgataaaaatatcgagtagtttatgcataatgccttgttatcttcaaacaagcttatcaatcatgttataatttgaaatgtgagtctgtgagttggaatataaagaccgaatatatgacgttatacagttatacaccaatttttgtcgccatgttccattttttttccaagctcaaatgatgtccaatagctcattgataaggttcggaattttcttcttgattgttatatagtacaagggcatcagtaggagtatttagtattttggcgggagagctagcatatcaatttagaacagcattaaccgaaactgtttctgtctcaggccgatgcacatgaataaaaatcctttgccgcactctcgaagctgttgcccacgcctgcgggtcccaccttctctgcgctcccaaggcgtggtccccagttcctgccaaggggtagcgggtaacttttcggtgggtgcggtctcagactggggctcttgtgttttttacctccagtaaataacatttctatttttttttgagaaaattgcatcctgggccacttttattgaccattgttacatgttggactagaggtagaacattcttttcagtttgaaccagaaatctttgcaaaaattttcatattgaactagtcttgttcttcctctagatctccccctcttctcttctcttccctcttttggttcaagctcaccacactttctcaggttccatctacgtgcttgacctacgtcagcgcctgagcttgagtgtgtggtagtctccgtcttaagctcaacacggcacacggcagagctccagcttaagctcaagcacatagccaatgaatcacggtggcacggtgggaaattctaacaccatatattatcactccacacttatactccaccaactagtcaataggtcacattctagcccaagtttatccatggcagcactagcttaattggagctagggcacttaatcaaggttgcatattaaatcttgagcacgaatgaatgtggcaggggcagcgaaggctgactggctgagtagagctcgagcatgactgtactggtgaagcttgagctctatctctactaaaaccaactagccaggtatgtgaatctcaaactgaaggtagagagagtgagaaagcagagctggaagaagaacactaggtcctaagtgtaacatattgtaaaaattactagcctaaagtgaaaataatagcttgttcctagtccaagctgcgaacatagtaaagaaagccagtccaatatgcaattaactattttttttttcaacccaagtccagtagtagtatactgcaatcgaaaggggagaaaagtaaaatcgatcgcaaaacccgtgtcacggtgtcatgtacattcacggaatacgctggcgtgtagtcgtacacgtaccattaccatacatggctgctagaccctacacacgtactgtacgtccagcggttgtactgtacgttgcgctcgtctcactcgcgcgtaacgtatacgatcaggagttctgacatgcgagccccaccgtccagtggcagccacaaatacaaaaaccttcgcagccctcccgtgcggcgtacggtcaccgaaaatcaccgcactgaaaactgcatcggacccctgcttagccgtgcggcccgtgcggcgtcaatggcgtggcgcacggcgtagcctaggctcacatccggtgacctgatcctctccgtctccaactcctatgcttccctctccccgagaaatgcagtttggttaagcacacccaaccaaaataatccgcagttgcgctgcttgcgttgcgcacactggaatagccgctctctcagtataagacgaggagggagcagccggagcgcgagagggagagaagcggcggcttgggagaggctgcgtttgggtgagctgagagatccaatgccaaggccgtgaggtgatcctgtggctcgggagagggggagaggaagagagagcgagagagagaggtgagcgtgcgtggcggcgatggcggatgagtcagggagctgcggcggcggcggcggtggcggagggggatgcgaggcggtgaagaagagggtggaccagagcgtggcgttccatgagctgttcgggttcgcggacccgctcgactggctgctcatggcggccgggagcgccggggcggtggtgcacggcgccgccatgccggtgttcttcctcctcttcggcgagctcatcaatggcttcggcaagaaccagcacagcctccgccggatgaccgacgaggtgtccaaggcacgtatcctgcgtcccatgtcccgctgcttgatagctctcgtctttcctcctgtgccattccgtgctctcgccattgacgcttaatcccgtggccttttgtttgctcgttccagtactcgctctacttcgtctacctgggcctcgtggtgtgcgcctcgtcttaccttggtgggtttcccctgctgctcgcgcgttcttgccggtgatgtcgttaatgtggccggcctcactcaccgcgtgtgtccttgtgtgcagagatcgcttgctggatgtacaccggggagcgccaggtgggcgcgctgcggcggcgatacctggaggccgtgctgcggcaggacgtggggttcttcgacaccgacgcgcgcaccggcgacgtcgtcttcagcgtctccacggacaccctccttgtccaggacgccatcggcgagaaggtgaccagcttcttaaactcgtcgctctcttgggctccggccacctcccgggcgtggccaatgacctgattgggacggttcgtcggtgcaggtcggcaacttcatccactacctatcgacgttcctggcgggtctcgtcgtcgggttcgtctccgcctggcggctcgcgctgctcagcatcgccgtcatcccgggcatcgccttcgccggcgggctgtacgcctacacgctcaccggcctcacgtccaagagccgggactcctacgccaacgccggaatcatagccgagcaggtagcatcactctcatcctactgtttctggatacccattttcattcagggaaaccaagatgcctcacaaggcgtggggaagaggagcagtgggctctagcggtctagccccgtagcccgtgccggtcaaagtgtagcacatgctatcaaaatgatgccattttgtattccttttagcttcttattagatccaatcaaccttttggataagatgatttcttgtttgatgtcgttttgcccttttcttgatgagtgattaacatggtacctcctcaagaacaggaaaaatagaggtttcttgatagataggtctcgttacccatgtacttttttcaatgtcaaccataaatgtaggataaaatgatatctttctcctttattgtgcaaatatgcgagtaattttgatgatcaagtgtgactgttgaacaggcgattgcccaagtcaggacagtgtattcctatgtgggggagtccaaggccctcaactcgtactcggaggcgattcagaacacattgaagctggggtacaaagcagggatggccaagggtcttggcattggctgcacttacggtatcgcctgcatgtcctgggcgctggtgttctggtacgcaggagtgttcatccggaatggccagaccgatggtggaaaggcattcaccgcgattttctctgcaattgtcggcggcctgtgagtactgaactttcattttctgtacaattctgtacctttaatgtttccgataaaaatatatgattgatatgtgtatgtggatctgatgatttcaggagtttgggacaatcgttctcgaatctaggcgctttcagtaaaggaaagattgccggatacaagctgttggaggtgataaggcagaggccgacaattgttcaggacccagcagatggaaggtgcctggatgaagtccatggcaacatagagtttaaggaagtggcctttagttatccgtcccgtccggatgtcatgatattccgtgacttttccctcttctttcctgccggtaaaactgcagctgttgttggaggtagtgggtctggaaagagtacagttgtggctctgattgaaagattttacgatcctaatcagggtaagcagatgaaatccacacggcacacctgatgttgattgttatcccaaccatttggttaattgctgattgctattttttgcaggtcaagttttgctggacaatgtggacatcaagacactacaattgaagtggctgagagatcagattggtttggtgaatcaagaacctgcactctttgctaccaccattcttgaaaatattctttacggcaagcctgatgccacaatggctgaggttgaggctgcggctacatctgccaatgcccatagcttcattgctcttcttcctaatggctataacactcaggtgggttctttgtctgttggtatgccaatgatatttgtactacttaaagaccgatattttggttagcagtacaattttcttctggtttggctaactattgcattactatattgatcttgcaactttgcatatacaaatttgctccatccaatgattaatccactatatttataacacaggtcggggagagaggacttcaactctctggcggtcagaagcaacgtattgccattgctcgtgcaatgctaaagaacccgaagatccttctcttagatgaggcgactagtgcacttgatgctggttcggagaatattgttcaagaagcccttgaccgcctgatggtcggtaggacaactgtcgtggtcgcgcataggctgtcaactatacggtgcgttgacatgattgctgtgatccagcaagggcaggttgttgagaccggtacccatgacgagctccttgcgaaaggaagctcaggagcttatgctgctctcattagattccaggagatggccagaaaccgtgacttccgtggcccatccacccgcaagtcccggtcatcccgcttgagcaattcgctgtccactcggtcattgagccttaggtcggggagcttgaggaacttgagctactcatacagcactggtgcagatggccgtattgaaatggtttccaatgccgacaatgaccggaagtacccagcacctaagggttattttttcaaactccttaagctaaatgcacccgagtggccctataccatactgggagccatcgggtccatcctatctggcttcatcggccctacatttgctattgtgatgagcaacatgattgaagtgttctatttccgggacccgaatgcaatggagaggaagactagggagtatgtgtttatctacattggaactgggttatatgcggttgtcgcgtacctcgttcaacattacttcttcagcatcatgggcgaaaatctgaccaccagggtgcggaggatgatgcttgctggtatgaatcgataggttgctcttaaactgttcaaatttcaccagttgcattgtttgatcagagactattttcagctatcttgaggaatgatgtggggtggtttgatcaagaggagaacaattcaagcctcgtggcggcacgcctttccacagacgcagccgatgtgaagtcggccatagcggaacggatatcagtcatcctgcagaacatgacctcacttctcgtgtccttcgttgtgggcttcatcatcgaatggcgggtggccgtcctcattcttgtcaccttccctctccttgtccttgccaactttgcccaggtaaaacaactctcaactcacaatattttcgttaacatggaggtgtcattctattatgtgccttttacgttctaacctggattagacaacgtgctaggaatctttggtggaataggagaattaccctttcacattaaaccgaatagtactttgcacgacgaactcactgagctcactgcaccgttgcgacgccgttttcggcgcagacaaccgtttgctgctcaattactccctccggagataggatgccagattaaatccatcagcattgctatggtaggatccgtggcccatgccactgccactgcttctgccgccgcagctgccataaattactgtgcgcggcatgtgcaaccctgccaagatgctccttggcctcctctctgcaaaggcaaagcggccgtgctaatcatagaactcggcgttaacaacggcaagtaaagctccaggacgtgcgctatttatcgcaacagatgcttgcttcctccgttcctctgatgcctaatggctttcgtgtttctgagactgggaggaagcaaagcaatagcatggccaactgccccaatctgtcgtctttctttcctgctgctcattagctgcccccagtggtagggttgtttttggtttcttgccgctcgtccccctggtggtcccgttgttcgcgacactgtctgcattgcacggccgccttgtgcacgggaatctggggcttcgcaatccgcagtgccgcacatggcgatcttgcagttgcagggcaggcaggcagtgtcgtgttgccgtggtcgcatggcgtggcgtacgttccgcgaggacagtgtcgccccagaatgccatgccaagccatatattttttgatcgtgttccagctgcattgcagagcccctcatgattccttgcgtgcaatgatgtccctctggcgattcgtaaaggattgcgtggtgcatgaacgaaccccattctctctgtcacttggccatgggctgcaagcctgcaaggtcttccgaaaactgtaactgccatcactggcgactttaactcgttgcaataggtcacgtgtatttacgctttgcactgtgaaatgatgggtacgtgaggtaggagtctgtctctctgtgcatgacgaacgagactggccgatactgtgatgactgatgactgcttgtgtggttgcagcaactgtccatgaagggcttcgccggcgacacggccaaggcgcacgccaagacgagcatgatcgccggggagggcgtcagcaacatccgcaccgtggctgcgttcaacgcgcaggacaaggtcctgtccctcttctgcaccgagctgcgcgtcccgcagatgcacagcctccgccggagccagatctccggcgcgctcttcggcctgtcgcagctgtcgctgtacgcctccgaggcgctcatcctctggtacggcgcgcacctcgtccgacaccacgtgtccaccttctccaaggtcatcaaggtcttcgtcgtgctcgtcatcacggcgaacaccgtcgccgagaccgtcagcctcgctccggagatcgtgcgtggcggcgagtccatccggtccgtctttgccatcctcaactacaggacgcgcattgacccggatgaaccggaaaccgagcccgtcgagtccgtccgtggcgacatcgacttccggcacgtcgacttcgcctacccgtcgcgccctgacgtcatggtcttcaaggatttcagcctcaggatccgagctgggcagagtcaggcgctcgttggagcgagcgggtcagggaagagcaccgtcatcgctctcatcgagcgtttctacgaccctctcgccgggaaggtcatgatcgacggcaaggacatccggcggctgaacgtgaggtcgctgcgtctcaagatcggcctggtgcagcaggagcccgtgctgttcgccaccagcatctttgagaacatcgcctacggcaaggacggcgcgacggaggaggaggtgatcgaggccgccaaggtggccaacatgcacggcttcgtcagcgcgctcccggagggctacaagacccccgtcggcgagcgcggggtgcagctctcgggcgggcagaagcagcggatcgccatcgcgcgcgccgtgctcaaggaccccgccgtgctcctcctcgacgaggcgacgagcgcgctggacgcggagtccgagtgcgtgctgcaggaggcgctcgagcggatcatgaagggccggaccgcggtgctggtggcgcaccggctgtcgaccatccgcggcgtcgactcgatcgccgtggtgcaggacgggcgcgtcgtcgagcagggcagccacggcgagctcgtgtcgcggcccgacggcgcctactcgcggctgctgcagctgcagctacaccacggctgatcgtatcagttcagggcctaggttccgggtgtacagaagtgggcgaggccagtaatcgtcatggtgctgtgcgggtggtcagatgatgtgcttgggtacaactgttttcttcttcctgtaaccgatcaggattatgccggatgtgttttggcactaatggcggctctggcaattttagatgttcacaagaatcccggtttttttcccatgtttgatttcctcgccactacaaactgacgagaattggcaacaacgctttgcgtcgatccgtccacggatcagagacgaactacactagatgaagctaaaacatgaaatcaagaaggataagcttcacctccaaatacggggcagttgaggaggagcggcaccgaggcctcgcgccctcgccgatgattgggaccctgtcagatctgcggccaccggtcgccggctcgccgccgccatctctctctgatctccaattgagcaaggcaagttcaaggcttcgagaggctgtgggcccgcggccgaggatgaggacgtgaggtgatacctgggccttcatagatagtacagcccatatgatgtggcctgcacctgtaattccatgactagacaatcctgggcaaaatcttttaaaaagggaataagtccacattgactcccttaaaagtgacccgaatctaatacatgaccctcaaccgcaaaactgaataggacgactcaccgaactattgaaaccaatgcaatttaactccctatgaagggtcgttttgaccaatatatacacacttgacacccgcccagagaccactccttcacaagaacattggattttcacaagggtgttgtaccaagatcttgggacgtcaatttatattcctatttagttgatttccatcgttgcattgccctggtataaatgatgcatattatatcctagttgattgtagtgtatcatatataaatacacaacgcacccagcataacataattattggtgattagtactccctccattccaaaatataaggcacaaccaccttagacccaaagaccaagaaataattattatcacctctttgtttgaataatcccaactaatactatacatgcacccaatagaattaagcatcttgatttaaaaattaataatctaggtgagagaatttgctattaattgtcatgcatacatgcacgctttatattatgaaacacctttaaaaagtagttgcgccctatattttgaaacggagggagtaaatgcattgtatatttataagtaataattttacatattatttattaatggcatttaacttccttaaattggccttattgttttgatgtttcctttatactattttccattgtcttcccaccttcctgtttaccaataaataattcttgtatgttgatttactaaaaaagctataggaagttgtgaattttaaattatgaatcatatatgctatatgctcaaaatgattatctaaagagaccgcacttatttactatgaatattcacatttgacaactcacatactttttaaagaaatccatccaaatgattaagtagcttaacaaaatagaggattagaaggggaacgattttcactattacgtgagaagagaacggaagaggagagaagagtttggatctgagagaattgaggaaaaatgaacctatcttgctttgcccatctgaaaattcaggacttgaggacaactacggtgggcaccagcactggtgcggcgacacgatggaggaaggcgcgagctgctggtggagttggcggtggattagagcagcagtggtggtagatgacaacgatggcattggtggcgacggcggatttgggcaagcgatagcaccggtggtggaagtggatgacgatggctgatggatttgggcgagaaatagatagcgatggtgctgatggtgaatctaaccgagcgatggagatatcgttagctggggattaattgacgtgcatgtttaggagtagtgaccttctccttttttactgccctatgtttggatgggatactaaatggtcacctttcttgagtatacaaaagttacctcttcatcttctctaaggtaacctctttacttttttagagaattcaggggccagctaatatacttgattttcttccctcgtagagcattcacgggatatagtacactgtatctccttggacacgtggcagtttttggagagggctttgcctaatttctaggacgccacgcgacccaacaggatgcaagatcttagtccctgaattaggtctttaagatttccttgttagaaaagagcctgacaatggtcaattgcaaaacaaagataacaatgcattgaccaggccaaagaccagaaatagacactgctcttctgtacgtcaaatgataaccacagaacacgatagaccacaacaacggtcaaaccatccacgcccgtacgtgcgtagccaaactgcatgcacggccattctcgagtcgaccaccctataaattgagcgtccctgcggttccactccaaccttgcgggccaagatggcgcagaagtttctcctcgggggcgtgggcgcgatcctcgtcgtcgcggtcgtcgtcggcgtggtcgccaccgtcacccgctccggcaacaaggccggggacaacttcaccgtcccgggggaggccaacctcgccacctccggcaagtccgtcgagtccctgtgcgcgcccacgctgtacaaggagtcgtgcgagaagacgctcaccacggccaccagtggcaccgagaaccccaaggaggtgttctctaccgtcgccaagtcggcgctcgagtcgatcaagtcggcggtggagaagtcgaaggcgatcggcgaagccaagacgagcgacagcatgacggagagcgcgcgcgaggactgcaaggccctcctggaggactccgtggacgacctcaggggcatggtcgagatggccggcggcgacgtcaaggtgctgttcagccgctccgacgacctcgagcactggctcaccggcgtcatgacattcatggacacctgcgccgacgggttcgccgacgagaagctcaaggccgacatgcacagtgtgctgcgcaacgccagcgagctcagcagcaacgcgctcgccatcaccaacaccctcggcgccatcttcaagaagctcgacctcgacatgttcaagggtgagaatcccattcaccggagcctcatcgcggagcaggaaacggtgggcggcttcccgtcgtggatgaaggcgcccgacaggaagctgctcgcctccggcgaccgcaaccggccgcagcccaacgcggtggtggcccaggacggcagcggccagttcaagaccatccaggaggccgtgaacagcatgcccaagggccaccagggccggtacgtcatctacgtgaaggccggcctgtacgacgagatcgtcatggtccccaaggacaaggtgaacatcttcatgtacggcgacgggcccaagcgcagccgcgtcaccggccgcaagagcttcgccgacggcatcaccaccatgaagaccgccaccttctccgtcgaggcggccgggttcatctgcaagaacatggggttccacaacaccgccggcgcggagcggcaccaggcggtggcgctgcgcatcaacggcgacctcggggccttctacaactgccggttcgacgcgttccaggacaccctgtacgtgcacgcccggcgccagttcttccgcaactgcgtcatctccggcaccatcgacttcatcttcggcaactccgccgccgtcttccagaactgcctcatcatcacccgccgccccatggacaaccagcagaactcggtgacggcgcacggccgcaccgaccccaacatgaagtccggcctcgtcatccagaactgccgcctcgtgcccgaccagaagctcttcccggacaggttcaagatcccctcctacctcggccgcccatggaaggagtactcccgcctcgtcatcatggagagcaccatcgccgacttcatcaagccggagggctacatgccatggaacggcgaattcgcgctcaacacgctctactacgccgagttcaacaaccgcggccccggcgccggcaccagcaagcgcgtcaactggaaggggttccgcgtcatcggccagaaggaggccgagcagttcaccgccgggccgttcgtcgacggcgggacctggctcaagttcaccggcacgccgcacttcctcggcttcaaggtctaaagaccctagccccctacatggcgtgaagggtgggatcgatgcatggacgtgtgcatgggagatttgcacgagaggatccgaggtgacattcatgcatgcgtacgttcgtgtgtgtaccaaatatgtgtgatggctgagacgtgcaggacacctgatcagggtgggcgtgctgcatgcgctggggggcagggctaacatttgtgcttttaactctttccggtttcttttttctcgaacagattttcttggagaatttcttctgtataagtatatgttgcaaaacgattgttgtacaatggcttggttggaaaagcgctgttcaaatgtcccgtttgttgctggcaatcttcacccatccgttcatcagaaacagtcaaaactcaaaacaagcttccaaagcaggctagctagcagttagcatttacacctcacccaagtggctaagtatcatgtgctctggcattcaactatcctctaatgcgtgacgacgccctggatgcaagaaaattacaaacggctatgaacaccagtagaaatttcggccaactcacacgacaagtgtcacacttcccaggatgcatcatctccttgcaccgtcttgcatcctcctacaaaaggaggggcctccacctcagtgtccctcaccgtgtgctcagtgttcatcttctccaaaacttcaatcaggttgtccctctgatctcctgaagaagaatggattcaatccagaggcaggactcctttgatgacttgattaacctcgccgacgatgtggttgtggaggcgcctactctctccagcgaggagatggaccgtgcaagggtatatctatgctctgttttagtatgtactacctgtaatttgtagtttttgtgccgtgcttctaggttcagatttagcatctacatatggtttgtgtttgttccaccatgtcgatttcgcgccttttttcaaacaagttttcgcgccttttctttgtttgaaccctttttttttaaaaaaaaaatgaggcacaatcattttgcgtttttgtgctcgttcagtttctagtgcgatagcacatagcgtatattttttttctactcaagttagattagttgaagtaatgttctttcactttggaacggatgatttttccatactgacgctggaattgaactgttcatatgagaatcctataatattattgtgtgattcctatgctcgaaagggaaactaatatgtataatagtagtgttcttaaccattatatagttccaatcaataggtacttcaattttacacaacatatatggcaacatagcaaatctgaataaaggatacagtaagcagatgccacaaacaactcaaagttacatgggccccaaattttatcacaatctaaatatggtgtgggatttccaagttggtactttgtgatcaataatagagggattttgccatccttgaagagataccaaaagatactccacttaagattgaaaataagctggaccaaattaactgaaaagaagtgaatcatatacgaggatactttccacattgagctttaggccttgttctcctagtagttttttctttaccgcgttttcagcagcagtattgattgcttggtatcttctgaagtgcacttaccacagtttgacccccccatccactgcagagggaggctctggagatactgagaaacaactcccctgaagaggctttcaggattttcacccaggtaataagctgtaatcactcctacacatccgttacttgcagattccagggagcactgtcggcacagaaattctctcgtaacatatcatagcagcacagcttctgactgctacctatctgatgttgcactgtaccagggtttaatagggcaggtggttcagagccctgtggtgggcaatgctactactcctcctactaccaatcaggccgtgaccgtgagcgtccctcccaaggccggcgacggcgagcccaagaccgcaccccgtcctccgaacaactgaccgagatcgactcgcggccggtcgggtcgagaagcctacctgctcctgcggtgcgtgcgccgtccagctcctctacccgctctgtgcctgagaataatcgtgtctagtgtgctgaacaccagccgtttcctttagagaagttaaaccatgtttgcttgttttggccgcccgtattccggtctcgtgttcgtcgtgcctctcatctgcctcctgcgtatgtgcggtcacggagataggtgtacgttgcgacattgcttcgtgcgttgtgcggagagttcacgcgcggtgcggcgcggcggacggaccacgtacgcgtgcaacgcctgcgcctaggcgtccggacgtgagcggcgcagcggcggtagcggaggaaggcctcggcgcccgcttggctcgtcgcgtgacgcgcgtttttcttttctttcttcggcttcggttttccgttcgccggttgccgatcaaccgcgcgctgccaaattcgtgacgaggctgggtctgttgccgccttgtccctgtctgagtgacggcctcttcatcgacaattttggccgatcgaccgaagtctgggaggttgagaaggtaagagcagtcatcacaattgttctcacgtttttaagtccacataaacttttgtacggaatttctccacttcatttaccgatctcctagaattttctcggaattctagcgtcgttttgatcgtgaaacggatgggatcaaggaatagtgcggcatacccccggaacggtactgccgctagcgtgccgcatcccctcatccgtcgtgatttgggaagaattcggggttacatgggccggttaatggcccaataacgtacagacattgggagaggagccgcgcgagaaggctattgcgcggtcagtcgcgcgcccccctttccccacgcgcggactggacacgtgtcgcgcgcggagagagggcggcggacgcgccaggcggcagagcgagttttccgttttttttcgtgtttttcgtttctgttcggtttgctttttttttttttagtttttacggtactgttcagtttggttttccttttttttcgttttctcttctgttttctttcggttttttttaaagatgtatgaatacaaagtttgtatttgtatgtatatcaagctagtttatattcgtatgtatgtaaagtttgtatacgcgtatacaaagattatatacgcgtatgcaaactttgtatacgtgttgtaatttcttttttatatattttttaatacatatatatatataaagtttgtatacatcgtatacaaagtttatatatatcctacataaactttgtatatattgtatataaactttgtatatgtgtaatattttttatgcattaaaaatatattccaaaatatatacatacacgtatatacatatgtatatacatgtgtatatgtaatatatacataagtatagtattagtaggtacatataagagactagaggggggacgactgaaccgcgcgccccgcgcggtcaaagttatagttgggcttgggccggtggtatcaacgagtcgatcccctcacctcgatcgtgtcgcccgccgcttgatcgatcgcgcggtgcaagagcgttttttatgctcctctgtgacgacgacgggcgcagcgcggtagcgtcatgcacgcctacgcagctagtacgcttttgtcctggccctccctgcgcgcgtgcgtggtcatggagttagatagatgtagtatatcacagtatatgtcacttttttttttccatgtcactatggcgcagcccgcaatgtggaggtgtccatactccatcgtccttgcttggccgtttgccggtgccaccaccgcgcgcagccaaactttctgatgtgaggtattggttgccgcgttgtcctctgtctctacacggacacaatgtacaagcagagtcgagtcgactgtgcgattacacagacaaacggactgcgtgttcgatctagccatcgtactaacaaaaagttataacttgtgtttttttgttccaaaaaaaaagttacattttcgtcatgatttctatcataattttttttcgtagtgcttagaatagtttcccgatgtgggatactgcagcacaccctgaaacggtaatgccgttgatgtgctgaggcttttgttcgcaaaagatttctcgtttttatttttcacatataccaggcctaaaatttaggttaattggatccataccattataaatgtgataaatcagaaaaatgtcactacctttcatgaaatcgggtagatgccattgtaattttttaaaattacaaccatgccacaacttcacgatttccgtcctccctgtcacatttttcgtcgtctccatcttcatcttcttgtcgtcttcgtctcgacagacaaaccagcgccggaggaggagggcacggcggcggatggggaaggggtggggcaggacaggaggagagctcctcggcgaggatggcggagagcgagacgtgcattccaccgctcatcggtgcgggggtgttcttgtcgtcttcgtctcaacggacaaactggcggcgagcgacgagaggacagggagaaggcgaggcggcgctggcgagcggtgaaaggatggggagaaggtgaggcggccatggcatcttcttccgccatcgtcgatgagctcttccaccagatctgcgcccctccacgaccatgctcgccggcgacggccacacctgctcccgtgcccctccacaacctccctgcgaccatcctcgccgacagccgcctcgtcctctcgccgctcgccaacgcctcctcgtcctcgccgctcgccctctccccgtcctctcgtctcctcgcgcttgtcggcgccgcctcgccttctccccgtgccaacatgagagaggaggacgaaaatagtgatgggagtggcatggttctaattttaaaagttttcattgacacccagctaataacgcgaatagtagttttatttttctgatttgtcacatttgcaatggcatgtatccaattaatcctaaaaattatgcacgtaattcattcactctctacgaataccacgaatggatttctgataatgtgacgtgtacatatctgctcatgaacatgatagcttgccgcaaacataattgttcatggagcgcatgcttgagaacgaccccattcttcaattatttcaacaacacgccaataattattcgcacaatcttgaaaaatggtatactacaaccacacgatcatcctgactgatcagctagagagctagaaggagaacttgaaggccatgtcgtgcctgtacacctggccgggcctgaccgtcatggaggggaactccgggtggttcacggcgtccacgtacccctgcgtctccaggcagaacccgccgtactgctggtacaccttgccgcccttgcccttgatgttgttcagccagttgccggtgtacagctgcatggccggctggttcgcccacagctccagcgcgcggcccgacgcgccgtcccgcgccgcggccaccttccgcatgccctcgccgtcgatcacgtagttgatgtcgtacccggcgatgcgcccgcccatcacctgccggatgcgcgcgccgatcggggtggggtgccggaagtcgtagggcgtgccggcgacgggcgcgacgacgcccgacgacgggaggagctcctcgtccagcggggtgtaccgcgacgccgacagctgcagcgtgtgccccagcacgtcgccgcggccctgcccgccgaggttccagtacgtgtgctgcaggaagttcaccggcgtcgccttgttcagcgccgtcgcgttcatgcgcagcgccagcacgtacgggctcgacagctggtacgtcacgtacgcgtccaggtccccggggaaacctgatcgatagccattcacaaattaatttacgactccaaatttcataaaagagaaactcgatctttcatctggaatttcgttgcacaccttgctctccgtcgaagctgcggtagtacaaggtgatgtacggcgagtcgccgccgccgacgtactccttcaccgtccatatgactttgctgaaccctctgtgtccacctgaatgtgagttcagtgaatttaataatctgttggccaggctgatctgaggtctgaaggcatgcgtccatgcaccaatgcataccgtgaatcgcgttcctgccgtcgttgatgtacgtgtgatacaccttcccgtcgagaacgaaccgccccctggctatcctctgcccgacccgtccggtaaccggcccgaagtaattagtgtcgttctggttggcatgagcaagaagatcattacagataaaaacaacttgaattattttgccatattttcgacagtgataacgcaaatgttaatgtctattgattcagaccgttcttcggtatggtaaacaaaagctgcttgtgtgtttgaatgatattccagatgatgagaagaaaatggataagggtagaacggaacagtgatttggagatgcggaccatcgttttctggcaagctcaaggtttttagataagcattctgaaatttttgctggctggctgaacctctgaagattagctatttattttttgcttagactcgattctattgaagggatgatactctgaccacgtcatagttggactaagtgacagtgtgaaacatatggaaaatgacaataataaaagggatttacatcagctttgcatgttgacagatgacaagggaagagtactgccaaggcgatccccccggtcaaacgattgttttcagaggaaattacgtcatatggtatttgttgttttgcctgtgctgatgagcattgtttatcttctagtagtaacttggtcacttgcagacaaagaatcataatttattgcatactgtttgatacggagtatgtttgtcagggtttgttccaatcgtatttcatttgtgatttaaaattttctaaagagtaaatttcacaaaactacatatactatgatcaaactatcacaaaactatatatttaactcggtgtatcacaaaactacacattcaacaccaaatttatcacaaaacaacatatttaaaatgaactattataaaactacatgttaagtaactaaattattataaaactacagttttagaactaatttagtcacagaacaataatatttatagctccagcataataatggtgctagggatttaaactctaaaagctgtagtttcgtgacaacttcaatattaaatatgtagttttgtgatacttaaccttaaatctatagttttgtgataaatatggtgctaaatctgtagttttgtggtataacgccttaaatctatagttttacgatagtttaatcaaaatatttgtagttttgtgaaaattactcttttcaaaattccaccatctttttgtcagttatacatcctttttacacctttctcatcactgtatctggaataagttccaaatgagtgcagggcaagcaatttcttgatcagacaagtacttttatcttgtgtatagtgtacaggggaaaaaaaaggaaatttaaagaatataagattcattcatccattcattaatagctgaggccttaactgtcgagaacaagtttgggtttcaatggactatgagaagaaggcaaaagaagaagctgaatgatattgccatttcctgcccaaaacattaaattttggaaggggtttggtgttcttaccacgtactcagcaatggtgtctaggccaagcacaacatcagccaaattccctgcagaaacacaagcactgcaaattcagaccaacacacgcaagtacacaaacgccataaagaaaaaaagctcaacagaggggacatgacggtacctttggaatcagggaggacgaccgacatcatggttgctccccagttggtgatcttcacggagaagtcccccttcctgagcacgtactcgccgaccgtcttcctcgcaccggcgccgccggcgagcgcggaggccaccaccaccaccacaaagcacaggaacgcgagagacaaccgagctccagccattgtgagcaaagcgattcgtcttgggcaactcacaggacgagaggagagggatgcatgcaactcattctcgatggtctcctgatatagatgtagatataggcggataccggccgcgatctcggacgagtttgttcgaggcgggaccggaccagcctggttacggacagacacctgcgctgcgcgcgtgctagcgtgtgatctttttgattgatctgatcctttcatccgtttgtgtcctcaagtcgcagcgaaacggagccaggtacacggtccgcttgcattggtcgcaggttgtgcatgctcgatcggccggaatccggtggtccgcccgcgagcgagtgggatgacaatttgtcattggggaagttggcaagtgtgctagtacgtgcgtggccactcttgaaactgtgcacagctcttcaaaaagaaaggaaaaaaagaaactgaaacgggccaatgataagattttgaacttgtcagttgtcacccacgtgcgccgtaggatgcctgccgccgccgcatcatgcaaaactatctcccacaagtcagaactcagaaccatcctttggacgtgttcttaataaacggtttgaaggacttgctacaagcagctgaaattttggaaaatgtcaattgatttttggacggataggatggctttaagattcgtgccaaatctctccaaatctacctttctctcttctttctcgtgccgccgccaccacattcctcttcccctttctcattgtctctcattctcttgttccctatggcatgtccacatgtgtattgatttaccttatgtttttgtgatatgtttccactttgtacacatgttgtgttgatcgttgtgttaggcttcatgttattttcattttttcctgctatgaggtgcttgtgagagcgactcacaacgacctggaagttccgagtggctgtcttggcttggttgagaaagctgctaggaagtttcgccctattaaatttaaccgttgcgatcggagaattttaagaaacacctattcgaccactcccgccaagtgacatctatgggctttcaacgctcgcctcaatagatctaacgcccgtcaacatactgtccatgcagttttggtgacacctcgtcgcccgcctttgtgttccgtccacaatcaggttcccctccaccccggccatccctctaaaaccgcccttacccccccccacccccacccccgcattgcctcgaactttgaaaacctagtacgtcggttctctgctggagttcaaaggtcaccaccatcgaggctcgccatcactgttgctggtaaatccatcttttacctcccattcctcttctcccacctcccccggtctaaaaggtggaagacgataggcatgccattgcatcttaatccacaaaaaatcaacgattgtctgaaatttggggaaattttagtgcatagatgaatagcaaatgtgcagtttgaatagttaataattgaagccttccaggatgctagtaaattatagctcaataacgttcttttttctaaacaacatggtaaaataaaaccatgcaaaaggtcgaaagaaaggaaaataagtgcataatcaacctcattattgattcatccgaacacaggacgtaagtccacgacttctataaatagaaatactacaaaacggtatattgttccaaacaaaatagctgacgttattatgatgttagcatggtatagtacttatgaaatatcatgcctggttgttgacagaaaacacgtggcctgggagatctgcttaactccagtgcaggtcaaagctcgccttcgggtgtgttagcatgccagttgatttgatcatgtaatcaacaagaaataaaagcaaagaaatcgcggttaaatctataaatgatagccgatcggccagatgccgatgacatatcatttatctttgagccgatgtcatctgtgtatcgatcggcagtcgtgaataagtaagaaagaactaaatctactcgatcggctgtagatattaacgatatatactccttatatcgatatatatttaaatcaagtgattgggatagatcggtcgccatgccgagacagtataaatcacttagattgaaacatatatcaataacaagactatatatctttatagcatagccgatcaaatagatctagcatgtatcggctaatactccgatacttccctatatcaggatattaaagcaggtataatatatcgaacagaggcctaacatgcttagatatagcaatatcttgatataaagggcagatttaacatattaatgaagcatatagaacaaatatagttaaattagatacgatcggctgaaactccgatactattctaatcggcaactagaaggtaggctagagatcgatattctaagcacgacttaatatatcaaactcaactgatacatcattaagtatgaaaagaagaacgacatctagacaatcaagccgctagaagtttcatagaatggtggatatcttatataatctagatcaacgtcaaaatctaacctaatcagttgccctctgctaacagatgttagccgataataggttagatggtgatattgctagagattatgtaagatatatgataactcgacgaattacataaataagattagagtatcataaagatggaagcactaatcctaagaacacaatccgtcataacaagttttacctcttgttgaagatcgaaaccgatgcagctcaacccgaaagcaagaactcgtcgaaacaaaactaaagcaaaagggtggcgatgcgccgaaattgtattgaacgtgtgtgttgtaaattacatagggctcggggtctatttatacccgagaattacaagacatgcccataccggacacgactgttatctctaacaaactctaagataccataagtctttgcggcaaacttttgccctaaacatatctctaaggaaattacataaaacatcctaattaatagatacaattgccttctcaggactctatccatgcgtggcaaccatcttgaagcacatcttctcaacccgatgttgtacaccaagtcgtattgttggaatcggctgtatcggcttatctagcccgactcagacccagccgatactaatcatagccgatccagactccagccgattcttgctctgtttccgaactcgatctccgcctctgactttgctttgatccaatcttctttcctgacacagatgttaccaaatttggttgttaacactggtatctacggttccaaatctggtacctacgtgagatcgagcatttgtttggatggttagcgacgccggtgggcacattgcccacgagcgttcgaaccccaagttcgacgctcgtgctcacccgggttttttccccctcttttcccgggactgactttggttggtcccggttaggtataatggtacacacgcgcgtgcgcattcagtggttgcatatttcccgtgcactgaggcctagtgccttcaatctcaatcctagtatgtgttagggacgcgcacacgtgtgtatgcgtgtgttgtggtgtgtgttcgtgtgtgtcctgatttgtaccctcccaaaaaaaaatctggtacctacgttaccatgctaaaacatcgatgtcattatgatatgtaagtatcaaagtctgatatctataagtattgtgtctggtataacggttcatatctgataccaataataccatatctgttatctacgataccatactaacattgtgttgaagtcagcacacataacctattacgttggaatggtaagtagctagccctcttccgtaaaactttgggtatgagagaagtggctctcgtatggaaaaacttttataagtccgcaactaacccaccacattatggtgcaagccggaagaatcccgggcttttctcttgccgcaacttctctatgagactgaactggctagtgaaaaattctcgtcttttcttcccccatgcgtcttattgcaaatcaacgcatatcatattattgcaccgaccgacaccgacaatgtcacaacttacagcagatgaagcgatcgaccaatgaccacatatgatccatgtatagtcacctaaactagaacgagaacttgtacaccatctcgtgcttgtacacctgtccgggccttacgatcaccgacgggaa

SEQ ID NO: 8339 - DNA, 65810 bp, Oryza sativa
  unsure (1)..(65810): unsure at all n locations
ccatactaacattgtgttgaagtcagcacacataacctattacgttggaatggtaagtagctagccctcttccgtaaaactttgggtatgagagaagtggctctcgtatggaaaaacttttataagtccgcaactaacccaccacattatggtgcaagccggaagaatcccgggcttttctcttgccgcaacttctctatgagactgaactggctagtgaaaaattctcgtcttttcttcccccatgcgtcttattgcaaatcaacgcatatcatattattgcaccgaccgacaccgacaatgtcacaacttacagcagatgaagcgatcgaccaatgaccacatatgatccatgtatagtcacctaaactagaacgagaacttgtacaccatctcgtgcttgtacacctgtccgggcctcacgatcaccgacgggaagttggggtggttcacggcgtcggggaacccctgcgtctccaggcacagcgcgccgtactgcccgtacgccttcccgcccttccccttcacgtcggccgtgaggaagttgccggtgtagaactgcaccccgggctggttcgcccacagctccagcgaccgcccggacttgccgtcccggacgacggccacccgccgcagcgcgtgcgcgtgcgcgtcgacgtcgtcaccgccgtccacggcgtagttggtgtcgaagccgtagatggtggcgcccgtcttgctgaggccgcccgtcaccaggtggacgcgcgcgcccacgggcgtcggcgcgcggaggtcgtagggcgtgccggtgacgggcgcgacctggcccgtcgggatgagctcggcgtccacgggggtgtaccgcgacgcgaacagctgcaccgtgttaccccggatgtcgccgctgcccgtgccaccgaggttccagtacgagtgctgcgccaggttcaccggcgtcgccttgcccgccgccgtcgcgttcatgtgcacgctcagcacgtacgggccggacagctggtacgtcacgtacacgtctagggcgcctgggaatcctgttcgacagaggcataattttgaccgttaggccctgtttggcacagctccagctcctaactccaccttacctagagctggagttatgccaaacggttcggattcatccaaaagaggaacggagcagtgcagatcgctccaaaaaattacactagcgtggtggagcggggaaaacacaactccacagctccactcccagcctgattacagcgctacccattacttttcgcaaaaattataagcagaatgccaccgcccctaccccttcgttccccaccgcaccgagccagactagcgcacatcgcgtttctcctcgaggccgcgaagagagaagggggagggaggactgaggcagcggcggcggtagcagtgaaggcacacggcgcatggtggcggtggtggcggctgcctcctctcgcacagcaagggcgccgggcggaggtctgggcggcgctgggcggaggtcagggcagcgcacggcggttggatttggcgctgagacctcatggcggcggcacttggcggcgggagcggctccccacagcgaggaggcgcacggcaggagctgggcgacgccggtggcatagcagatctggtgcaaggagcaaggtaaccctaaaccctggactagctccctcaaaccctagactctctctcccccaaatttctcccgatctgtgtgtattgcttgattttagtttgtatactttaaccatattctcactatacttagatttctagaaagaattggtcagaaaaatttatatgtatgtggcaaaatatgtatttggtagcattacagttgtttgtcatttgtagataacattgcaactatatttattttttttcgggggtaggaaatgactgtataagaattcaatggtatgattcatatagtgtatgaatgagagttttattttttgggtttctaaaccaggcagtaagtatttcaaaattatgtgttaaattggaaaacaaatgtgccaaaatagttgttctaaatcattttacaatgacattgtgcaggacataccaggctgcaccaaatttattaagactggcttgcaaaatgaagagctacttgagaagatgtttgaagatatccgcaataccggtgctaaccattggtctttggggcaaggcaccataccaacagccatggatgcatttcgtgattacctagccggtcgtattgcaggttgatggacatatatcgtattttgtgttgttttgcggtcttatgctctatctttcgatgataatggtactagttattattactaaatatatgtcatgcaacaactttaatttttactttattttggagtaccaatcatataatgattgattgaatgtgttcccccctccctggcaatgaatggcagtgggtagctagctcgtttcttgttgtcttttaaaaacaaccaagacaaacaagggccgggcagggcagtcagtcccaatcaatcgatggtcaaaatggaaaagaaattaataatcaccgtgctgaaattattaaggaaatgaaaaagaaattaataatcaccgtgctgaacttattaaggaaatgaaaaataaattaatattcaccgtgctgaacttattaaggaaaagtatctattattaatcctaagtcagcaatgaaaaaacacaagggtagtattgtctatctaccctctatcctctctttcaggatttttggagctgagcaagcaagttagccaaacactttcagaccacctacagctcctagtggagctagctcccactggagttggagtttggagttaggagttgagagctgtagctctaccaaacagggccttagtttgactcagtaaatactacggaaatggattaaaggggtttcaacaaaattgcatttcaggtcttttgaagttatcttgtttgatccaatccaaatccaaggtcaagttcattgaattgtcatgtaaaaaagtcaaaagcatattgcatgaaagtgcaaagatagttcctctattttaaaatatagcgatatctaaataagacacgatcttatactgcgaatttggataatatgttcgtgcttgtaaaaattatattgtgtctaatccaatactaaattgttgtattttggaaaggtgaaagtagatgatacttctgctgatttgcattgaccataccttgttctccgtcaaagctatggtagtacagtgtgatgtatggtgcgtcacctccaccaacatgctccttcactgtccatgtaacattgctgaaacccctgtgaccaccttcagaaaaatgagataaaattagcttactgttcgtagagatgaaccatgcaccatggatttcttgcacctcgggaaatttctcaagaataccgtgaagtgtgtttttgccatcatttggatacagatgataagcttttccatcgagcacgaaccgcgccttggcaattctgttggctacccgtccgacgagcgctccaaagtaagtagaagaattctgaacagcagaattcagaaggcaaactgaagtgaggtaatttagcatttaccctttaaggtacttgaatacagtgaactcagagctgtcattttctttgatgggttacccagcttgcaattttttttttgaacggaaagcttgcaaatgaactactatgtaaaaaagattagttagaaacttttttgcccttctgaaagtaggtagactttgtcaaaaactcaattggtctgcataagattttgctcgtgcttgtgctgctctgttcatgtgattggattgtgatttgggatagtattatatgtagagagaagtgaaggttcagaaagaagaacagaacaaagaaaaaaaaagtatttatatggctattgcaaaagtgcgggacaagtaataactaggcaacacaccggcatcacatggtgaggttgtcagctgtctctctctttcgtgagactgatatactatttcttgggtaacaaactaacatggccactggcttaaagaaaactgcatccatctaatccttttgtcgatcatatgtttcttgctatttcttttcctcttctctatgcttatgcaactacgccataatattgaattttcctagacgtggcaacagcatctctatttgtgtcaattgtttttttttatctatcttggacctccatgtttgaaaactgaccccaaactgaaggcgacaacaaaggtctcgtgagagttttttaaaacgttcaaataattgagagcatttttatgggatagtcaatggccaattaagttgatcatccctgcttctcgggtccagaaatgtagcaggtgattaggtgaaattgaaactgggtgatgagcaacagaaaactaatttgagtaaactggatgcagacagaagtgcaaaaaaaaaaaactcaaacacacaaactatcgctatgtaatgctgttctacaatccatatcaaacgacaatgaggacagggaactatcgctatgtaatgaggtttcacaagttgtgtgtagaaacaggtaagtaaacagtgaaaatatgagcatatgcactgccttaaaagaagaacagggacaatgaggtcagcaaatcttacaacatattcagcaatggtgtcatatccaagaacaacatcgtccaatttccctggcagaaaacaagtctccaaagtttcagctcgaaacccccatgaaacgagcagagaaatcacgaggcaaatgaagctctggtgtccttgacggagagagagagaggctcacctctggagtcaggaagcacgacggacatgatgaccgctccccaattggtgaccctgatggagaaatctcccttcctgagctcatagacgccgaccgtcgtcgccttcctctccgccgcatcggcaccgccggcggaggcggcggccactaggcacaccgccgcgagaagaagcagcagcggagctggtctagccatcgcccaacactgctctctctctctctctctctctctctctctctctctctctctctctctctctctctctctctatctatctatctatctgcgagtgaggaagacggagacagaagggacgcgacaagctctgcccgggatggttgctggccttggccggatggacggatatgtaatgtagtcaaaagcgtagtagtagtagcaactagcaacttggggatgcgataagatggtgacaaagttgaagtgttcgtgtgtgctcccaaggcgtctccgagaaaatgtcgcgcgcgagccgagcgcgcggggccagcgcgagcgatttgtccttgactcccgcgcagcgtgcgctagtgtttttgcacagcgatccggggtccagcgatcgattttgtcctggctctcactgcgatgcgatgcgatccgtgcccacgcggccggcgtcttccgcggcgaatggatcgtgcacgatcgatggtacatggacggcgacggcgtggtgcacggcgaatattcgctcgcttgccctgtgatcttagatgatgagctgaatgattgatgagtttgatgactcgctcgctggttcagcatctggatggcttttgtgtcgatgtgccatgtagtatcatgacctcgtgtctacttttgcccacacggcatggtgcacgtgcaactggtacacactttgccaccgtttgatggaatggaatggaagggagaaaaaagtgtagccgtatcgtcctagctgcaaagggaacgcctgggcaccaccaaatgggcatgggggcaatggcctttttgttggagcaacgtggctgtgtagagaaatgcagcggaagcaccgagcaccgtagtgaggagaaaggtgcggaccacaactccacaaaggcaggcccaaacaaatggcacgcggccctggcccatcatcgacaatgcgacagacaaaaaaatacaagcaggcacgcagacccttcaagacttttaactcgccgttcatcatccggacctgcttgacaaggtaggagaacttgaatatcttaaactaacccaaattaatctgtaaaaatccctacatgcaatgcccgctattctcttcttttcgagattaacaaaggtcttaaagagtaaggaaccacaagcaagtaataacacaaacaggtaaaccaatacacaaattttattgccagttcctccgactgactaaactgacatgagaaggtgttcaggacaattgccacggacatgaatgtacaaatgactggactaaagcaaccacggaccatttatctagacaaaggaaaaaaagccaaagaagttcaaatcggcaaaataaattgccttgtttatgtacacaaccaaactaacagaattcggcagccggagaagcaaattcagagcttatccatgtcggcgttcctgaagctgccaccgaggagtgacaagaggccgccaccgtgcacccttccctccggaacggcacagcctccctctctgcccccatgcacggtaggttcggacgacgatgagggcatcatagagcgaggcaccagcacctggggaggtatcatcatcgcctggctcctcaccgtgccgtcgcagtccgacgcggtgctgatgcccgacgacgagtactcgttcgtcatgctgctcgtggcagcgacggtcactatgccgctgaaaaggcctggcgggatcatgcccgcgccgttgttcgccgcgtcgcgctcttgctgcttggccgccaaggtcccatgcgcggcgcacaggccgctcctgccgcgggcgaacttctcgcagcccgttccccaagtgcaccgcttgccgccgccgtgggctttgcagaagtccgtgctcccctgggcgctcttgctgcagttgtcgaccttgcacctcttgccaccaccgtgcttcacgcaacagtccgtgcggccacgggcactcttggtgcagccagccaccgaacagcgcttccctcctccgtgcgccacgcagtactcagtgccaccatggacgctctttgggcagacgccgccaccttcgaacatgcatcgcttcccgccaccgtgtgctttgcacagaggcgtgctcccctcagcacctttgctgcagccgtcaaagatacaccgcttgccaccgccatgccctttgcagtacaatgtgctgccttgagcccccttactgcagtccgggaactggcaccggcggccaccaccatgagaaatgcagagcccggccttaccctcagcgctccggatgcaaccttgcaccgtgcatctcttaccaccaccgtgcttgatgcaccgcccagacttaccccgtgcagctttaggacagccatcatgttcacaacgacgacctccaccgtgagcgatacaataatctgtcttcccttcagcactcttggtgcaaccaagctcctcgcaccgccgaccaccgccatgggccttgcaataggcagtgctgctctctgcacctttatggcacccaggcttatggcatctctgcccacctccatgggcaatacacagccctgatgcgcctctcgcacctttcgagcatcccttgaacctgcacttcttgggatgccggggatgattcctttgttctgatgtggttgttgccgtgacaacgtcggagctcacaccaaatgaagtatctgtcatggcagaaggctcagggctcagctgaaggtgatgttgaacgtgctgagtgttatcattgtcgctgtgcgtcaggtctagtgaatcctgggtttctgcttcgtgggtctcattgacagcagaagaaccggagcgtggagcaaagagtagggatggcatgtagccaccgatgctccttacagaaggagatgctgaggcttcatcaacaacagtaaaagaatgaactgttccatctggtgcttgcaaaggttgaattgtttgagaaacatccatttgaaggccaagcctcaatgtcccaggatcggtgatagtcaaaccctgtccagataacgaaggagcttctttaagcttgtctactccagtgggctgacactctgcagagtaaaaattcggcgttggacccaacccaaggactaacctgcaaccatcatctctagttgtgatgctatcaatgcactgtatattttgattaccatggccataattagccattgcagatcccaggcagtccatgtggggtgtgcttttgccaaggttcaccatgtagctctgagctgagggttccattaacacaaacgggttattcattggaggttgatttgggatatccacaaagctgttatccatcacagcttgacaatatgacaacggggtgagagcaaatgacaactgaatcactgaatagctgaagaacagggaactgatgatctttcaaacacagatcacagaatagacaaaatggaagaatatcagcaggagtgtagtactgaagcaaccaccactgacaaagcctgaggtgtctgcacggtccatgcctgtcttgttttggttgaatttatgatccaatgctacttgacctccacagcactaaacaacatctttgatagttgacatcaagcataggcaggagcctcgaaatgcttactggttgggaggtcctcaactgacaaaagcaaaacaaaatattaaccaaaattcagatgtcaaatatatgtttggcgtgaccttattaaaactattataataccatagacaggtcaccaagccagtaaagcaaaccacaattagtgttgtgcaaagattaaataatcagaagtgaatacattttattccatccattcaagtatacatggcgtgctttattcacacacatgttcaactatatagggtaacacagttttcgaagtgattttgcacatatttgcccatacaaactccttttagcagcacagcattgaacactccattggttcctaagcaactctcattaatcaagtagttgatggcaacttagtcatttgtgctggattcggtctacaagtgaaaaggaaaacacaccatatatactagaactgagagagtacaaggaaactgcaattatgaagtggtttcaagcaagcaaaaatagtagccgagatcaatgcaaaacaaactccaaacatgtttgattggtaaagctacatgttaaattattattaagattatccttttgggggcataaatcatttaataatacctttaggtaaagaagattgaagggtcaaagtgagtaactaacacgacaaaagtctttctccagaaaggaggcaaaaatgtggagtctatttaatttgagcaacagcatgcacaagcaactcccgtagcaagaatttgcacagtagaaatctcaaaatattgacagaacctatctgccctttattatactcgtaataccagccaaccaggtgctacctttgccgccttgagtgaaataaatggtttaaccaaggccaagcagtgtcaataactcaaaatgaggtgatcgataaaccaggaaatcaaccacattgcaatgcgcaatctacaaaggggaatagtatgaagtaatgaaccctcatcagtttacctaatgagtacaataaccaagatcagcagtcataaatacatgttattctccatgaaaaggtaaccaaaagattggatagaaaacaagtaacaaatgtctctgttttttctttcttaaccaaaaacgactgtcatacatttttggtcttctgcatacgactgcaagacctgtgcctcttattacatatctaaataccataacaattcaactttcctaaaatcatccacacattctataacattcccaacagtaaaaaatattggattacactgaacatatcattcctaatacaggtgcatttctgactgactagaagggttcagacttaagcagtatcaatttaaaaatagatgcctaacaagtactgctcaacaaagagcatcccgaatctccctttggaatattgtatcacggattgctgagaagtgcacaagatcactacacgcaaaatttctaatatccaagaattccagtccagaacagttagttcattcttgtcctaatattttttttttctgaacttcgcctgattctctcctagtcctaggtacggagtactattatttagggtctcgtgtactagctaaccaggaagataagtccatatactgcaacaatctatctatgtacttaactagttagattgagagtaaatagtaaaagaaaagaagacagggaagagaaaacaggaagaaatggaagaggacaggattatagcgctaattatctaagaatacagggttaagacttaagagactcagagcctcagaccatcacaattgcagaacatcccaaaacaacaagaactaagtatcccaaaatcaggaaccttctactccatcctgaaccttcacagaaccccacaaaatcctgcaattctcctacgacaacaaactagaataccatggcacagaacagatctgattgtttcctgaaaaaaaaaaacttccaccaaaccgaacatggcacacatgaaattccccaatcgggacaccacgaggggcgacctaaaagggggactgggaccaacaaacccatccccgcaaaacccctgcagccatgacatgcgaagagaaagggaaggcaaggacgtaaacacataatcgcggtgagatggagcaggcttgagtcaccttagcgcgcgagagcggaggaggagagggaggaggggtctcgctacggagcggggcgaggagggcggggagtcgatcgctgcgggcggaggcggaggcggaggcgggggcggaggaggcggtgtgttttgctgcctttctggtggcttccctagtgcgcgagaaggggagaagtactggcctccgtgtggagtatgtatggaatgcgggtgtgcggagcgagggggaaaaatcggtaggagggctcgtcgcgtgtgcaggtggggcgggacaggacgggacgggacggcggggtggggtggatggatgacggcgggattacctggcgagcctggctggctggcaggctccgctcggcggctgcgcgagccagccacgcgaccgaccggcagcgacccagctgtttctttgcccttctttttcttaatgtttttatgtgttgccttgcgttctcttttttcctttttggttttggtttgttttgtatctggccggatatcatgtggtgacgaactaacgataggctttagcctgtgggttggattcatccactcgccatgataaggtgcgtcatcactcatcatttgcatatggattaggatgcgtttgagagttgtttttcgcgtacacgcttccaaactgttaaacggtgtttaaaaaaaattaatagaaaaattactttaaaaatcacattaatctattttcaagtttaaaataattaatacttaattaaatacatactaatagtttacctctttttttatcttcttaatattttttatttctctctttcttaaacaggaatgattacatgggatctcatcatggactaccttttacggaggttgaaatcatcccacatctttgcctcctcctcgtgagtccgtcactgtcctatccttatgccatgcgctcgcgtcccgtgccttgagcagaggcgcgggcatcagttggtaggaaagaatggcaacaatgctagtaggaggtagtggcatcaacatcggtattagcgaatgtgacactagaaggcaacgacataggcaatgaagttggccacagtagtagcaacaggaagccgaggagaaagggagaagacgaaaggaggtgctagcagcatgcggctcgttggtccaccaagtcgaggcaatatgtgtcccctcttgcaccttaatactagataatatatcgaatttgttactccatgggtactgtgggtaccaactggtacctcagaggtaccaaatctgatacttgttgatacctaggatagtactatgtccgataaccgtaggtattagctatgataccacaagtactactcgagaatgatgtgtcgcatgatgtacttaccacaacaccgacgatgagcatgacggcttcactgccacgtagcccgctaatcaaagctccagatccagccgcttcgttgccctccccctctatcaccatcgacaaagcttgggaggaggtgcttgtgctggccttcttgacaacctccctttccccctggttgtccccttccgccatgggagtcagatattgtggatgtcgccatgcctcaagcatgagacagaggagaaggccatggaccgtcgtagtccactgccctcgtcaccgacgtatacttgggtcagatccggcatcaaggaggcctagacctccagatccggcgtttgtcgatggcccagaatgcctccatacctaaccatagattggtggaggaaggagaagagggggagcacgggaggggaacgataggaagagagtggaggagaaaaaagaggccaaggaagatgagagggcaacgcaccgtggtggtgggcgttaagtatccgcacccggatggaacatcgttctatagattatctaaagtgaagggagaacttgcttgtgatttggatttgagaaaattccttgtatgcccctagaaagttacctaatcccttgtatgcctctgaaacttacttgatccctttcatacctttgaaattttgatttgatcccttacacgtctctaccgttaggtttacttcattccactcgttaatttggttgaaaatgtccataatacccttcaagttgtaggagctggaaattgagcgcatgtttggctgtcaacttgataaaagactgtaatattcatgagtgcacactgtgtgttttagagactaaataattagtacatacaatttttaacataaatttggaagaagaaatttaatgtgtttaccttatagcattcagcataaattaaacataaaattggtggaagaaatttaatagtgttttatgagactaaataattatgacatacaatttttaacatgaatttggaagaagaaatttaatgtgtttatcttttgttatagcactcaacagaaatttaacataaatttggaagaagaaatttaatagatctttttggtgatacgagaaataccataaggagcatacaaaattatcaggagcatcaattgacgggaaggaaaaaaaacatctgaagcatccatacaccatcagggatacacaattaacaatttgattaattatggtgcatccatacaccatcagcattaagcaaccacagatccattgatttatacatcatgagcatgacggcgcgagagggtggtgggacgtcgagagctcgtgtatccaggtgccgaggacggaattcgagcactgacgggatgccgaaccgccgctacgacgggatgcgaagccactgccgcgcgcgggatgcagagccgatattgagccaccatcgccgactggatgcaggagccgttgcatgacgggatgtggagcaacgacgatttggagattggaggtgataacctgtggcatttttgtctttcttaaaaaaaactgataagctaacacacgccttcactcgtatatcttacggaaatctaatggtaagggtatgtaaatgattaaatcaaaattttagaggcatacaggggattgagtaactcttcaggacacagaaggaattttctctttgaatctactgacactttgattggctataacaaaagatagaagatacttaatttgttaattatgccagcatagtcggttttgtttttcaaaatatcaatcatttccttatcttcgacctcagtttagctcattggtgccatccaaacaaggaggcaaatgctaaacataaaagatggtgtgccgcgcggccggccggccggggaagggggggacgctagatttggcaacgatgaacatggttcaagtgggaagactcgcataaaagttcaattttagtcttgattgtagcataaacatgataaaggaaatcgaattatggatcgttggttgtcatgcacgatctaaaacattgtagcttggcctaatcgaaaactgtgtgtgttcaatggtagtaaaaggaatagaacagagcagagtaaggaagtgttttacattgatttcgttcataagtggatccaatggcaagcaacatccaaaaccaaaatcgaactgctcatatttttttatgacgtggccactataactttgcgaaaaaaaaagtttacttctttcatacccccttgtcctcttgcacccctataattttttttcatccgaaacttattttttagaactttccatccgaaactctcctgattaatccaacctaaggttccgttcatttctccaataagaattagataaagataaagattttcatctcatattttttaaactgctaaacggtgtgtttttgtgcgaaaactttatatataaaagttactctaaaatatcatattaatctatttttaagttaaaacttaatcaatcatacattaataccatatagttatacgtaaaaaaaaacttaatcttttatcttgagaacctaagtgcatgactcaaatgatctaaatacgacaaacaggctagagcagatctcagatctgcagcggcagtttggagcagtgaccccccatttcatttggccatttcctcccatcgctttcaccgaaaagcagggggccccacgtagagcgacgcatggccaagcgatccgggagagccgtttacgtgcacaagttgcgcccgttttgggccccggccacgttggaccattgcacgctcgcaacatccctcgtggagcccagaacttgtttggtagcacagtgcctacaaatcctggagccgtgggccacccactgttactcctcctgattgctaccacaagccgagccactgaagccagcactgttcatacgcagcctcggctcggctcggctcatcggcgcgattcgctctccaccgtccgtcccgcgaaccgcacccgattcgccgtgtcctccacttgtcgacatcccacaggccgcctcccattctctagtggcgttcacgcgcccgagacgcctcccctaggaaaaaaaagtaatatctccgtcccaaaatataagatgattggacacggttatttaaaaaaaatagatagaagtaagtggtggaagattgtgattggatgaatagtgagggtaggtgagaaaagtagatggtggagggttgtaatgggaagagaatgttgatggagaaattgttatattttaagataaatcctaagggctaacagttgttatattttgggacggagggagtagcaggggacacactcgcttacataaaaaaacaaaagaaaaacactcttacccacgacacgacagcgcccacgctaaccgccatgtgggccccgcaacctttccctgccccacccgtcatccgccccaccagcggaatctcgcctgtacgctcggctctcggggcccacgccccccgcgcgtcccgccggccggccacgcgtcgcgcctccgattcgctcgtcccctctgccaggtgggccccgccgtcctccgcccgttttgggcctgggcccagtactagcgtaacctagagcctttgccaccgcatctgctgtgcgcgacgacgcgagggcggtggcgtctggtggcggcgcgcggcggccgcactgtcgcggtggtgacgccagccgacgcgagggccgcgtgtttctcttctctcgcttggcggtggggaccagcagagagacgcgacgctttttttactaagagcaagtttaatagtatagccaactattagctctaaattatctatagctaatgtaatagccaattcatacaatagttgcttattatactattaatatctggtcctacctgtcatacacacattacgttttagaatccgtgctacagctggctacaaatctgtagcccgctgctttttttctctctatttagctctttaaaatatgtttatagcatgtttatagctgacttataacttactattgtacatgctctaaaggctaaaggacgctgctgacgtctcctcctccgttggcttggctccgtgcgtgtactggcgatcgaccacgagaacgacgacgacgagtttggtgggggctcgtcacgccgagacaatcagattttcttcaccgcctggtgatgtaatcgccttttaattaacttgtgagcgtgcacgtttaaaatcctgaagggaccatgtggattgcgtcaccgctgacaacgaaaggatttactagtggtagaggagtacagacaggagaagcttagctttgatcgtttgtatttaaaaagagagagtagcaaatggcaccaaaacatcaccactagaagccagatttgtaaaaggaaatacacaaatagttttgtttgggcaagagaaccttcgggatccacacggtcgagcctcagcttcagctcctgcggcgtccagatcagaaatgagaaataaattaagcaccgatcgagccaataatcgtttggccgataccaatattgtacagcaaattgggccaatagcattgggtcaaactggtttaactactgatcgaatcccatagattggtgcctgcctaccgtgggctatataatcctgtatgcaaataattggtgcaacctgctatctggtcgctgaagtcgtcactcgtcagttactagtcgtgtcacttcaaaaataaatcagttaggggtatttagatctagggtgtaaagtttcagcgcgtcacatcgggtatcatgtaggatgtcttatggggtgttcggatactaataaaaaaaactaattacagaatccgttagtaaaccgcgggacaaacattaaacctaattaatctatcattagcacatgttcactgtagcaccacattgttaaatcatagagcaattaggcttaaaagatttgtctcacaaattagtcataatctgtgcaattagttattttttaacttatagtatttaatacttcacgcatgtgttaaaacattcgatatgataggatataaaattttaaggtggaatctaaacagcgcctcactttaccgtttcaagcaatgacaaatggcaccatcgtttacatgtcacagattcaccattactgtaacgaggttgcatcaatccctcggtccttcactaagcttgaatcctttatttacatttctgaaaacaaatgaaaatctccgggccaatttgtctccaaaaacgagccagaatatatgaatatactccctctgtttcgttttatttgtcgctatcagtccaaaccgaaaacatcctttttattatttgacgctctagttcatctctacctgctatcctacgcgaaattccatccttacccctcgcgccctctccatcccgcaaggccacaacccagtctccagtagcgctggcgcgcagcatggcgacctcggtctcgcgtgctcggcaggcgtggcgatggcgaacatgaggagcagcagcaggacgtcgtcgtcgtcgccggcggcggcgttgctgcggtggggggcgctgacatctgcgccgcggtgcatggcgtgcggcgggacgaggcgggaggagtgccgcctgtgcacgcggtagtccgactcccggggtgacctccgggtgccgggcgtgcgccagcacgcggcgggcgccctgccggagctgcggcaggtcgggcaccggacgtcacgcccccgtccacgcctcctccgcgccgccacggtgaccgggtcgatcagaagctgtcgctgtcgcctccgcgccgatggattaatcaaacccccaggctctcgatcgccgccatccgccgacatcgaactccgagctgcgaatttattttgttggcaggttcagtgtccatggaagaccaaacagctggccaatgaagcttgctcagttggctaagaagttgcagcagaggatggtgtcagtcagtgctagtggacagaaggcggtcaccgccgatgattgctgctcagcggcggcggtggaggcgggctcgcgaagagacgggagggaggtgagagaaggtgtaggaagaggggaatgagaaaagggagtatgtgcatacgtgtgtgtgctcaccggcggggggaagcaggatgccggcgccgctacctgtgggaaggggaagccgcagcaagggaggtggggaagagcgccgccgtccccgccgtcggccctgccgtggcgctggggattgggatggggcgccgccgccgcaacgtgtggaagaggaacgaatcggggaagaggaagggcaaaagggtaaattcgcgtgaaccttaatttcgccgaagttgtcggaaacgacaaataaaaagaaacggagggagtataatgcagtatgccctgctggaacttttttcatacagggaccataaaattatgtagcaggaccacattgcaaaggaaggtagctacaatgggccatatatgggctaaagatgtatggttgaaatttgggccgagatagaccctcaacgtagtggacttaaaacggcccaattaccaattactcgtgttgctcctgaaagaattgagaggagtgcctctcgtacctacattctgctctgctgctaatattttttatttttgtgctctcttttagattacatgacactgacacgactgaatgggcccatatgccccagcagaaggtaggctaaaggtgattctgtgaaacatgaaacaaactcctactaaagcttacgcagataaatgtgaacagcacgagcactgaagtcacgcccattgctcaaccaccgtagcgacgaaggtgcttttcctgatttctttgtcattgcttatttgcatttgacaatggccgcaaggttttttcatgcttaaaaagcttttaaaaacctttctttggcacaagggctcgagtcatatgtataatctactttacaaagcttaattagcctaacatgatcaccctcattttaacatggaattcgctattgaccgccgaaatgaccgggatagttacttctatagatgacatcttctcttctcttcgctgcttctgcttctgaagtcggtgtagcaccacaggtcggggtagaggtagcaggcagctgcatcgagtcatggatcaccagattgatgccgaaaccgttgccagtgatctcatcagcgcgtctctccgcctctccaggcgcaacctgctctgtcgtactccctgtctcctgtaataagccatttttagttattttcatttatctcggaataagtttattttcaaataatcattgtatcggagttcatgaaagtatggagtggttgtattgggagtagctaaattaaagagtaattgcataataatttgataaaataggggtattttaatctttttattttatatggatatgtgtgggatgtgtgaaaaataaatttattttgggacggagggagtataatgcagctgtgtttcctcttcaacgcctcttctagataaattaaggtcccgtttggtaacttgaaagcctgttaatctgttataaccatgggccaacttcaaagcctgttataactgagaggaatatatatttcaaagataacctaatccgaagattgctagatataccaaagctatggcatcacgcccttttcttgcagattcttgcagcagataagaagagaaaaaaaagaaggtacgccggccagaaagcatcaacggaggaaaatttggtggatgagacggagtgacaagtgagctgtgagcaatacatggaatctctcagggttttttaagtgacggctgagtgtggggttgtgggggtggagatgtgcttaccacgtgaacaaccctatatactttgacccaaggctggcaggcatctttctcgttactgtttttcattgtgggagtagaagcacaacttccttttcactgccaactctagattgcacccaagtggatttatcgcagatgcaagctgttgcaaaagcacaactgctttacttttttccccttctataatttgagcaaataatgcagctatccattttcagatatccttctacattagtgtatggctgtatttagttctttaggtgtaaaaactttgaagtatacggacgcacatttgaagtattaaacgtagaataataacaaaacaaattacagattccgtccgtaaactgcgagacaaatttattaaacctaattattccattattagcaaatgtttactgtagcatcatgttgtcaaatcatgacgtaattaggctcaaaagattcatctcgcaatttatgtgcaaactgtgtaattggtttttttccacatttaatgccccatgcatgtatccaaatatttgatgtgacgtttttggcaaaaaaaaaaactttggaatctaaacacggcatatgtctgataatgtctaaaacgtactaggtaccatgcatgtcctgtgttctaaaagtggaacatttggaaacagttaatatgtggcagtatatacaattgattctttttactctctctagggcatgtacaatggtgtttaataacggtctctcttcgttgtcatgcaagtaaatttggtgacgtggaagaaagagaggaaggaatgagaaacatcgttgctacgtatgacaacggctcagagtcgactcttagcatttattaacataaaatttgttgcatgaaagtgcagaaaaggaaagaagtataataaaaattatttagtatattaatggtttagaaatctcattgtctctactattgtaggaggatagtctctagtgatattaattagtatagagagatcatattagactctatatttgtacatgcctttataggctggcctgctaaattttattaaggttgtgttctaaagaaaggttggcctggactaatcattcatttatcgtaagcatgctttgcaaactattaaacaatgtgtttcatttaaaatctttctatataaaaatttcttttaaaaaaatcaaataaactatttttacgctgatggctcgtctcattttctatgtcaccaactaactatccccaacagacagcagctgtatcgaactcagcctaagacacgaagaatataaagtacaatgtgcagtccctatagtaagttgctaatagaacactgttgtcccctctttgttaggagtacatggtattttggcttatcccttaaaatgaaaagtgatacagtactattctatatattcatggaatatttgtaagcaacagaatcaccaaatgctaagcatttctatataacctttattagggggttatcacaccgaagctagaggattgtacgtagtggtctgtgaagtcgtgtgtgtgataactgatactacctccgtcccatataaattgtatttataggttgtttagtatatactaaggtttgagaagaaatactatgatgctccttattaaatgatgtataggtaagagaggaagggtagttgagggtaaaataaagagaaatttgaatgagaaatgattaatgagaccattagtactctattgtgataattattttaagataaatttaaattttcgaaatacaattattatgggacaaatgtagtacgaggtaagatgttttccactgggataacaggtgacttatcagttgctaattttaaaaaagattttactacaatactcctatcttttaaaaagttttgcatttcctaacataacgattaccagtactccctagagatgatagatttatggaatagagattctacaaagattaaatggacaaaatttaaaattcagacaaatactactacctctatactaaaatattactacaacataggccatgtttagttcctcctcttttttttttatgtatacggacgcacatgcacattttaagtattaagcgtagactaataagaaaacaaattgcagattccgcctataaactgtgacacgaatttattaagcctaattaatccatcattagcaaatgtttaatgtagcacaacattgtcaaatcatggcgtaattaggctcaaaagattcatatcgcaatttacatgcaaactgtgtaattggtttttttcggtccacatttaatgctcaatgcatgtgttcaaacatttgatgtgatggaatttttgaaagtttgaagggaactaaacacaaccatagaataaaattttgacaataaatccgcagattgcaatgttttgagtctggaaaaaatacttttctcactaactaatacagcagatatttcgggtgaagtgccgcatgtcagcttagggtgtgtttagttcatataaaattggaagttttgttgaaattagaacgatgtgacgaaaaaattgaaagtttgtgtgtgtagaaaaaatttgatgtgataaaaaagttaaaagtataaagaaaaagtttagaaataaactcggccctattgtcatcccatccctctttttctgcatccctctccatttctaggcgtactactacatttttctttgtggaaaagacatgaagcttttcgaatccacagccacagtgatgctatctcaaagctcaccggggggcggggccgcgggggccatagccacgggcttggtatagtacatttctgatccgaaactctgaactcgaggcggtgtttagttcttcaaacttccaacttttttatcacattaaaactttcctacacacataaactttcaactttttcatcacatcgttctaatttcaaccaaactttcaattttaacgtgaactaaacacagtctgagtgaaccacatcaacaagtacggaacacttagaccgagtttagatctaaactttttcttaaaactttcaactttttcatcacatcaaaactttcctacacacataggctgtgtttagatttaaactttggatccaaacttctaactttttccatcacatcaacctgtcatacacatacaacttttcagtcatatcgtaccaatttcaacccaaactttcaattttggaaggaactaaacacagccataaatttccaacttttccatcacatcgttttaatttcaaccaaatgttcaattttagcgtgaactagacccacccttactacagctctaatggcgctggagacatacgtcacgactgatcctaaaacaaaccatcacatcgacgtgccatttcgatggcacccagcaccgttgccaatttgtcattttcacgaggtcctcgacgacgcgttgaatcttccactgtctttgttagggctagtagtatcagatctttttatattatcaaaaaaatcaagtctttgtttcgttcttgtaccaaatctctcagcctaagaaatataaggttcactgaaagtgacataatgagcaaatgcaaagaaggtaaatttgttccgtagtatttccgtcagacttgcggctgccgacttttctctcttaacagaataaaaatccgcaaagagatacctatgggtaacacacaattgatcctcttttttcatagacaattcacagtctacagttgaattgtgcgtccccccccctctcttacatgcatatgtattatgagctggcagttgaaagtcaatgcatggttgtgatgataaattctagaaatctttttagattaaactacatggatgttagatgcttcctaaactttgaagttcgtaaactgtttcatagatagcccccgtggaaactctgtttcaaagtctcctttggagcacaaaaaaaaattgtacagcttttatagagtatattttttaacatactcttttatttagagtgttgacaaaaactttcaaattctctacgctcacacgagtctcgattaagaatgagtatttcttattacaaggaatgtaactagcttttctaacttctaaatgatattgggctatgttcagcaacactgctctgcagctataaccggttgtgctatacagtcagtgtatatattttctttaccatgcactatagcgctgttgtgcagctgcagtttagctacaccgaacaaacccgcgatttcgagaaaattatatataaaaaaatcattatcaaaccattttaaatacacttttaacttcataagattttgatcattcgactattcagccaagaaaaaacacatatcctaaaatacttctcgggagcgtaattaataaactctagggcctattcactttaatgccattttcaaccttaccaaattttagtaaaattactaaaaaaatagctacatttagtttgttgctaaattttagtaactatataagaaatcctattaaaattttagcaaattactaaaattttagtatttagcatcaaagtaaacaggcgtatagtcttctgagtacaacgcataagcattgaagcaaaagcaagtactactatcaccaccatccgatgggtgggtctcaactctgtcttaaccacaacgcccaaagaggcgtagaccgtggacgtagaccagcacggtccaccgttttgaccggaatccgagctggcacatcacgggccccaccgctcgtagaaaaaacagaaaaaaaaaacggacgggacgggatcctctctctcatcgttcgtcgtccatccatccatccatccatccatccatcccctgcgccccgccagagcagcgcacaggcatctcaaccccacccccagcgcgtgcgtgacgacccgccactggctccccgcctccgcccccccccccccagtgggcccgtccccctgacaaggtggggcccacgtggcgcagcaggtgcggcagggtacggatgccgcaccggatcccgtcatcacgaggggactttttgactgcgggattagctggcctcctgacgcgtgggcccggggacagtgaaggcgagggtaaggtacgtggctagtacgtgaacctgccgtactgcaccgcgagtttttgggatggccgtgccgctgtgcgtgtaccggtttttgggatacttctacaaacagggcacaaaaatgactggactggggggaagtaagtacaacccgtacgaggtgtgtgcgagcgcatgaccactgctgtgaactggagtggcaacgtactggagtactatcaccgtaggaacgaccatggtattgtgtattagatttttaatatttagccattcgtgagatggaacaaacagaaatactgaagtagtagagcatttgattgaaaatagagtttggcacatcgtggtaacgctgttttgctctcgttttaattatcagctcttgaaaacttgtgagctagaaagttttttttttaactcaggtagatctttatatgtcaattacttgtttaaaaaatatatacttcagttagtaaagtaacatagaaaatattatgcgttttcattgcttggggttgttagacagtggccccaccatatgaaaacatgttaaatatggcttgtttcaaggtgagctgcatttactcactccatcccctaagcataaaattaagagttaatgctctattaatagctaataattaagattgactcttaggtaccatggaaccatgaacctaatttgtatacctatgtaaaataaaaaagcttatatataatactactatacatatactaaaataaaaagatagtattatgcacacgaaacttttaaccctagcaaaattatggtaaatatcatttaattcacaataattttttaataaaaagcgctttaccagagaatcttttaaacttacacccatgatacattacaagtttggttttctaagagaacaatataaattgttggtgagaaatttgaaaaaacaacaacagaaacccctggattctttccatgaattacagcatagaagaaaaggcctaataattcatggaccgaaaaataataccagcgactcggcgagaagtcggtaaaaaagacaaacaaaacgtgaaatttgacaagcgagggacagtccgagttctgacgaaacggctgcattcctcgagaggccggagaataattgggacgggcgtacgaggaccgtgtccaccaaaaaaaacccctccgcatcacgcccaagccagcggcttccccatccctcctctcctccagtcctcctgctacacttcgatctcccactaaccccatcacctcgcccagcccgaaccattcccacccctccaaacagacgatctcccgctgacgcgtgggccccacctctcctcgcccccacctgtcagtaaaagttacgcgggcgacgcgcggtaactctcgccgccaccccccgaacaggtctcctttaccaatggaacaatttaggttggaacacacactgggtctcggccaaaattttaaaagtctcgagctgaataaaaacactggtaaaaaaaaaaggagagagagaggagagacaggtcgcttcctgcttccattggagaagaggagaggagaggagaggagaccgagccggcggcggcggcgacgaggagagggagctgatcgggcggtccccccctttgccgaggggacgccggcggcctccgggttgggtccacttggcagcggtgagcggcggcgggggatggcggaggcgcggctgctgcggcggcggcggctgtgcttggcggtggcggtcgtgtgggtggtggcggtggccgtgagccgggtcggcgccaacacggagggttagtgtgatttttcatcgaattcagctccgtttttcggcggattacgcccacccctatttttggacttgctttcggattcgatgaatctattggtcatcgggtgattccgtttgggtactagtacatgttacctgcttctcggtacatatgggcgtggatggattgactcatttaaggggatggagcatacgcccaccgaccttccttttgtagactcgatggattatctaggctatagctctttgttttgctgcctctcatggtgtgttgtgaatttgctcccagcagggagatttgtccgaggtaggaaacgtttcttgagtaagtttggtaggtgtgatttgtatgtgcacagaaatgggatagcttttttttttagataatggaataaatcctgacagaaatgggattgctaatatctgggatgagtttggtgtgctattttggccactctgaatgaagaaaatggaactggcttcctcattaggttcgagtatggaaagaatattgcttgtgagttgtgaatcttctcttgtgaaaagagattttttttttaaaaaaaatctgaattactgactagtatagctaattggtttcttacggtaggagtatgtgttatagattgctcttcaataggtaagggccatcgttagtatcaagtttaagcttttcccgaacaggaaaaagggtcatcatcttttgttatcacctaaccaatttcacctctttaaaatgcccctcaacatgcttttcctgatatatccttggtagtaaccatgttctaagaaaatttggtgattttggcgttgtgatgtttatgacactagattgcaaaaggtgccttagctattgtaagttctagttagtgattatgactaagataagtgttctttctagttgtttcttatgcaattatttcagtctttttaagcaactttatgtgctatccttttccacatttaggtcttgttaatcgcaagtacctctgtagcatagatactaactaatgttcaaacactaatcttgagaaagattgggagttatgcagatagtattgtaagaaatgaaagtactgtatcttataccttcttgtactcaatatatgcttgcatactttagcctgaaaaggcgattgaatttgccaaaattttgacgagaagctactgtcactattgtctacttccttaaatactatgttgctgatgttgagggtatgttcgatgtcaggtgatgccctatatagtctgcgccaaagtctgaaagatgctaacaatgtgctgcagagttgggatcccactctggtcaatccatgcacatggttccatgtaacttgtaaccctgacaacagcgtgatcagagtgtaagtttttgacagaattatcatttttaggcttgtcaaaagtaagaaatgtgatcattttgtgtgttgactgatctattttcctttcgcagtgatcttggaaatgcacaactgtcaggtgcattggttccccagcttgggcagttgaaaaatctgcaatatctgtaagtttacacttccagtctttggagaattatgtttttagttacaccatgcagtagcgtatctattcaagttgtcataatatactgcattgaagcttggttttcaaaactcttggaatatggcttatccttgtggtaaagatggttgtgttgccaccttctttcttgcatttttattgtgaaatttaattatgttgtgactaattacagggagctttacagcaacaacataagtgggacaatacctaatgaactgggaaacttaactaacttggtcagtttggatctttacctgaacaacttcactggttttattccggaaaccttggggcaactctacaagctgcgtttcctgtaagtgtactccactttttttttattatgaatagaattataaattgtgtatatcattgaaggccttcctgtttgaatgatcataacataattctttatttgcatgtcttcttgtaaggatagtcgtcttaacaacaacagtctttctggttcaattccaaaatccttgaccaatatcactactcttcaagttctgtaagttccctttctgctaattcatatttggtgtctacctgtagaaattattgcttacatggtaatagactttaagatggatacatattaacaaaatgtccaataatttatgcagggatctctcaaataacaatctctcaggagaggttccgtctactggctccttttcactctttacccctataaggtgctttttctagatagaatttaggttcttagtgcttactacatcttgtgaggctgacaaatggttatttcattgtcgcagttttgctaataataaagatctttgtggcccgggtactacaaaaccctgccctggagctccacctttttctccaccacctcctttcaatcccccaacacctactgtgtcacaaggtgattctctatagttttaattctgttacatttgtgatactgcttgggatatgcatatgcataaatgatgcagacaggggatttgacatattcgggtggaattaattctattccatcaggtgactccaaaactggagcaattgctggaggtgttgctgcagctgctgcattgctgtttgcggttccggcaattggatttgcatggtggcggcggcgtaaacctgaagaacacttctttgatgtccctggttggtattatagttgcatactgcagttcatgatacttatgttatccatttaaataatctatattctcctttaaattcagctgaggaggatccggaagtgcaccttggccaacttaagagattctcactccgggagcttcaagttgctactgataactttagcaataagaatattctgggaagaggtggctttggaaaggtgtacaaaggtagactggcagatggctcgttggtagcagtgaaaagattaaaagaagaacgtacccctggtggtgagctccagttccaaacagaagttgaaatgattagcatggcggtgcataggaacctgcttcggctccgtggattttgcatgacgcctacagaacggttacttgtctatccctacatggctaatgggagtgtcgcatcacgattgcgaggtgccttaatcttccttactttttcttagagtaaatccattaatagtttcttacacgtttgtttgcatgcttaaacataaatggcacagctattatggttattgaaatcacttaagcactctttttaatttcatctactcacagcatatacctagttgtttcagttgacatatcacattgttcatttaaggttatgactaagactgtaataatgaatggttgagtgcatgccttctgcagagtccggaataaatatattccttcatctaaaaatgcacgcccataaattaattatttcagtttttgagtcgtggtatatgattttgtagagcggcagccaaatgatccgccgcttgaatggcaaacaagaactcggattgcgctgggatctgccagaggattgtcctacttgcacgaccattgtgatcccaagatcattcatcgtgatgtcaaagctgcaaatattctgttggatgaagattttgaggcagtcgtgggtgactttggactggccaaacttatggattacaaggacactcatgtaaccacagctgttcgtgggacgatcggacacattgctcctgagtacctctctactgggaagtcctctgagaagactgatgtttttggctatggaatcatgcttcttgagctcattacaggacaaagggcatttgatcttgctcgtcttgcaaacgatgatgatgtgatgttgctcgattgggtaagtaccaccacatctttatatattggggcaaccatggaagttttggttttgtttttccttgtgcatgctagttgtcctccaggacacatctttcttagctgtgtctcagttctagtccaggaattagaacaaatggttgaaattattggactgttggcagtgataaagcgagctggcagttcagtctccatgtgtcatcaattatggagatgcacgccatgacaaattggcagctagtttttcgccatttctgataccgagacatgatccatctgcacgcatgacttagcaaaattttgtactactacatttggaaactgacaggcaagtaactaaactggtttttgtcttttcaggtgaaagggctcctgaaagagaagaaggtggagatgctggtggacccggacctccagagcggcttcgtggagcatgaggtggagtcactcatccaggtggctctgctctgcacgcagggctccccgatggaccggcccaagatgtcggaggtggtgaggatgctggagggcgatggcctcgcggagcggtgggaggagtggcagaaggtggaggtggtccggcaggaggcggagctggccccccgccacaacgactggatcgtcgactcgacctacaatctccgggcaatggagctgtccggcccgaggtaaaagaaacgaaagacaaaatcacaaagcatccaacctttgctcgacggcttcctcgcccttgtttgtgtatatgacagacagatcgatagctggcaaatctggagggaaaaatggtttacttgtaaccctccctggtgcctcggtaattttcaagtaggctctgcacttggttgtcgttagaaatgcatggccgggcggaattgcaacacattgttgtggcggctctgcgtctgtaatggctgaacaactgatgcctctctctctgctgtattgtacgtacaactctctcttttgacggtgctaaacatcctaggcaatcttttttggtctcccgggtcacaccgtgtccgcctgtactttgttactcttcgttgaaaaactatactggtagcaaactcaactctttatctgaaaaaaacaaggtccatggcatatgcaacggctgatacggacgagctggtgtattgaggttgcaggctggatcaatgatcatgcagccgtgcaggttgcctgtgtgcgctctctcatggtgtcatgcatgcgagtgccagagtgccagaccatcaccagaaccgctacacataaacaaatccactgctgcctgacacggtgttcagccagcgtcccgttttttcggcattttctgcctcccgattagccatacaaaccgttagtgttctgcatcagagaacgccagaacggcctaaatattaggccataccaacaaaggaacaaaatgatcgacaaaagttcacgcccaggttaattacgtactctaccaaggacagccaaaagtgcaaaactataactagccaaaacaaaagtgcaaaagaaagggacgagagctagtgcagcaagcgtgctcgcgtagatgctggccggcagcctacctgcccacacgcgtgctagggcctaggagtacaaaatacaacgcggcattagaaaatcctctctctacctatccacccatcaacgtgtcggcgtcgcacgcacgggcgcacggccgcgcgacgcgaactcggctggctagagggtgggcacgcggaagaacctgccgcggcacatgcagcggtacgcgacggggcacgactccgcggcctcggcgcaccggaggctcaccatcacgcgccggcacggggagcacggcccgcacgcgtgcgtgcagtccggcagccgcgatcccgtcgccgcctccgccgcgttgcccatctccgtcgtcgtctcttcctccggctgtgcgccctgctgcacctggaacgtcgccgtctggccgccggtgcctctgtcgtcgtaggcggtggtggtgctcccgttcgcagcagcagcagatggagccgtgccgccgttgtgtaggccaccggctgaaccttgcacacctgctgcattacgtatacataaaaacgtagtacgtacataatgaacgaaatgtgggcacaagttaaatgcaggtgattcaggccgtgaagggacatgccacatgatgcatccgccgtacgacgtgccatctttactagtagtgcacactacacaggagtagcactaaaagcttactacatgaacacgtgtattcctagtcagattagtacgtactccagtgggaagctctggtgaattacctggtatcgtcctgacgccatcagcaacgcacgagctcatcacgaccactgcaaacgctagcgccatggcactaaacctcctcattgccgccggtgaatccgtcactaaagcaccaacgcgaagttggagcagctagctgatcagcacaagcacaagatcgatcgacacgccaagcagagagagcagtcagcgacagtgagcacgcaagcaaggagaggctcagcgcgaggcgaacgtatatatggccggctgccgacccgcgagcgctcgccgcgtgcgtgcgagaacgagcgcgcgatcataaataaaccccactgcggcggcatgcacgcgctggctcacaggatcctcgacgttggtggatccaccacacgcagcccgtgcgcggctgcgcgcgcgcgaggcccaaagagcggacacgaagaagacgacgagggaaggaggtagcgatgcgtgtgacgggcagcaatggcgaagccccgctgcggcgcccggtgcattatttatgcagcggcgcagggagacgctgttgttataattgcggcacctcggagaggagcaccgcaccggcgagagatcagctactacgcactatacgtcagaagaggccgacgtgggggttcccgtggagatgcattactgtacctgccgctgctactgtttctgaagaactgaaattctgatcgcgagctcaaaaaagttttgctgcctcgtgctttcgacgatgtgcaaaactgcaagtctgtagctctagtcagactgccccgtcaccgttctcatcaatgcgcgcctgcaaatccgttgttgcagttaagagatgtactccaataaatgaagctccaaggtttttgcccatggatatcagaattggattgattgttcgtgctttgcttcttcagtcagaagtattagcttcttcagtttagaatatgggatatgaactgaaactgaaactttctttgcttctaaaagaacagagcctaggagtattagctttcatgacctgatctgacctctttgtgtgatcttgtcatatgttttgggcctttggctttggtacaatctataggtagactggagttttgtactccatccggactgcgttttggagaagcagaggtactatcgtcatcatcctttgcatgagatttgggtcatggatgcatggagggtgagtttttgaatgaagaggcaggcatttctggcattgcctcctcttcaataatggggttcactgaaaggccgaggggaggcttgaatgcctctgctatctggacaattgtgctgctgaatccttattatgctgctttttgcagacctgaaatctgcactttcatgtaaaggaggacggaagaacagtatacagttctctgaactttgttggcccaaaggtgcaaaatcaggaagatttcaccccctcggtgtgatagcatgtaacggttcacccaatgaaatatatgtaagtatgtttttccagcgaagaaagtttaatagaggaagaggacgaaatcatgcggttttcctaaactttcagttgatgaaggattcctgtgttctgttttcattgattataaaacttttgcgtaatatgtcaagccggatccgtggcgcaatggtagcgcgtctgactccagatcagaaggttgcgtgttcgattcacgtcggtttcaataccccgaaccaagccgggattatttttttcacctgtgtacatttatatttaggctacccataatttgttgatgcctttccatgatagcagtttgtttgatcttttttttccctgtacaaaccccaatccaaatttgaattatgttttgcccagcacaatttatttagtctatccacaatttgttgttatcttttcatgacaacaatttgtcgatcatgttttgccgctgtacaatttatttaatgtatccacagtctgttgttgattattttttgccctgtacaatatatttaggtatccacagtttttgttgatatccggattatgttttgccctatacaatttatttaggatatccacaaatgttgatgtcttttcatgataacaacttttcatgacaacaatttgtcaatcatgttttgccgctgtacagtgtatttagtgtatccacaatctggtgttaattattttttgtccctgtacaatatattcagggtgttgacgtctttttatgatagcagtttgttgatcattttattttgcccatgtacaaacccctatccaaatccggattatgttttgccctgtacaatttatttaggatatccacaaatgttgatgtcctttcatgatatatataacttttcatgcatgacaacaatttcttgattattttttgccgctgtaaaatttatttagtgtatccacaatatgttgtttattatttttttgctcctatacaatctacgtaaggatttgttgaagtcttttcgactcatcatcctcaatttgttgatgtgtatgatcgtggtcaaaacaacctttcttttgttgttgcttatagggtgtgtttagttcacgctaaaattagaagtttggttgaaattgaaacgatgtgacgaaaaagttagaagtttgtgtgtgcagaaaaattttgatgtgatgaaaaagttggaagtttgaagaaaaagtttgtaactaaacttggccatagtcatttttgtctctatccttgttcatgaaagatgacatagatctgatgtgatacgtccaatctcttcccatcaactcttcccattttggctgaattcaaacatattttacaaaattcagaacttgtcccaaattttggaaataatagtcattcatttttttccaaaaaaatagttgattttttttgtaaatttttttgatttctacaatttgggacagcttttaaaattgtacaaagtgtttaaaatcagccacaagtttttcaaatttaaattcggtaaggttctccaagggtaaaaatcgtctttaatgtcatgaatgaattttgccaactaactttaagcgtgaaccatgtgagttgttgaggggaaaaaaaggtaagttcgatttgctactcttaaccatcgtaaatatctgatttattcccctaaactataataccagtggcggtgacctccttcccacaggttctccacctccaactcggtgtagcccatgccatagattgttgttagcttgatgtcgcaactctcctctctctgccgccatatcggcacaatagttctttactcagcaatacatcctctctctcgaaggtgacggaccaggtggacgatcccaacggcactattccttagcgagctcaatgataggggacctatgtgttcctctgccgcttgattgagagagaaatacataaagaaacaataaataagggaattccagcggaagaagaaatggcacttgtgtaatttactgactgaattgacacgtgtgtgtcacgtagaataaaaaaccactctcaactaagttgaggtaattccagtggcagagctaggcattttgtgaaccgctaccagacatattaaacagttaaaaaaacaaaaaaaattattatagaagtggactgttagtatgcctggtctcctgcattgatgcttaaacgctgcttaattcacataactaatttttccggcataaagtgcatgcacaaatagacgatatccaccgaacttgcatgcacgcaccagcaagaatcaagaacccatcttgctccactgaaatacattactagatgaggtgattaactgacactttgccaaaaaagcagcaaatcaacacacataaatcactcgaatctcaatggatcgcacgctgagcctaggcaactgcccacctagccgggcggtgaattcatcgctgggtaattcattcggtgtaagagcttagagggtgtaaaatatttggtattggagttgagagaggtaattcatccttttacgaaactagtgttgatgtttgctaagactactagactacgctagttttttctaaggaaaattaatggtaaaatacattgtgtttgactttttaaatcttggaggtgttactttaatcaataatttatggctaattttgctacaggacacttaaattttgtgtaatttgctaggatacatcgtaaaaatatttcatggctgaaagacatcaagtctagtaatttgctgaaggacagtttcaactcaattgaagtgagaaattcttcaaaaggacaagaatgccctagagagtcaaaaccttttgagctgaggctggagtgaagatgaaatacgatgtatgctagtgatgtacttgggatgatgacaaatttagagttgcataatttctaaattttcactctaacgtcatgtttaaagcatgtggtcttatatacattctcgtctttcttaagaatttatctctttaattgagccaaaaatggcctctagcaaaacaccagttttttaaggtgtctcttagacatgacacatttttcgatgtctatcagcaaattgcacgaattttaggtattctgtagcaaagtttgccataatttatactctctttatctcaaaacaagtctacgttcgtatatgaatctgaatatagcacatgtccagatttatatataaaagtgaacttatctcatatatgtagtattaaaataactttataaaatacaatacggttagatatttggtaaaatattagtacattcttaagtacaatattacatacgcctgagtatatactccctctgtccaattttaagtgtaaccatgagttttcgtgttcatctttaatcgtgtgtcttatttaaaaattttttataattagtattttttgttgttacgagaggataaaacatgaacagtactgtacttgtgacttatgtttttaaatgttttttaaaaatttttaaataagacagacgattaaaattggacgcgaaaaaacattgatgcactagaaaataggacggatggagtagtgccgtagagatttgccgttgcttctaatctctttcgcaacgtgttagtggtcgtacttaaggggggtgtgtgtggtttgcgagttgtataggtcttccatctaatcggagaaaaaagaaatgtgccttttttactatacaacgtccaatggtctgacactcttgactgtgtgacagtgtgtgcggcttccagctctcttggcaaatccttccaccattccacgcgattttctcggctcggcagtcggcacccgccatctcccgcgcggcagcgccccgcccgcccatgaacggtagtatatgctccgtgttctcctctccttccctcactctcactctcgatcgctagcccccgcgcgcgcgcgcgcgcgggagcaacggataccaattcgccaagctttttgctcttctttttgtttctcactgtgaccactgttaccgccagctcgacgccttcacaaatgggcggccaccgcgcggctggtgctcctcctcttagccgctgctgcggcggcggcggcggcggcggcggggcgcagggaggtggtgacctcgccgcacggcgccgtggcggcggacgacgggcggtgctcgaggatcgggcgcgacgcgctccgcgacggcggtaacgccgtggacgccgccgtcgccgcgtcgctctgcctcggcgtcgtcagcccggcgtccagcggggtcggcggcggcgccttcatgctcgtccggctcgccgacggcaccgccctcgcgtacgactcccgcgagaccgcccccctcgccgcctcccaggtcagcgcgattccgatcctcccaatcactcgcgtacggtagcgtacaatccggtgtagtcaaagccggcgacttcacttacgtttacgctattcaattacatatggttttctagataatgagttcaatcacatgattcccgactgattacgatgttctaaccactcaacacgatatttaaatggttctaaaccttcagcaatgctgactgaactgaagaattttatgatatcttattacttggatatatatttctctttatctgtcacaacttatcagtaaattaatcaactcgagagcagtcattttccaatccttgttaaaaagcacaagacttggccgaggtctccaggtcgtctgattgatctgtagaaaatgcatggagtaacaattagtcatgccaaatgttactgcttatgctaccactatccgtactagtccactaagccagtgggtagttggttgattcacatggtacttgttgcttcctgatttccttttcttttcctctcttttatgaaaaacgaatgcttctggacctgttctattctattctatcacaacaaattaaacagaaaacacagaaaagggcatgagttaattgacttagatgcacccccccccccctgatagctagcataattggggatttattagtcatgttgcttcagtggcggatgtgccatggagtgacgggaagaacaatgagcataacgagccatgtggctggaaacatatccttgtaggtgaagtctgtacatgccctagtggtgccatctactatgccggtccttgtcttggttcgcctctcatcctgttgaatgtgtctcacgctatcgtccactagccgtctgccccctacatttcgcaccattcatggctggtccagcccgaattctgggaaagccaaatggaatccgagttagggatagcgcctcatgcagcgatacaatcacgtcaatatcagttcgtgttgcttttgcgagggcatgtgcagcattgtagaagcgagaaatctgcctgccagtcgttgatcagtgagagaaaatacacaccaagctgttaactgatcaaacacatgccacgtattgccatgtatttttcagaaaacataattagaaaacgaaattgctaaatggcatttgacggaaaatcaaggggaatttcttacagattttgaaccacctgatttgcttgaagattcgtgcacccaaatccttctccagctccgatgaatccatccccagtatcagggaaactattttaacagctcgagtggatgtccacccgtttattgcatgtcatctaaatggttatgaaaaaaattaaaaaaatatgaataagatagatcaatatgtaatgtatcaatccacaaacatgcaagttaaaattcaacttctacagattgtaataaaaataacaaacaaaactcaaattactatatgtatatttacagttaaatttgttgtttttgttacaacttgtagaagttgaattttaacttgcatgtttgtggagtgatatattacatattgatctatcttgccaatttttttaaaaaattttcgtagccatttagttgacatgcaataaacgggtggacgtccactcgagctattagaatccatccccccagtatcagcgatgacccgcgacaagttagggttggatcctaggttgggatgggggtgggaaggggtatggggatgggaggcagcggcctgcggcttggcggttggtggtggacatgtgagggtggcgaggcaccaccggcggcggcaccgaagccgtggggatggaggaaggcgatgggccagctttggtgacggggcaaagcaaagtgaatgcttaggagagtggtaggtggtggcagattcggtggcagggagtcacgagagacaggaaagatggcggatgaggacacacctcatcactactggcttgaggaggagatcgtttggggaggcctcaccgaagccttctgggcttccagctaggtggcgatggcaacgaagggggtggggtggagttctagtcatgtgcgatggtggtggattgggaagagggagggttagggttggggagaacgacacgaatcttaaagtaattcaatggcctacaattcgaaagatttaggagagtgttggtcgcatggtttaagttaatctaaatgggttttaatggtaagcagaagaaaaaatgttttatatactcgccaagccttgaactaagtgtgtcaatttgagtattgaagtactacttagaaaacaaagcagaaaacaaagcaccaccctaacttttgttaggaaatataagagatatctaggagaacctaatcgtttaaaataaaaaaaaatgttgctctaatttgatccaaagaagactggaaccgaagtggcagaaaattaggagggtatatccacaagcaatcaagtatccatagtaaaaagaattgtcctaattaattttcttttactggtattatcatgctccattctaaacaaacagagttaacgctagaaatgtcaattgtgcattcaggatatgtatggtggcaacgaaacgctgaaagcaaggggagctctatccatagcagttccaggggaaattgcaggtctgtatgaggcatggaagcgccatggcaagcttccttggaagaggttagtgatgccagcagcaaagcttgcccgtgcattcagagtgtcaccttatctgaggaagcagatggaggcaaccagagatggaattctccaaaataagggaataagtggagtgtacacctcaaatggagatatccttaatgttggagatgtatgccgcaacattaggcttgcaagaacactggtggctgtcgcggagaaagggccggatgtgttctacaaaggcgcagttggtgatcagctggcgaaggatattcaggaagttggagggatcataacaatggaagatctgaagaaataccaagttaagatacgtcggccacttttagagaatgtattgggactgacagtattaagcatgcctcctccttcagctggtggtgctgggctaatgcttgtaagttttctttgtactaaattttgttcactgttctttggtagcttaagtttgttgatttcaggtagcaaatttaattagtagaatcaactctatcggataatagaacctttaaaaaaatcttaatcttttctgcactagtattatcattttatcttgatacccttgctcaacaaacaggttctgaatatccttactcagtatggcctccctgctggtttttctggctcacttgggatccatcgtctaattgagtccttgaagcattactttgcaataaggatgaaccttggcgaccctgagtttgtaaatgttaacgaagtcgtctctgatatgatgtcccctaaatttgctgctgacctgaagaaaaccatctatgataacatgacatttgaccctaaacactatggtggcaggtaaagcttctcttttgtgcacaaatatgtcttccttttcaagtagaactgtcagcaaagtcctattaaattcctgcatatactagtatactactattactggtgaactaatttagtaatctgcattattacaggtggaacatccttcaggaccatggaacaagccacctgtccatcgtcgacagcgagaggaacgccgtttcgatgaccaccactgtcaacgcgtactttggatccctgatcctgtctccgagcacaggcattttgctcaacaacgagatggacgacttctccatgccggcgaacacgtcggccaactctccgccgcctgcccccgccaatttcgttaggcctctgaaacggcctctctcctcgatgactccgacgataatactcaaggtgaccaccacctcgcgcaatggaaaataacacgaactctcaactctgaagaaagttcatttgaaatgtctgaaaagttcagtcttctgaagatggttttttttgttctgattggtttgtgctttatctgtcgtaggatggcaatctgaaggctgcggttggagctagtggtgggagcatgatccctgctggaaccatggaagtgctcctcaaccatttcgtcaagaacatggacccgttgtcctctgtcatggcgccaagagtgtatcaccaggtgatctgggcttaacgtctgccttttcttctcttcgtagaaattcttctttctgatgagctttggtttgattcttgccatggctgtttgccctctctggctggctgcagctgatcccgaacgtggtccagtacgagaactggacgacggtgaccggcgaccacttcgagctggacgccgcgacgagagccgacctgcggaggaaaggccacgtcttggagccgctcgccggagggaccatcagccagctcgtcgtggacgacgtcgagcgccacggcggtctgaccgccgtcagcgaccccaggaaaggcggcttcccggccggctattagaccggagtggctgagctatagctgcctagctttgatgcagcgatgattgcttgctgcgccattcatggacatatttgtacacgtcgttctgttctatgattctatcgaataaataatactccctcagcttataaaatgttttaactttgatcaaacttaaactgcttcaaatttaactactccatccgttttacaatgtaagtcattctattatttcctatattcatattgatgctaatgaatctagacatatatacctatctagattcattagtatcaatatgaatgtgaaaaatgctagaatgacttacattgtgaaacggaaaaaatagtttatagacaaatatagaaatatttataaacttggtcaaacttgaagcagtttgattttgattaaattcagaatattttataacttaaaacggatggagtaataactgcagtgaattttaaatttttgtttgaaattgttagcgatcatccgtgcaaaataagctactccagtactgttttgtggacacgtttgtcacgtgacacgtcacggtgcgtttgggatattgagatggcccagatatcccatgactactaaggcctggactggacgtggctaagtggttgctcctagtccgtggcctgtgggtttacggcccacttgaatcagaattggcctgcgccggatttggggtttggcacgtactgtttttttttcttttttttagacacactacaaacgcaacaaacgcagacactcaacttaaaaaaaataataataagcagtaaatacaagtattggtgttaagtctaagacttaaacctaggtgaactgatttccccataagaaacttaatcacttgagttatgttaaatttacaaacctcatgctcatagcaggaggaaggaaaaaaaatagcgaatcgtaggagataccacgcgtacatgcatgtgtgcggctgtcgtctgtgagactgtgacccgtgttgatcatggtcggcggcggcggcggcggcgtgccggcactggcaacgtcgagagccactgtgtcactggtcgccgatcgatggaaacgcatggctaggactcatgagaaaatcaagttatctcctgtgttatctaaaaaaaaaagagaaattcaagtttcaaatcctgcgtagaaggagcaaggaggagggcacggacgagacgagagtgagtgaccggagagcgccggcaggcgatcgatcggtgtggagcgttacttccgaagagtggcagctgctatcacaatccgtcgatggtggctcagttaggtacacaaggaagcactgatttgaacatttcatatacgcattgtttcgatccatgtcgactcacaccccactaattaatctattgctagtacaagctagtacttgacttcaacagctaccaaacatgccagttaatttacttgtgacgtatcgctgggaagttaatttttcatcagttctcacgccgggtcaaggctctccctatcggtctcagcgtgcctgtgttgtgtacgtgtcatggcaacgggcaatggaattcatgcaccaacccaaaatcgagagagcaagagagttacacgccgtttacctgctagctaaccaagactccgactcttctattagtacctacacatatggcagtgagactctctctagtaattacagtaagacacacttctcagaaaagaagtacagagcttgcccagagagaaagagagaggtgaagatggaatccatggtagcaggagacctcgtacaggcctacgtgttgaagaaagcctgcaaggagaagatgagggccgaaacaaacgccggcgaggcagcggcggcggcgatgacaggaaagaagacggcggtgggcggtggatcgtccgaaaagaagacggcgcctgaggttagcaagggagaacgccggggattctctgggctgatgatgatgaagaagaaggtgcacccgaagtaagctagcagatcgaactagctagctatcttcaaaccaccactgattgcagatttgcagggcttggtcatcactcgtcagtggcacatagttgttgctaggttgtttttgctctaaattaagcctgtaaaactgttctcgtgtttccttgtttcgctcttaaggagtgcaagtgtataattatggcaatacatgaaggcatgaaccagcaaatttcttggttactttgcaaaatgttgtggaatgttttagtaattttctcggagaaggaaaatgggttttaaggggctgttcaaattgatgtcatttttaatcataccattttttttctgacatagttgctaaaaatatctctacgtttagtttgttgccaaactttagtaaatacatagaaaatcttttggtaaaattttgataatattactaacttaccaaaattttagcaatatttattttagttacaatttgaatagaccctaaaaaatcttcaacacggaagatcctgacttctaaagaaggacatatcattagttacagttcacaagctaacaaaaattgcagcgtacgtgccggccattcagcaagctgcacaaagcttacgacaagccaagggacggtaacagcagcttacctaagtacctcgtgttacttaaagacacaaaacaaatattctagtaccctaaactcctaatctccttttcacctgagttctggaggatttcacgagcatcaaactgcattctgtatccggccgctcttcgtgctgtggtatactgtcctgtctgtgtaagcggacaaatagcactttgggccataagttgggctagctgtgccacgctactttatgggattctttatattgggcctaagtctccttgctaaagaaactatccaatttgattccctcaactataggttgagtctaattcatatccctcacctgcaaaatcaggtataacaacacctccaactattaaaacaagtgcaaaatgattacctcgataatattgatggtagttttcattgacgtgacacattgacatagtcttcatcctacgtgtcaattttacaagaaaaaaaaccatgggaccacatgtcagtcactagggaaaaaaattgcggtgccacttgttagccattcctcctctcttctctctcgtcccatgtaaatggaggggtgatggcgaggagtcatgcagaagtaggcctctaaagcaacggcggaggacagcaggttaacctagtctcaggatgaggagaagaagagcacgatgtggaggagggaagaggagcagcatcgctacgctcagtaaggaggtggcccgcacaaggaggaacaacggtggccatcctcgtcattgttgccaacctgccatcatcgctgctggcctcttcgttctctttcctcgtcagcctgtaagagaggagggtgtgaaggtagaggagagaggggaagagaggaaagagatggggtagcgctcacttacctagccaccgctagccagcactggcaggaggagcgcaacgtgatgatgttcgcaaggaggagcacgtgctaacggcagctactgtcctcttgcctcgagcctgggtggccgcctctgtgctattttcttgatttcgttgaagatttggtacgaaacatgaatgcccgattcattgatttgttgaagttttggcgtggttgcagatggcggtcctatccgtgctagtgcacgtgaacatgacgattgtgggagaggagtgggtcagggtatgtcagggtgcttacaagcactgcttttaggtggctccatagacacgtgcaccttgcactacaaaccgacccgcgtgcaggccagcaatgatgctcgagctcactgatattccatcagtgtgctcatgaaaatagataggagggtgtcctttgtgcgatgtcccaaccgaatcaattcaatggttagggtggtgacaagatctgggtgaacgaccgatctacaactctcatttaatctccaacattatctttgtggttttcgtcagccgctatgtcagcgaaattcgaccggtataaatgttatacggaggtactgtttttttatttgaggaagacaagaactatatatataacttgcaagctatggggataaataacggttgtgtatatttttgtcaactatagattaagcttatctttatctttaggctggtaatctaagtaaatttcttgttttcaattaagctatgattttataatacaaattaatttaacatgaaatgtttttaataactagttatagtttctttaaagtaaaggacgaaatgattttcattatcaaaagcaattcatcttgaccaacttccctcctgatatgcatactcgggcatatactataggaggaagggaaaaaaaacagggccggattttttttactccttttttcatgatgcatttttctttatccacgatcatcaagtgcgcggtgtgcatgctaattagctactactactaattattgtttcagtacgtagtagtactagacagtttgcatttgtacatcattagtcgtttcttgatcatggccgccgtattgttgccgcagcgcaggcacagcctcctttgctggagaagacgacgacgaggcctccttattctttccccacagtacgaaatacagcccaatgattaccagagcagatcctatcacactgcatatatgtatatatgcacatgattaatgccaatcaatttatactagtaattagacatgatcgatcgatgtgatgagcgtaactaacgtacgtacattccaagatggagttgctcatggagaacgatgacgttgatagcagctgcgatgatctggatgaggggcgtgaacgccgtcgtgaacacaggccctctctgctccacgcaccatgacatcgccaagaacgctattcctgatccaactatcccctgcatttatattcatatcatactacaaaacgctataatgttgaatactatacagtttacgttactgacattagcatgatatctaggtatatcatgtgtatattatgtctgctacctgacgccagtaaatcaagtattccgttggaaagtaacgggtataggcttcccctactcgtcctccattcatatcgatcacaattactgtagcaattactactaactaattaaggtgtatatatcaattaaacgtaccacaaagagcacggtgatgatctgaagcttcgttgttaagatccatggggataagctaattctgtcgacggccaacgcgactgcagccatctgaaggaagctgagcaggaacatcagggcagtgcccgagtagagcgccgggtacttcttggcgatcctcgactgcaggatgaaccacagggaccagcaagctgaaccgcccagcagcgccaccgacccgatcgcccacctgtgcgcgccgccgccgctgccatgaccgacgactgccgccgttgcagaagaagaagatgatgacgatgatgatcgagcagcagcaggtcctagcttggtgagcgatggaccctggtagagagcgaggatcatcgctccgctgaatcctaacactgtgcctcccacttttgctatgccagctcctgtcttcaggtccactttctccagcctgcactagtactagcttagcttacatctttccgaggaagtgatttcatgcatgccacctaaatagttataatttttttaaaaaaattgtcatctatattgctaattttttttaaaaaaattaatatctattttgatgacatgcaaacaacgaaaggatgtctccttgaggaataaaaatccacatcccatctttcaaatatttcttcttctttagtactactcctaagtagttactccctccattccaaaatatcactctgtccaaatttatagtattaggatatgtctcatccggttctagattactatattctaaaacgagggagtagttaggttgttaattgcgtacccataaggcagtgctacaatgaaagtgaagatgggagtcatgttgatgaaggcgcaagcgaatgttgctgtggtgtactgcagccccaagaagaagagccattgggtaagggacgctctgcatgcaccattttattattattaattactatgtaattaatcaattcatttgttagagaaaagaatatatatcgatctttcaattcatcaagttaaaattgctagctactactagatatattatacatatatgaaaatgacttgcccgagcactgcactgaagaagagacacaccaagatttcagccgtaagctttggtcttgtcttcctgcatgcatatttggcacatacgtatcaaccaactagtaattaatacacatatatatggtactatacagctgctagctagcaatatatagtagtaccaatactaatcgattaacgcatatatacgaaattaaaacctatcaattaactgatatgcatcggactaaacgaataactgccatttatacaaaacacttatcctgagcacactcaagggaaccatagataggtaagtgaaatccaattcatgaaataatttaatccatggacggcaccattgtggtaaaggtcgtaattcaagtgaatcaaaaagaattaagtgtatatttacctctcccggaagtaggcgattggggcgaggaagagagtggcgatgagctgacggagcgtgatgaggacggtggagcgcatcccctcgttgaaggccatcttggtgagggtgttcatcaccgcgaacaccaccaccaccccaaccattgtcaacgttggcttccaactattacagctacccattaattcaggatctcttgaccataatcttctttttatctggctagagcttagctatacctatctgcaaatgtatatgtgtgcttgctaatgttgctttcgccttgctatatggcatcaagcatgctgctggtggcaacaatttatatgcatgcctggcctccaagtgacaatttgacaatattccgttccttgctttactacatatatcaacatatatcgcgcggtacgtacgtatttctgcattgctttaattatgtgcactcaattagaaggatgccaataagatattatagtattaattagccttactttcttacaccactcaagttgaacaacttatcatcttcatgcccaaaaatatttttttaagaaaaagatagaggaagaatttgttcatcagctttatatatgcattttctctttaaaaaaaaaagaaaagaagaatgagaaggttggatgcttggctggcatggaaaataggacaaggtacgcgtttagattacataacaaggagtaatatatgtatgtcaaagacagtagtaatgatgatgagattttcaggtattgtttggtgccacatactgtagtatagttagtattatatataaatcatatcttcaggttagtagtaatgatgatgagatcttcaggtctgttcttttctccttccttattagatcgatcatatctagctacctagtagtgattaattaatttgtcgtgcagttttaatttgatcacagggagagagatgctggctgcatatatatatatatatatttatcaaagctggcaacatgtataactttatagggattaaaaaacatttttattctgaaagaaaatgagatagatgctttaatttctttggtgcgtcatccgttgttggtcagcaaggtgactaggagggaagggggaaaaaggttaaagctgacttatagtatatgccccaacaaggaaaagaatgatcattaaaaaaacaaacattaagatggaacaaatatatatagcaattaaactatataaatcagataccatgcatagctgggcctctcctctcagctagagcatccgatgctccattgaatactagtagaacattcaatgcacgtacgcatgaaggaattgatccgatgtgtcatttttgccggatggaacacatgggctggccgggcgaccaatttatgttactaacaattaagtttttctaaggatggcacgtcattgtataaggagatactaacacaattatgttactttagtcttcttcagggcatcttaattaattactctaaatattattttcttccgctggaattcttccgtttgcaagcgaaagcaaccgtgtcacacgctgtcacttcgtaccggccatactcatactcatatagtcatattataagcatcacatatgcagtaatgctctttttttataatggaataacattttgatatttgtttaatgagttactacccattattataaagtttacgcataaataaatccaacgcacactgacgtgatattagtgaagtagtgcattaatatgctgatttttatgcccccccccctacgtcatataatatatgctaaccgaccaggcatcatatcagaaacagtaaaaattcaacctttgtgtacgtgcgctgaatatattatttcctctgcttttgcttgctccttttattttccaggaacaatactgtatgatgcttcattaattaagcgtattaatattcattttattttatgatacaagaaaatataattgattttatttatatgaaatgaaactttgcacgatcgatccgtcaaaagatataggaaagggagaaaacattgcacgatggccgtgtttagattcaaaattgttttttcaaacttccaatttttccgtcacatcaaatgcttggagcattaaatatggacgaaaaaaaccaattgcacagtttacatgtaaatcgcgagacgaatcttttgagcctaattatgccatgattttgataatatgatgctacagtaaatatttgttaatgacagattaattaggcttaataaattgtctcgcattttacaggcggaatctataatttattttgttattagtctacgtttaatacttcaaatgtgtgtccgtatactttacaataaatttagcacacaaactaaacatagcctatgtaagatttcgatcgaagtggaaggtactgagatatgctggtagccgacactgacaattaatggtttgcaaagcaaaggcattcgatccttgacgttctatgtctctcttgatcgagttaattcgataaatttcaaatcttttttttcccttttgtatgcgggccttgtaatcatcgtatgaatatttttcaattgtttggaatcaaacgatggatggatggagagtatatgtacttctagctagccctttattttagttttccccttaatttcgcaaaaaaaaaaaaggcagagaagaggaagaagaacaagtatatattccatttgtctaaatatttaacgttacgaggaacatataataaaacttccagaactttgacatcaataattctcaaatattcaagttctttttaaaaagtgatatatgtatatttggcttaatattttaaacatattatattttataaagttaataataaaaagtaatagttggagcaattgaatcttattttaaattatatatatttataatcaaatcatatcttatactaaacgtcaaatgttagttaaatactgcatgcaattaatccgtgcgtatatgcataagttagctcatatatatatatatatatatatatatatatatatatatatatatatatatatatagtgaaagagcatgtagtctagtggttgtagtgatctgagtaacaccctgtttcataagttcaaatctttggctaagttccatgtttaataggttaaattcctactccctccatttcataatataagagagataattggtgaatgtgatcacatcctagtgtaagggagtaatttaaaatggctgcataatatatccggttggatataaaggccgaaaaaaaaaacccttccaaaaaaatagttatatataggaggatactgtatcactggagtatgcacgtacgtatgcagtgcactgtttgactgacgtactataaggtaggaggactaacgaatattgatcttcatcgaccattcttcttatcagtattcgttcgttcgttcatttatttgtcatcgatgatatgatccatccatcattccatcttcaaccgattcaattctcatcttccctttcacaaaagaaaccgaccgacagacagagaataactagtccacgtctctgcatagtgtatactcctgctcccgtggatctgatcttcttcctcaatcgtcaattcgtcagcatactgctcgcttactatatatgacgaatcattctgcccggggtttgataaaataaatctacatcctattattaattcaagatctacagattattaaattttagcatattttgttttaacaaaaagtagcacattgtgtgtacattaaaggaaattatatcattttctagatatttttttaatttctacataaatttattatagcttttgatcccacggtgtcctttttccttcctaaatagtaggaagttggtggtggggttgtaagatcaaaaaaaaaccgagcttaccatagggaggtgaaaagtgataacattagcagaagtcaaataaccaaacttcgatagataaaaaactcaccccaaccttaaaaaccaaaagatcaaactttgacactctaaccggatctgtacgggtggctaatcgggcttagaactggtttgactgaagtacaattactagttcgatcgtcagattaaaaagaaccttacatcacttgtgtaaaatcttgttttctctaaaaccagccattagatcgagctctaatcttgacaggaaactaagagacaaatctatcgaagggtcatgcaaaagtaataaacggtttaagagaaaacatctcaaaagctagacgtctcagaaatttcatcaaatatgaataaaacataaattttaagcaaattcgagtcaagcaaataccaatgaaaccttttagatctgatctataatataatagaaatgtttcgggtggattaacttgaacaaaaccataacaaaactaagaatcacaaattaatgccaaaaacgaaaaaaataaagattacaaaaccagaaaagatcgttgacgccttgttgattgaatatgatatttctttttcaagtagtattcataagacggtcattgcacctctcacgaatttctcacataaccctaacacaaagagtagtaaactctttaatctctcaattgtggcttaccctcaatgcatagcctcccttattcacatctaattacaaaatcaaactaaactccaactctcttgaacttggactccaatccaaattcaacttatccatacgcacacaattccccttgtcacctccatgtgcattattctctagccttggtatccacatgatctccttgatcttctagaactcaacttctaccaagtctagtcttgatccatcatcggcaatactctcgtgacctcaagcaacagctacacgttaacaaacaaagaaaccatatttgagcacaagatcttccccaatttgactcacatatatctcacgtatagaaaccatctaaaagtcataaacatttagcaatcaacatattcgatagaatcaacccaaaactgattcatcaggagtttgccggtctaagtgctccctcccatggcagtcagatcgctggccccatggtggtgagaccactcttgccatgaaacttcgccaaattcaacatcacttcacaaacatcagctcaatcacttttttatcactcttaataattctttatcaccagaatcaaatcaacaccttaatttaataagggtggtgataaattcaccactcaccaccaccgctactctcttttaaaaagagttagaatagattactaattctctgcagttgtgatagttcaatccagttgaccaactataagatgtttttgattaattggggagtttcttttcagagatcccaactagtatacaaacaatatgagaagggctacaatgttttccaaaaataaaaaaaacacaaatcgcaacgcacaagggtcaattactcttttagacggtgcccatatagaaagcccaccgggcttgctttcaaccgtcatgtgggctaatgttggatttaagtatcaggctttaatgtttgatgttaatcacatggcaaatcggtgatgcaagtgtagctcaactggttatgtttttcttgtggtggaatcaacccacctgagttttagtcctatacttaacatcgatgctcatatttacatctaattattctttcgatggtaggtggctgtcggtgacacgggaccaggagtaccatgactagaggcttgaggcagacataatcgcccacgtggcctggcaccctcgggggacgtcgggcccgagggtgacgtgttcgccctcctcttagtctccccaagggggtcgggccactcccgcctcggccccgagggccgaagcgccccgacccctcgtggtttctcctccgcgtgtatgggttaggtgagcacagcggggctcacctaaccgcatttattgcggtttggttgaacctgtcatgccgcatgtaacgcagtgcagtgcgctcgtttatccggtctgtgacaggtcacagaccggtcagatcgcggtcaggtcgcgacaggcggtctgacgcacgcctcgccccatcccgtcaggacgagggcttctaggcgctcgttcccagacggagctagcgtgttacctcttagagatggcacgttagtcccggttagatatatgccaggcttcattctaaccattacagacaagatgttgtgtgaagaagggcaaacatgcatattgctaagctgacgcgtggtggacaagaatgaccgatttgtgaccagtctgacactgatcatgtcgtcagcagacagccacgtttcccacgtcgcacctgcctccggcggaagtggaggtaggtatgtgccgtcccatcagaagatcattcggacagcaatgatacaaatctccgtccatttatgaagagagggcaagtccagtttggaaagggagagagggtgcatgtggtatccccttaagatataaaaggaggaccttgcccactaagagagagggacgggactctggtagattgagaacggagagcaacggagactctggttcatactttgtagctccttcatacacagatccaccaaaaacacaggagtagggtcttacgcatttcagcggcccgaacctgtatacatcgcctgtgcctcgtgtgctctttcgactctcgcgaacattgtacacacagagagcttaggatttcaccctgagcccccggtcgaaccggcaaaggggggcctgcgcggtctcccggtgaggagccccgcgctccgtcagtggcatacctattgacaacgaagtgcccgtgtggtgatcgacaccttcattaatctcaagatatgttggtctaatattttaggggtgttaatagggatagggtgtgcgtgagttttttcgaggtgttcatatggatatataatgtgtatatgtgttcctatagggtgagtgtgtgcgcattgtgagtacttgtatttgtactgtgtttaaaaagaatcatattttagaggtgttcgtaggaataggatgtggtgaatcttttagaggtattcttagccatatggtgtacttgtgtgcccgtggtgatgggcacctttgtcgatctaaagatatattgattcagtctgttggtaaaatgggaactgtaatacccatttacctggtaaaagcattattatcaaataaatagtatgctcagaatgtccttaaaaataaaaaaggaaaccctagggtggcgtagctaggggcccactccggagggccccaggcccacctaaaatttcatacatggggttcactccggctgaggaggaatattgagtgtatggcccaaaactctgagtatcaaagcagcttggggcctagcttgggtcccaagcataccctaaagtatataccttaagaatgtaacctaaggtctgcccggggcccgatcccattccgggccctaggctcaccctagtcctcgcaggttctacggttcccggcaagaggagtgtaaaacatgcaagacctatatgccttaagaggataaactatggtctgcctcgggcccggccaagtcctgggcctcaggctcaccttaatccttacaagtcacgcattactcaaggaagaggggtgacggggcttgccaagcataaaggcgtaaaccaaggtgtgcttcgggccccgagctcaacttggaccttgtatagcttgcgttcctctgcttagagggttgtccaaaggtacaagacgcacaatcttaagatattcttccatcaacaacgccttcgagaagctcctcacggaataattaaccttctttaagtgcgacagggcgcgatctcagaaacttccaggaagttggccgtgctccacagccaactataaggtagcacgccccgccataaatgaaacaggtttatggggggattcccgaccagtctgagttgaaaggacgtagacaagacgccagagctaagtcactttggacggtggcgcctgggacacgcgtcgcacatgccccatgccacttcatttagccaaatagacagataagtactgtggccttgtttcgggcaagtcgggcctcgtcgagcccaccacgcaccacgtggtgagcacactggcgaaagctcaactatttcagacgaagcccgggagcccggggtaatatgaactgtaagacttgaacggtttcttggggctgcgttatgacaccggctggcaatgacaagacggttgatgagacaagactaagagtagatttgtaataatgtgagcccctctttggactataaaaggaaggggactagatacagatgaagggttggattcttctaggccaaatctattgctttgtagccgaagaaggcctccttcgtacttagttgatctagagaaaaagaacgaacaccaacacagaagtaaggtattacatcttcgaatggcctgaacctatataacctcctgcctcctcctcgcggggtggtcagaccccatgaatccaccgcgatcgcagataccatgaaccgtacgccgactaaccccctggccaaatcttcactcagggagagaggtctccactccccgctgtctgagggaccacaccctccgacacattcttttgaaggtgttcatgtagatatttagtgtgcgtgcgttcatatgagatgaatgcgtatgcatgttgtgggcaattattatttgtcctgtgcttaaaaaaaatcatatggcagattgtgttgctagttccgttgaaaacgagagacaaaatcatgctaccaatttgatttgtgatcttccgatctgcttcgcgaatggcaaactactagtactccacttcagtacaaccaatcgacggttcggccataaatgccactgacttcagctgtccaccatccagcctcccaaggttctggatcacatcgtgccaccgtgccggctcggctcacgcgtggatggggaagacggcgaccgaaggggacaaggaggcggggcggggcggcggcggcggcggcggcgcccgccgccccgtggtgctggtgacgggctgctcggagggcgggatcgggcacgcgatggcgcgggcgttcgcggcggccgggtgcgccgtcgtggccacggcgcggtcgcgcgcctccatgcgcgggctggagggggacccgcggtacctgctgctggagctcgacgtgcgctccgacgagagcgcgcgcgctgccgtggccgacgccgtccgggagctcggccgcgtcgacgtgctcgtcaacaacgccggggtccacctcgtcgcgccgctcgccgaggtgcccatggaagagttccagcaggtgttcgacaccaatgtctatggtaggggtggaaatttttgctcccttttttttcttctttgttttaattgctgtctctcgtgcttgctggtatttggtgattgcgatgttctcgaagaagacgggattttagatcctgcgatcaggtggtccattaagtatgattagtaggcaattaaaatgtttgttcttgtatctatcgattggttgagtagtacaacggcagaaaagttgcaaatttaggattactttgtcaagacattttatcctgttagtgccagtactaatttaggaaaagtatgtaaaatcttctgtagtcacttgcagcactggattacttataagtttgcaactaggaaccctatgttagcaaggagatgcgttaatatttagtagatcacactgagctggttctagttgtgcaccacaatgaaaatccaaccaaaagaatagcttggtggcatgatatgtttagtaacatggggtttcattggcgaaattgcagtaccaatagttgaaagatgtattatacacttgcacactctaacactagtcagatcagtgctcccagggcacgcttcctgtcagttgcacaaattgacagtcaaagtgcagtgacgatgctgcgatgatgttgattgggaagcaactggaatgtggaattgactcattctctcattggatctgacaaattattttgtcccattaagtgtatgattcacaatagctcttaaaccaatgtaaaggtatttgaaaggagcatagcctgttaacctacaattaggctttccacgctgtttcatacgctgataaatagtcttcaaccggacgtaaatatatgtaattccaatgtaaaaatgtatgctggttgaactgctgagttattgtttcataatgctagaatgatgatggaggcgcaggggggaatagttatcaattaggctttccacattgtttcataatgcttgaatggttcatggcttcatgcttgtgcaacagcttgtttgagattacttacattgggcctgcacttatgaaaatgtctaaatgactgtcttttcatctacaggagcaatgaggctgattcatgctgttattccccaaatgatagaaagggaacaaggtacaatagtgaatgttggaagtataacagctttggctcctggaccatgggctggtgtatattcagcatcaaaagccgctcttcatgcattgagcgatacgctaaggtctgtacattcaaggagcactctatactatgctggtattattatgccacattgtttttctctccgtattactgctggtttatcactactctgagaacttgctaaattgtttgatcgtgcaacaaaatgcttttcaacagaagctataataagaaataaaaatgaataacgatacaatagtgtgagactattcgaaattcccatttgtttgttttccatgtcatcttcttgtatattcagttcttttcgacttgcaccgcatgatctgtggcttttgacgctgaaattatttttcacttttgacactgtcagttgacacgacagtttttatcactgcagactggagctaaaaagtttcggaattaatgttatgattgttgcacctggagggacaaagtcgaatctgggaagtaactctacatccaagtatgttcaaatacgtgactggaagtactacaaaaaattcgaggaatccctcagagccaggactgatgcttcccagggtcctggttctactccagcagaagacctcgcaaaaagggttgttgctttggttcttaagaagaatcctccagcctggtttgcttacggccagttcagtgctattctaagcttgttgtactatgcaccactatggtttagagattacttctataagattgtcatgaaatgctagaacttctgatgtcagtaagttcaaaggacaaagaggttgccactcagataacccgcaatacatacttgcatacagttttacagggaccattcattcaagcgaaaaggcccctcccagtgtatgccatcttttttcacctgtaataatagcggtgctagtttgttcatgtagtgccaaaggatggcaatctgaaatatgtggcctgaagaaactggtttccttgcaacctccactgttgacatggcctgcatcttcctgtctcaggaaatcaaatttcgacgcgcaaacgggtcgaacacttgtgatctgattgtttgaagtttgcattctactatgtctggcagcatctgctgtagttggggggcgtcaagtgcacacggtgaaactgaccagttgcgcatcattgttcagatcagagccaagctctgcaaatatctgacgatactgcaacagttcatttggagagtgataatgcttctcagttttaagtgggaaatgaattgttttggcaaaatattaccatgaaattcttattcttacattccaattggccttaaccttaacggccatttccggcaaatgtatttttttacaacagttttgcggtaatttcacgtaaagaaatcgagtccaacatgaaagaagaacgcaactgaactggaatacttgtcaaatcgctcaggattttactgcggggcggtctcacaccagcgacccgtccccacaaatcacaagcagcgtcgtgggcaggatatagtccacgtggcgtccacctgcgcggcaaaatccgatggcgcgcgctccccattggccggcgacatatccaccctagctccccggggatttccccatcctgtggccgcggcgctccgcggcgccacgattaaatatcaactcgccgccgtgaccgtcctgctcgctcccgatcacaccgtccgccaccggaagagagagcccccctacgacgacgacgaccatggcgctcgccttcacctccgncacnncttcgcggccgtgctcaagacggccttcctcgggcgaagcgcgcgctcgccaatgccgtcggcgtcgcgggcgccaagcccgcgccgcgccgcgcgctcgtcgtgtcggccaagaagtcgtggatcccggccttcaagagcgacgccgagttcatcaacccgccgtggtcgatggctcgtaagttcttcttctcttttttcctcttcctcttcttcctcctcctcgcgccgcgcattgtgtttggctggctgacaacccgagcgcgtctcgtgtatggaacgggcaggctccccggtgacttcggcttcgacccgctggggctgggcaaggacccggcgttcctcaagtggtacagggaggcggagctgatccacgggcggtgggcgatggcggcggtgctggggatcttcgtcgggcaggcgtggagcggcgtgccgtggttcgaggccggcgcgcagccggaggccatcgcgcccttctccttcggctccctcctcgggacgcagctgctgctcatgggctgggtagagtccaagcggtgggtcgacttcttcaacccggactcgcaggcggtggagtgggccacgccgtggtcgcgcaccgccgagaacttctccaacgccaccggcgagcagggctaccccggcggcaagttcttcgacccgctcggcctcggcggcgagaccagggacggcgtctacatcccggacaccgacaagctcgaccggctcaagctcgccgagatcaagcacgcccgcctcgccatgctcgccatgctcatcttctacttcgaggccggccagggcaagacgccgctcggcgccctcggcctatgagcaatcaaccccgctctcgctcgccatggatctgacacacagagttgggtttcgcttgcatgcgcgcttcgtgtttgatcgctagctgttgcatcgatcgggcgcgtgcatgggctcggatcgaacgattggaggtcggaggagcagtagcaaaatgtatcttgttgtgttcgtggccgcttttgggttgggtggtgtgcgtgaaccaaatgggggaattaatcaaggagttatttttttttatttttcttcccagtgtatgtaccatatgtaatatatataattaaggctgcaggatgagcaaggatatttcattgatctcatggtgttcgtgccattcctttgtcatgtgcactctgtttggccgcttgcctgcatggcgaaattgcatcagctaaaggccgcattgctacgaaatatctcatccgctcttcgaggttcgaaatgaccatagtattttgtttcttccattgcgccgaaggaagaaacgtgctatagtagctctggcaaagataagtaggagcatatggtaagaactgaagaatactctctctgcaaactgaagaactccagagtacctgccactctttcttcaatggctgcatttgccttgaagcagatacaacatcgatactgcatttggtcgtaacatgagctgatttcaagtacaggagcagatcacattcccaatctcaaccattgcaatacctgccggtaccaaactccactctgcaaattagtgcaaactagatacctctgctctgcttggagctgtcatttttttcaatccaaaatggaagagaacgaaattaactaattaaacaggcataaataattaacaaaactccacgcctatctatatcagattatccggcactaatccgagctcgacccccagtgacagatgggactgtccgggaagtcgctcatgtccaccacttgcgcgacaccgaggagaccctccagcatgtcgtcgtcgtcgacatgcacggtctccggagcgacgctcccatccccgccggctccggccgccacgtccttcccctgctcgccgccgccgccgtcggtgtcggtcccctgcaggcagctgtagtagagcttcatcagctcgtcgatggagctgcggtccgcctccgggacgacgtcgatgtccgccggcagagagagctgcatctcctcgccgccgccgccgccgccgccgccgacctcgcgcttgcgcttgtcggcgtgcgactcgcgcggcgtcggcccctcgttgggttcgtcgtcgtcgtcgtcgagcggcgtgatgtggagggagcgcagcgcgtggcggctgagcgcctcctcctgggtgatgacgcgggaccaggtatcggcgtccctggcgctcatcttgtgctgaagccgcttggactgccacacgagcttgcgaatctggtcgaaccgcgggctcaggtgcttgatgacggcgctagctctgagcagggagatcttccacgccttcttgaggtcgtgcggcttccggtacggcggcgggccctggctggcctgcgcctcgccctgcaggccccaccacgcctcgccgccggtcggccaccacggcggcggcaggccgcggtcgagcgggaagctccgctgcggtggctcgcagtgctggatcagcgccgacagcagcgaccccagcgtgctgtcctggatgtcaaggagcccgtgcaggaacgacgccgccgccgcggggctccgcgggctcccccggccgcctcggcccgacagcgccgtcggccccgcccggtcgaatgcgacgtcgtccttccaccacccgcggaggctgtcggaggagccggacaccggcacgccggactcgtccacgatgccgtacacgaacccgcgcgcgttgcaggcctccatcatcttgagcatgtggcggagcacgccgtcctgcgcccggagcatccccttccgccggtaccgcgcctcgggcggctcctcctccgccgcctcctcctcccccctgacgacccggtggtcctgcgccgcaagggcgccttcgtggcccgaccggccctcgagcttcatgagcagcatctggtccttccacatccgcttcttcaggtcggcgatctcgatggactcggacccggactcggagtcactaaagaactcctcctgctccggcgccgcctcggcagcagcagcggcgtcagcagccttggctttgcctttgtcgtccatggcggcggttggccgtggcagcggctcgagagcaggaggtttctgtttctgtggataggcgaggctttccatgaggagagcttgctgtgtgaagcggaactcgtggaaaaggtggcacggaagggtggcgggaaaggttgcggcgtgcttacttatgtacgtgcagacgttccgggcggatcgaaggatgtggaagaagctaggcttggtaggtggatttgctgtggcacgcagcgccttggagcccgaagggacttgtagggagtagggacgggagcactgaccagcgaggcactcactgagtgcggagtagggtggtggtggaccggtggtgtacggtagcacccgtccgcaccgcacatgcttgtaggagaagaatacacacgcggctaagactaagaagcctaattttttatgcttttgtgctttcttgtgccacagcgcggacgcgataatttttctgctctctaggagaaggttgagggtaatgacgagccctgcacttatctttcaattattgttcttgtagtatttgtttatgatgttactgggcctgttcagcaggccggctacaacggctgcagctgcagctacacatattgagtgtggcactgttcacattagctatgggctgcggcgcagcagcagccccggctaccaaacaggcccactagtgatctttttcatgcaattatcactcttgctgttgtttcgaaaagaactatattcattcggttagggctaacgccgggggctactgtcaataatatggtccaggggtatcatgtttggagggaagaggccaccccgaaacccacatggcacttccccgagggggatcgggcccgatgtggagtgacggctgccccctcttcgcctgagggtattaaaacttgagggaggaggctgctcctagcacccacgtggcactcccccgaagagggtcgggcccggggtagggcggcggctgccccctccatgatt

SEQ ID NO: 8340 - DNA, 16160 bp, Oryza sativa
catcaatatgaatgtgggaaatgctagaatgacttagggcccctttgaatcaaaggatttatgtaggaatttcataggattcaaatcctataggaaattttcctatttggccctttgattcaaaggattgaagctttccaaatcctatgaaattcctatggaatgacacattgcatgtagattttggaggaaatttagcaagagctccaacctcttggaaaatttcctttgagtcttctctctcatctgattcctgcgtttttcctgcgctccaatcaaacgaccattcctgtgtttttcctgtgttttgcaatcctctgttttacacttcaattcctgtcagaatcctatgtttttcctattcctccattttttctaccctgcgattcaaaggggcccttacattgtgaaacggaggaagtatatgttatgtaataaggacgtccatgttggtaaagttgtcagtacaaagctatatggaatgttttgttttagaaatctctagcttctctactttttttataactttgtttatgttaattgtcattggttaatgtctctggcttctggcagctatactctgctcaagctgccttggcaaatggaggtgccactcaagtccgcttgtatgccaaggaggcagatcgtactcccgtcaatggtgatggtaagcctcttaaattttaagtgcatttaacaatttattttgtgcaaattctgtaggaatttcaaatgcttttaatcctaactgcaaaactcctttccataagaccattgtgttgagctgtagaaaaaaatgctttctgtactttacctttgtccatcgcagtatcacaagtaatgttatgtgtttttatgtcattcaaaaaatgtttttcaatgcaaaactgaagagattacatatgttcatgagttggagtttgtttgattaaactctgctgtgtagttctgattacttctgtatttaagttgcacaatttactttgtattataattttggtggtctgattttttttttgtatgtatgaagacctattgaagggcatattttttgaggtaaagaagaaatttgagactgcccttggtgtacttaagaaggaaaagatcactattgatccagatgatcctgcagcagtttctcgttatgcccaagtcatgaagactgtaagacaaaagtaagatcacttataatctgtcacatgtattcatggtccttagtttattactttcctttgatttgtcattgtttttgtgtttattttacacatatttgtggtgattgtttctattctctagcgtaaagttcttttattaaataaatcagattttttgcggtttacgaaaccttgaattcattaagcactattgtatatttcagtatctatgtagaaataactcccatttgatattacttattacctactactgtttgccggtttgccctagtacaatttttcatcttccccattgatgtaggatgccccatcgaaaataaaaaaatattttacttgtacattaatgcatccatcctatgcagcaaaacatactctggcatatatatatatatatatatatacttctatcgagataggcttccactttattgctttcattttgtaacacttattctggatgttattgatctatttactcagttatggttccattgtgtaaatgcagggcagatcttctatccgactctgagaggattaaatataccatcgacacctttacaaagggcatccctgatgcacggacttacttgaatactcttcaggagatcaggataaagtacatctattatcattttcacaattttcatcttatgtttttctcagccccaaaatacccttgtaaagaattaaatcaatgtgatatttgcctacataacaattttattgcactatttgcttgtctgaatattcttctgttcacttaatgttacataggagtggccttatagatgatatgggtgctgaggctatgatgatggaagcccttgagaaagttgagaaggagattaagaagccacttctgaggagtgacaagaagaatatgggtctcctcttggcagagtttgagaagataaacaaaaagtatttatcttcatcattttgttatcaacttaagtttgagatagttcagatcatcatttacactgctcgtctactctctagagatatactttttctgaatatttcagtgagaataaaaatccacatgatagatcaaacgtgcaattccttaagctgcttgcatgataattttctggtttcaaaggcgattcagggcatgtatagttattttatctgaccttgctcactagcaagagttttcttgttcgctaacaagggttaagggaccaaatatactctcagatgatggtgtaaccaactgtagcttgttttttactccgtacttaggtgatcgagatccattattgctggcttgcagggaaatatattgatttttcttcctcctgtgcatgctagatgtgttatatatattttttattagttggactaacctttttcatgcttttttgctttccatttcaaaatttcaaataggcttggaatccgcaaggaggatcttcccaagattgaggaagagcttgaattggaaattgccaaaagtgagctgacggagcttaagaaggaatgtgttgaagcaatggaggttcaactaaagaggtacatctctctttatatactaattggttatctgcttgagttgggacttatcagaagtaataagagttgcagcttgctgcatgcaagctaactaatatccagtgcatatcatatcatgtgtgcgtctctattgaaaaaggttaataacacgttgacgtgctttgttatcagggaggagttcaaagacgaggagatgcctgatgtcaagaagttggacatcagaaacttcctgtaggccataaatctctcaaggcattttgaaatgctcggacactccataatggttttcttttccagtgacagccggcgctgtaagcataccaatgaatgttattcttgctttttgtaataaaaactgcaccgaagtacaaagacaagtcaacggttgagttggattgcttgttaccttcctgcgtggagaattttgttttttgtattggcaatgtgaacgccaagcagcttactgtctccctgatgatgcacctgtgttggtttctctgatgatatggacacaccaggttgaggcttaggcaatggtttactgttttcgattacattttgattagaatactttgtttcctctaaaatcattatcctaattaaccgaaggatgcattattcttaagacttgatacacaaattctcagggtgaatttaaatgttagtaggaggattaatctgtgcgcagcaatagcattgccaatcggtaaactgatctggaatgttacgttaaagtggatattatgcgttgggagaattggtaagtacggcctcgggcaggtaatcaagttcaggaataagttcacttgacgtccctcaatttgtcaaaaatattagatataagttctgaaatttatctctaagccaaaatacaagtccctcaatttataaaatttacaaaatcagatcatccaacgtcctagatagtattatgcctgttttaaacttttagctcacgtggtaagccgagtcggcgtgaaacccaggacgacagatgggaccttgaacatctgaggggattgggaggatgggagaagatagtgaagaaagcgttagccactgacatgtggggtctgtgtggtgtggggcccgtgtgggtctcacgctgactcagcttgccaaatcgggcatagtactgcccaggatcttgggtgatcctgtattgtaaattgtcgggcccgttatattggtatagggatgaattcagacttgctgacaagttgagaatcctaaagtgaacttattcgtcaagtttattgcgataaggcccagtatctaatgtaaacatacttgtagggccagatcaatcaaccaatgggccagttctaatccaagaaggcaaggcccagttatagtctaaacatatctgaaggcccagatgggacaaacaatggcggcggcccagaccaatccaacaatggtccagctcaatcttagatcctggctggaaaatacttagattctgcagaaggtaggtgcaaccatcttcattttcatcagccaagatgggacgagatgatcagtagttcaggagaagatgtctagagaagttcatagttcaggagtcatgcagtctaacaaaacagcgccagttttaataggcacaccgcgcacaacagttcatatcatatcaggctggtttgtcacaaactcacaggtacactgaaaatatgaaacgagtatttgaaatgttcaaaatatgagtactgtttatatttttattcatattttgaaatgttcatacaaaaaaaaattaatactcatattttgaaataattttaagaatttttagttatgtttttttattggcaatgtagatattgtccaagaaattaatggtcatagtcaaacagtctcatagtcatcgatagagtgtcagacaatgtgtacggagtctatattattagtgagccgggctaagagtcaaccctttcccttgatccaaaacattgggcgtgagtgatcttgtctcacgacgtcatcgatcgctgcaaattttgagttcgtatacaaagacttggcgtgcgcgatccggtcatttctcgaatcactagcttctctaggactaacctagtgtgtcggtgtaacaaaatagggggtgtgtttagttcacatcaaaattgaaagtttggttaaaattagaatgatgtgatagaaaagttgaaagttaatgtgtgtaggaaagttttaatgtgatggaaaagttagaaaattaaagaaaaagttgcctaagtaattttatcatctttaagaaaataccgaaagatatcatattttctaacataaaaacttggtacttcagagtatctcaagatatcaatttttttatgtagaatttaggtatttaggttgtgtttagtttcttggccaaatatttttttaagtatacggacacacatttaaagtattaaacgtagtctaataacaaaacaaattacagattccgcatataaaatacgagacaaatttattaagcctaattaatctgttattagcaaatgtttactgtagcatcacattgtcaaatcatggcgtaattaggttcaaaatattcgtctcgtaatttatatgcaaactgtgcaattgatttattttcatccacatttaatactacatgtgtgtgtcaaaacattcgatgtgatgtttttggtaaaaaagattgaatataaacacggccttgaggattgtaaaatttccctgataaaatacccataatatttgcattagtttgcgtgcttttgagtttacttcggcatacaaaatattcaaaacaatttggcaaaacggaatggttaaatccacatgtgttacactgacaaatttacttaaagtcaaagtaaatttcagaatagtaaattcggaggagtacacttgattacaagtacattaactaaattgttttattccttgacctgacatgactcatgcacgctagtactcctcccgagttggatcgtaattaaccacgcaactaaattaaccgaagtcgtaattaatgcatgcgattatcgttgatgatcgagattaattagcctaacccctgattaattaaggggttaattaattagctttgcgggtctcgagtccgaatccgaatgggaagagcgggtcgtagtgctcgtcgccgacgttcatcggcagctgctccaccgaccggaaccacgtcctcgccagcttcccggtgaactcgtagtcgccgaacagcacgtcgctgacgccctgcccctccgtccccggcagccacgccgccaccagcgcgtcgatggcgtccatgtacggctcgatcaccagcggccgcccggagaccaccaccaccacgcacctcacgccgccgccgcagacgttctggatcacgctcggccccggcgccgggatggtcaggttcaggttgtcgccgagcgtctcggcgtacggcggctcgccgacgacgaccacggcggcgtcgaacctccccgcgttccgccgcatgaagccggcgtcgggcgcctcggcgaagacgacctccgtggcggcatccacggcgcggcggatgccgtcgaggatggtggtgccgccggcggtgaggtcgttcccggcgaggccctgccaggtgatggtccagccgccgcactggctgccgaggtcgtcggcgtgggcgccggcgacgaggatggagcgcgcccgcttcggcagcggcagcagcggcgcgtcgccgggcttgccgttcttgaggaggacgagcgacttgcgcacggcatcgcgagcaaggtcgcggtgctcctgcttcccgagctcgccggcgaggctgaggtcggcgtaggggcgctcgaagaggcccatggtgaacttcacccggagaatccggcgaacggcgtcgtcgatccggctcatcgggatcgtgccgttcttcaccagcgccgccaggtcgtcgatgaactccgtgtacgtgaacgggatcatcacctgattgcacacaaacattcgaaaattaatcagtcaattaattatgaaatgttttgggtgtaaaggaccatttcttggatcgatatttgtctcttatttatcaatgaaatgaaaattttatgatgaaattagtttttgcatgtattaatgtgtgcactgtactgaccatgtcgatgccagccatgatacccagcttgatggacaacatgtagtctgcatgtgctggggtcgtgatcctgtcaagcccttgccaatccgagataacgaatccctgaaattgaataacacattaattaattttcaaacttaaacagatcacatcatatatgcatgaagatctcacacgtatgtactaccgtctagaaaatagaaatacaagtcgagtttgactaccaattaattttaaatctttgactaattattaaaccaataataatattttacatgcaccgatacggatgaattcatgttcaaaagcacataatctattttaaaatataaatatttctatattgtttagtggagaaaagttgccaagaaaataattgggtgcctctcattgaatgagtggtggttggggggctaaaataaaaagaaatttaaataagaggctattaggaattgcttatattttagaaaaaaataaatactagaaataattatattttaaaactgagactatttttgttatgaccatagtttatttttcataaataaaataacgaaagaggaatttactttcaaagtttatttttaaccatcaaaattaagccttatactctccatttcaaaataaaccaatttagttggagatgtgatataacctagtacgtacgacttatatccaactttagtgtattaagtttatttattttagggtgaagggaatatatatatttgtagacaaaggtatagcatatactacctccatcccaaaatgtagctatttctagcagagtgtcttgtcctaaaataaagctatttctccacatacctcctctcaaccaatcacaaccattattcttcacctactttctcttttcaaccaatcacacactttctccaattattctcatttactttcttaatacctgtgccaacctaaaaaatgactatattttgggacggaggaagtatatatatagtagtagtgcacataccctgaagcggagcttggacttgaggaaatcggtgatgaggaagtggttggcgtgcatcttgacgccattccagctggagaaggacaccatcaccgtggacaccccctgcgccacggcgctgtagtagggcggcatgtgcaccgtcatcagctcccggagcgtcgccaccgtgttgttctcgttcatgccgcgcgtcgtgccgccgtcgccgacgtagtgcttcgagcacgccgccacgctcggcctcccgccggagacgaaggggacgccgcggcggccgccgggagggatctcgccctggaagccggagatgatggaggacatgcgctgcaccaccctggggtcctcgctgaagctctcgtagcagcggccccacctcgggtccctgcacaccgccacgcatggcgcgaacacgtacgggatccccgtcgccctcacctccgccgccaccgccgcgccgatcctcttcgccagatccgggtccctggagaagaacgaaaaaaattgataatttgacactttcttcgttgcccaattgttttaattgatacttgtgatgatgatatgtgagccatctaagtaaatgaaagtgggtcagaatgtcaaataatcgaaacctattttaagaagtgttacactatcaaatctctcggagaagaacacaccatgttcatatgctctcactagctagctagcttatctttgtatattccctccctccggtgatgaataaaatccagtaaaacttttagaaaactattactattggtcttgtgttaaaataagattacgacattattgtatgatgagaaattttacgaacattttaaaacgtaactgaagataccaaagatttttacactagaaaataaaatttggtaacttaagctagctaatatttagatgtaccaaattttacaataaaaattatggtactttatttttcaaagatggtaaaattactcttatgatagtaggggttttttttcaagtcgaatctgtctttttttttccttttcaaattcagcgcgtttgagaaaccattaattagagtgacaacgtcaaaatattactagttggcgagttgggcaattagtaactctttcccttgtccaaaacgttgggacgtgagcgatcgatcgcgctaatttaaaatctcaaatcttggatctcactccatcatcatcgagcactgcaaattttgagagtttatatacaaagacttggatgattaattaatggcgtgcaatctggtcatcttcagtaaacttatcacaactagctacatatgggaatctacttaattcatgcatcattaattgagtttaattaagggggataattaatcattttattacctagtgcagccgaggccgacgttgtgggggaagatggtggccttgtagacgttgccgtggccatggacggcgtcgatgccgtagatcatggggatcccgaggcgcgtcgccatggcgccgcgctgcatctcgttcaccatcgacacccacgccgccggcgacgcctgcgccgccggcacgctgccgccgccgctcagcacgctccctgcaatttgagagatatatattcgtcttaatttaatggccggtttgagtagctagctaattttgattaattaattcattttgaatctgttttagtatttacatttatttatggagatgcatgccctcacttgtgcttgcagtgaaagctaagattcaaaccttgtatttacaaaatcattagtatcttataatatccatatttccatgaccatatcatacggattcagagtgtttgactcccaatctcaccaaactggttcgttagacatttgtctgcattacccattatcaaagtacgaattctttaagaaatgttattttgttatagctagcttaaacaaactcctggccgaatcacaatatagacattcgttcaaacttcaaactttttcttcacgaacgcgtaaaatctttgcatgtcaaaaatatatattagagaacttcagacttcaaactgttttagtttgacctgcactatattatagttttttttcaaacacgcaaaagctttcatcgatattaattagatattatatataatttcctgaggtgtttgcattcgcattctacttattatatgtgtatcttgtttttagatgcaagaatcaatatgtatctctgctgcaagaaccaagaagcaatcaagtataccaatgaagtagttgcgcatgacgtcgaaggtggcgttctcgcgctcgatctgcgacatctggccgatcttctccgccagcgtcatccgccggagtaggtcgtcgatcctcttgttcagcggctgcttcgagtccttgtacttgggacactcccctcctcctccgccgccgcccgccgccgccgccatcgccgtcgccgcaatgcagcctacacacaccaccaccacgagcacggcgccgccgccgctactacctcgccggagtagccccattgctcagctcaggctaagtgagatagagttggatatgaagtgatgagttgatcgatggaagcttaattaggtgtctatttatgggcgagtttagtgacccaagtgaccaagtgtgtgtgtcggtccaaaaatattcatcgtattaaatgtggggctaagatgaggccatcgagctagtttgaatggttttgagtttacttcgacatttaaattgctcagaacaagttggaaagcagggttgttaaatccacatgtgtattatgcagacaagttgcttaaagtcaaactgatgaacttcataattgattcgatcatggtcggtactgtagtagtttggatcctctgacagaaagaaaataaaattgctccatttaagtctctgaagctcctgcaacgcatgcacaaatccctaatttactgaaaattaagatttcttttgcttgtcagtttggacaaattcaggccacctcgcggcttgccctaaattaattatctcctagattcctaattagtctcaccggttgccattagaacatgtaaaatggtcattaacagcgatctcacctttactaattaagaatacttacttattgatacgaaggatagaaagaggagagataaaatatcgttattatgggtaacgactcttaacctctataatataaaagcatggttgcatatataaaggtgaaaaatgaaaaaaaaaagtaataaaagaattttttttagctaatggtgagagtgttttaactgttataaagatacgacttctaaataatcttgtattttctaatggatcatacacatatttactgttaaacatatacttatctcctaattaatcccacgctccttcattgcgtgcacaaatccctaaattactggtaggtttttttcgccggaggtgaagaagatccgaaccgaattacattaagatcatgagataggcttcagaagtcatttgccggttgccacaggctaagattatctcgtatgtttaggcggagctacataaaagggattagagtttctaggcacctggtcaagtggcggagctaggagctcgacacgcctagggctcaaattgaaggctaacaactatccatatcaattcgtacttggaagtgcagtacaagtacgaaaaaaaatgcaagactgaaatacaatttctaaatatgcaccaagtacagtaaaagtgtagaaaaagtacaagactagactaaaattttattagaatacctaatgcgacgtatattcatgattttcactcttcatcaacagaaggtagagaacctgaagatgaatatagaaaatgatattacataatgtaagtgatgcaaattatgagaacttaattatttgtagacaaagcaatgcatgacatacctctaggtaatttgtgcttgcgcgtcctcaaagcacgataatgttgtataatctgacgatcttcaatgctagtaaaaacatcccgctcaatatagcatatcatgcagtgattcatccattcatcattcatcttgttccgcatgtcagttttcataatgttcatagctgagaaggctttttcaacaggcaaatttaaggttaattcaattaagtgatacaccaatggaaaaattctctatcactttgaaccatcttaacagcaaggttaccaaggtcagagcaacttgagaaatccaaatcagatctcacatcagagataaatgtgttaagttggtctctaaggactatacaatcatattcagaaaaagtcatctgcataaatccttgccccgcacctgccgcaaggaggaggaatggaaaggttttttttttttttttggtaggaggaaacccattaattaattaattaattaattaactaatgagaaattaatggaggacaaatatggggccttcgtaggcctcctttctgcgcgctatggcccacacggcccacctagtatcggaaaataagaaatcgatcggaaagaaaaccctagaagcgaagcggagagaaagcaatggcgtccctgagcaagcgcggcggcggcggcggcgaaggggagggcatcctggcgtcatggatggcggcgcatgggcgcgaggcggcgagcagggcgaagaaggtggtgcggagcacggggaaggcggcgtggatcgcggggaccaccttcctggtcctcgtcgtcccgctcatcatcgagatggatcgcgagcagcagctcaacgaccttgagctccagcagcaggcgctcctcgggcccgcgcccctcaaatgatccatccatccatccttaacttctactaatagtgttcttgcctgtctagtcagacaaatcaaacttcttgttttcattaatttcaccattatgctgctctgatgagatgtcgtcgccgctttcctttcctgatgttactatttttcacgctcatcttatcatgccaactatatttcgttctgtgcgattcctgcgccttgtgccgtttattctttctcgtcatatgctgctgtgatgagatttcgatttgcatcgaccagggttacttttttttttatggattgacatctccaggtttatgaacaacagttactataataattaaggttttctttttgtaaaaaaacagtatggtctctgtaataaaaaggagaacattgtactccagtttataaagttggatcacaaatgggaacttatgaagatttcttattcataagagtatgactcgagcaaagcatatgttggtttgttacgcccccgaaactttggcaaacaacaatgtgtgatggtaaccaagcattttgatacaaacagcaccactttattgcattttgatacaaagaacactagtttttattgggtactccctcaaaattgcactcctaatttaatttgaagagtgcacttattttgagagggatgaagtatatatatgcttatctaaccaaaagaacttttacgttataaatttggattcgtcactaaccaaactgtcattgctggcttatgatagattttctggcaaaagaatgacattgctggcttgtgatagattttatgccagtattagcaacaaactgggcagcgactaattctcggttgataaattagaattaatttgagaattcatccactgacccacatatcatgggcacgactgggggcaaatcctcaatttctgatctaaacgataagtccgggtatatgataaactcggagcatcaaatcgatcagcatacctcgaggggaagcattgcaaacaatcacgcaagagaagctgagctgctgctcctgctcttaatgcaggcatggcacatcaaggacgggcatttgcatcataataaaacgtctagccaaagttggataccacacattcttcgtcaacaaactgctgctgcgacaaaacccaaaaccaaaaaaaaaaagcaacctaacggaacggaggaaacaacccagtagttcttagttatgcagctctccctcccttttgacggatcaaaacctcatgcttgcagcatatgcatatcccaccaggccaccaccatggggtggtgaaccatttagtttcttgcgttgtggctccccaaaatgcccctctcatggtgaggaacacgctggtagccatttgatggcctgccactaccacggttgcccgcatattcgttgtcgcctccccctctagcataccctcgccctcctccaccgaaacgacctctgcctccccttcctgccaatgccaaacacgcaccaggttcatatcatacttacgcaagtatatgccaccatcaactacaccatgaagctgtgtgtagtctgcaagcaaatattgcataggtgttggaaaaataaaagagcaacttacttccacctcttatgccgctgttaggcttccgctcctcaacatatatctgccgcccatttatttcaattggtgaagcctgaaaattggcaaaagatttagcatatgacctgtcaaaccatgattactaattcaagcgaaggatgaccatatagtgcattaaaaaaggggaaagcagaccaccaattaaacatcacagtaattagtaaatggtgaagtgaatatgcattaaatttgattttaaaggagtatgcacacacaaattggagaaggtatttaatgcatgtaaaaaaaagtgagttttgttgaacagtttgccaccttcaatgcattgtgaacaccactaagttcttcgaattccacgaacgcatagtagcctccggtctcctgccaatgtcatacaaacactaagtcaaaagaaaattctatcatatcacgtaataaaaaatacatataaggaaccaccttgcggcttctgatagcaacaccatcaggaatgagccgcccaaacttcttgaactcattctcaagatcagcctcagatacagaagatggcacgttcccaacatagacagatttgctctctatttttacgaacagaaatattaaaagtcagtgggtaatgtgcaactcaaatcagtgaaagggattatgatgctagctcaaactaaaggacaaccttcatcatcctggacagcaaattcaccataaacatcggtttttggcttctcggttgccacagacgaagtcataaccgaatgctgtgcagcctggtttgtctcggttgcctggtgaggtctagtcggggctggctgggctacagggaacaccagtggagcttttgcggttcttagctgcatgagttataccatcaaggttttaaatatgcatgagatgacatcacaaaaagaaaaataatcatgatcaaccaagtgaaggtgcaacatacaatggaggcataggtcttctttactggttcaccaacaggttcctctacatgaggaggtggaacaggtggagattgcactggctcctccggtgccatcgccattccatttgtaaaggaagaaattggttcttcaggaagaggctcatctccccaattgtctgactgagaaactacttgctgtggtggctcagagtaagtatagttctcaacagcatcactttcttcagatgttattgggacagcactttgattttcctcttcgtgaatgtactctggaacttgaggtagaaaatatatagttagtaactacataattgcaaaaattagaaaagcagcagcaataggcctattcatacgtgcaaggtattgacttttattttccatggcaacattacaatttgaaaccatcagtaatcaacgcatacggaacatactttttgttggtgctcatagacagccaacacagaaggcatgctagaagatataacatagttcagaacatacgaataacatggcacaacagtttagatagatcattgacagagaataagaaatatggatcgcaaataggaaaaagaaataagaaatatggctgaacagttaaaaagaaaattgcaggaaattatgaagctacaaagatatattataccaggttcgacgacggagttggatgccatgttggtctcgaagttgtcctgggcaataacaggtgcaggttgcacttgctcttcgtcaacgaaatggaaataatcattgagaacaaagtaacccttttcctggggagcaaggaaaaacatctggatgaatttcctttggtggctgtactccttggtctgtacaagaccagataccataactagcacaccatcaccccatgagttgagaaagttggctgttttgatctcgatttgggtgaaattcaaggacataatgagggagtgtatatcctgcaacagttagcacgcatgcacgcaagcattagaagaaggctatgtagagtaaatgcacatgacaggtcgacaaggaaggaaagacaacatcagatatatatgtacaattcaagtcagtaagtcagtcaagcaa

SEQ ID NO: 8341 - DNA, 16044 bp, Oryza sativa
atcgagatcaaaacagccaactttctcaactcatggggtgatggtgtgctagttatggtatctggtcttgtacagaccaaggagtacagccaccaaaggaaattcatccagatgtttttccttgctccccaggaaaagggttactttgttctcaatgattatttccatttcgttgacgaagagcaagtgcaacctgcacctgttattgcccaggacaacttcgagaccaacatggcatccaactccgtcgtcgaacctggtataatatatctttgtagcttcataatttcctgcaattttctttttaactgttcagccatatttcttatttctttttcctatttgcgatccatatttcttattctctgtcaatgatctatctaaactgttgtgccatgttattcgtatgttctgaactatgttatatcttctagcatgccttctgtgttggctgtctatgagcaccaacaaaaagtatgttccgtatgcgttgattactgatggtttcaaattgtaatgttgccatggaaaataaaagtcaataccttgcacgtatgaataggcctattgctgctgcttttctaatttttgcaattatgtagttactaactatatattttctacctcaagttccagagtacattcacgaagaggaaaatcaaagtgctgtcccaataacatctgaagaaagtgatgctgttgagaactatacttactctgagccaccacagcaagtagtttctcagtcagacaattggggagatgagcctcttcctgaagaaccaatttcttcctttacaaatggaatggcgatggcaccggaggagccagtgcaatctccacctgttccacctcctcatgtagaggaacctgttggtgaaccagtaaagaagacctatgcctccattgtatgttgcaccttcacttggttgatcatgattatttttctttttgtgatgtcatctcatgcatatttaaaaccttgatggtataactcatgcgctaagaaccgcaaaagctccactggtgttccctgtagcccagccagccccgactagacctcaccaggcaaccgagacaaaccaggctgcacagcattcggttatgacttcgtctgtggcaaccgagaagccaaaaaccgatgtttatggtgaatttgctgtccaggatgatgaaggttgtcctttagtttgagctagcatcataatccctttcactgatttgagttgcacattacccactgacttttaatatttctgttcgtaaaaatagagagcaaatctgtctatgttgggaacgtgccatcttctgtatctgaggctgatcttgagaatgagttcaagaagtttgggcggctcattcctgatggtgttgctatcagaagccgcaaggtggttccttatatgtattttttattacgtgatatgatagaattttcttttgacttagtgtttgtatgacattggcaggagaccggaggctactatgcgttcgtggaattcgaagaacttagtggtgttcacaatgcattgaaggtggcaaactgttcaacaaaactcacttttttttacatgcattaaataccttctccaatttgtgtgtgcatactcctttaaaatcaaatttaatgcatattcacttcaccatttactaattactgtgatgtttaattggtggtctgctttccccttttttaatgcactatatggtcatccttcgcttgaattagtaatcatggtttgacaggtcatatgctaaatcttttgccaattttcaggcttcaccaattgaaataaatgggcggcagatatatgttgaggagcggaagcctaacagcggcataagaggtggaagtaagttgctcttttatttttccaacacctatgcaatatttgcttgcagactacacacagcttcatggtgtagttgatggtggcatatacttgcgtaagtatgatatgaacctggtgcgtgtttggcattggcaggaaggggaggcagaggtcgtttcggtggaggagggcgagggtatgctagagggggaggcgacaacgaatatgcgggcaaccgtggtagtggcaggccatcaaatggctaccagcgtgttcctcaccatgagaggggcattttggggagccacaacgcaagaaactaaatggttcaccaccccatggtggtggcctggtgggatatgcatatgctgcaagcatgaggttttgatccgtcaaaagggagggagagctgcataactaagaactactgggttgtttcctccgttccgttaggttgctttttttttttggttttgggttttgtcgcagcagcagtttgttgacgaagaatgtgtggtatccaactttggctagacgttttattatgatgcaaatgcccgtccttgatgtgccatgcctgcattaagagcaggagcagcagctcagcttctcttgcgtgattgtttgcaatgcttcccctcgaggtatgctgatcgatttgatgctccgagtttatcatatacccggacttatcgtttagatcagaaattgaggatttgcccccagtcgtgcccatgatatgtgggtcagtggatgaattctcaaattaattctaatttatcaaccgagaattagtcgctgcccagtttgttgctaatactggcataaaatctatcacaagccagcaatgtcattcttttgccagaaaatctatcataagccagcaatgacagtttggttagtgacgaatccaaatttataacgtaaaagttcttttggttagataagcatatatatacttcatccctctcaaaataagtgcactcttcaaattaaattaggagtgcaattttgagggagtacccaataaaaactagtgttctttgtatcaaaatgcaataaagtggtgctgtttgtatcaaaatgcttggttaccatcacacattgttgtttgccaaagtttcgggggcgtaacaaaccaacatatgctttgctcgagtcatactcttatgaataagaaatcttcataagttcccatttgtgatccaactttataaactggagtacaatgttctcctttttattacagagaccatactgtttttttacaaaaagaaaaccttaattattatagtaactgttgttcataaacctggagatgtcaatccataaaaaaaaaagtaaccctggtcgatgcaaatcgaaatctcatcacagcagcatatgacgagaaagaataaacggcacaaggcgcaggaatcgcacagaacgaaatatagttggcatgataagatgagcgtgaaaaatagtaacatcaggaaaggaaagcggcgacgacatctcatcagagcagcataatggtgaaattaatgaaaacaagaagtttgatttgtctgactagacaggcaagaacactattagtagaagttaaggatggatggatggatcatttgaggggcgcgggcccgaggagcgcctgctgctggagctcaaggtcgttgagctgctgctcgcgatccatctcgatgatgagcgggacgacgaggaccaggaaggtggtccccgcgatccacgccgccttccccgtgctccgcaccaccttcttcgccctgctcgccgcctcgcgcccatgcgccgccatccatgacgccaggatgccctccccttcgccgccgccgccgccgcgcttgctcagggacgccattgctttctctccgcttcgcttctagggttttctttccgatcgatttcttattttccgatactaggtgggccgtgtgggccatagcgcgcagaaaggaggcctacgaaggccccatatttgtcctccattaatttctcattagttaattaattaattaattaattaatgggtttcctcctaccaaaaaaaaaaaaaaaacctttccattcctcctccttgcggcaggtgcggggcaaggatttatgcagatgactttttctgaatatgattgtatagtccttagagaccaacttaacacatttatctctgatgtgagatctgatttggatttctcaagttgctctgaccttggtaaccttgctgttaagatggttcaaagtgatagagaatttttccattggtgtatcacttaattgaattaaccttaaatttgcctgttgaaaaagccttctcagctatgaacattatgaaaactgacatgcggaacaagatgaatgatgaatggatgaatcactgcatgatatgctatattgagcgggatgtttttactagcattgaagatcgtcagattatacaacattatcgtgctttgaggacgcgcaagcacaaattacctagaggtatgtcatgcattgctttgtctacaaataattaagttctcataatttgcatcacttacattatgtaatatcattttctatattcatcttcaggttctctaccttctgttgatgaagagtgaaaatcatgaatatacgtcgcattaggtattctaataaaattttagtctagtcttgtactttttctacacttttactgtacttggtgcatatttagaaattgtatttcagtcttgcattttttttcgtacttgtactgcacttccaagtacgaattgatatggatagttgttagccttcaatttgagccctaggcgtgtcgagctcctagctccgccacttgaccaggtgcctagaaactctaatcccttttatgtagctccgcctaaacatacgagataatcttagcctgtggcaaccggcaaatgacttctgaagcctatctcatgatcttaatgtaattcggttcggatcttcttcacctccggcgaaaaaaacctaccagtaatttagggatttgtgcacgcaatgaaggagcgtgggattaattaggagataagtatatgtttaacagtaaatatgtgtatgatccattagaaaatacaagattatttagaagtcgtatctttataacagttaaaacactctcaccattagctaaaaaaaattcttttattacttttttttttcatttttcacctttatatatgcaaccatgcttttatattatagaggttaagagtcgttacccataataacgatattttatctctcctctttctatccttcgtatcaataagtaagtattcttaattagtaaaggtgagatcgctgttaatgaccattttacatgttctaatggcaaccggtgagactaattaggaatctaggagataattaatttagggcaagccgcgaggtggcctgaatttgtccaaactgacaagcaaaagaaatcttaattttcagtaaattagggatttgtgcatgcgttgcaggagcttcagagacttaaatggagcaattttattttctttctgtcagaggatccaaactactacagtaccgaccatgatcgaatcaattatgaagttcatcagtttgactttaagcaacttgtctgcataatacacatgtggatttaacaaccctgctttccaacttgttctgagcaatttaaatgtcgaagtaaactcaaaaccattcaaactagctcgatggcctcatcttagccccacatttaatacgatgaatatttttggaccgacacacacacttggtcacttgggtcactaaactcgcccataaatagacacctaattaagcttccatcgatcaactcatcacttcatatccaactctatctcacttagcctgagctgagcaatggggctactccggcgaggtagtagcggcggcggcgccgtgctcgtggtggtggtgtgtgtaggctgcattgcggcgacggcgatggcggcggcggcgggcggcggcggaggaggaggggagtgtcccaagtacaaggactcgaagcagccgctgaacaagaggatcgacgacctactccggcggatgacgctggcggagaagatcggccagatgtcgcagatcgagcgcgagaacgccaccttcgacgtcatgcgcaactacttcattggtatacttgattgcttcttggttcttgcagcagagatacatattgattcttgcatctaaaaacaagatacacatataataagtagaatgcgaatgcaaacacctcaggaaattatatataatatctaattaatatcgatgaaagcttttgcgtgtttgaaaaaaaactataatatagtgcaggtcaaactaaaacagtttgaagtctgaagttctctaatatatatttttgacatgcaaagattttacgcgttcgtgaagaaaaagtttgaagtttgaacgaatgtctatattgtgattcggccaggagtttgtttaagctagctataacaaaataacatttcttaaagaattcgtactttgataatgggtaatgcagacaaatgtctaacgaaccagtttggtgagattgggagtcaaacactctgaatccgtatgatatggtcatggaaatatggatattataagatactaatgattttgtaaatacaaggtttgaatcttagctttcactgcaagcacaagtgagggcatgcatctccataaataaatgtaaatactaaaacagattcaaaatgaattaattaatcaaaattagctagctactcaaaccggccattaaattaagacgaatatatatctctcaaattgcagggagcgtgctgagcggcggcggcagcgtgccggcggcgcaggcgtcgccggcggcgtgggtgtcgatggtgaacgagatgcagcgcggcgccatggcgacgcgcctcgggatccccatgatctacggcatcgacgccgtccatggccacggcaacgtctacaaggccaccatcttcccccacaacgtcggcctcggctgcactaggtaataaaatgattaattatcccccttaattaaactcaattaatgatgcatgaattaagtagattcccatatgtagctagttgtgataagtttactgaagatgaccagattgcacgccattaattaatcatccaagtctttgtatataaactctcaaaatttgcagtgctcgatgatgatggagtgagatccaagatttgagattttaaattagcgcgatcgatcgctcacgtcccaacgttttggacaagggaaagagttactaattgcccaactcgccaactagtaatattttgacgttgtcactctaattaatggtttctcaaacgcgctgaatttgaaaaggaaaaaaaaagacagattcgacttgaaaaaaaacccctactatcataagagtaattttaccatctttgaaaaataaagtaccataatttttattgtaaaatttggtacatctaaatattagctagcttaagttaccaaattttattttctagtgtaaaaatctttggtatcttcagttacgttttaaaatgttcgtaaaatttctcatcatacaataatgtcgtaatcttattttaacacaagaccaatagtaatagttttctaaaagttttactggattttattcatcaccggagggagggaatatacaaagataagctagctagctagtgagagcatatgaacatggtgtgttcttctccgagagatttgatagtgtaacacttcttaaaataggtttcgattatttgacattctgacccactttcatttacttagatggctcacatatcatcatcacaagtatcaattaaaacaattgggcaacgaagaaagtgtcaaattatcaatttttttcgttcttctccagggacccggatctggcgaagaggatcggcgcggcggtggcggcggaggtgagggcgacggggatcccgtacgtgttcgcgccatgcgtggcggtgtgcagggacccgaggtggggccgctgctacgagagcttcagcgaggaccccagggtggtgcagcgcatgtcctccatcatctccggcttccagggcgagatccctcccggcggccgccgcggcgtccccttcgtctccggcgggaggccgagcgtggcggcgtgctcgaagcactacgtcggcgacggcggcacgacgcgcggcatgaacgagaacaacacggtggcgacgctccgggagctgatgacggtgcacatgccgccctactacagcgccgtggcgcagggggtgtccacggtgatggtgtccttctccagctggaatggcgtcaagatgcacgccaaccacttcctcatcaccgatttcctcaagtccaagctccgcttcagggtatgtgcactactactatatatatacttcctccgtcccaaaatatagtcattttttaggttggcacaggtattaagaaagtaaatgagaataattggagaaagtgtgtgattggttgaaaagagaaagtaggtgaagaataatggttgtgattggttgagaggaggtatgtggagaaatagctttattttaggacaagacactctgctagaaatagctacattttgggatggaggtagtatatgctatacctttgtctacaaatatatatattcccttcaccctaaaataaataaacttaatacactaaagttggatataagtcgtacgtactaggttatatcacatctccaactaaattggtttattttgaaatggagagtataaggcttaattttgatggttaaaaataaactttgaaagtaaattcctctttcgttattttatttatgaaaaataaactatggtcataacaaaaatagtctcagttttaaaatataattatttctagtatttatttttttctaaaatataagcaattcctaatagcctcttatttaaatttctttttattttagccccccaaccaccactcattcaatgagaggcacccaattattttcttggcaacttttctccactaaacaatatagaaatatttatattttaaaatagattatgtgcttttgaacatgaattcatccgtatcggtgcatgtaaaatattattattggtttaataattagtcaaagatttaaaattaattggtagtcaaactcgacttgtatttctattttctagacggtagtacatacgtgtgagatcttcatgcatatatgatgtgatctgtttaagtttgaaaattaattaatgtgttattcaatttcagggattcgttatctcggattggcaagggcttgacaggatcacgaccccagcacatgcagactacatgttgtccatcaagctgggtatcatggctggcatcgacatggtcagtacagtgcacacattaatacatgcaaaaactaatttcatcataaaattttcatttcattgataaataagagacaaatatcgatccaagaaatggtcctttacacccaaaacatttcataattaattgactgattaattttcgaatgtttgtgtgcaatcaggtgatgatcccgttcacgtacacggagttcatcgacgacctggcggcgctggtgaagaacggcacgatcccgatgagccggatcgacgacgccgttcgccggattctccgggtgaagttcaccatgggcctcttcgagcgcccctacgccgacctcagcctcgccggcgagctcgggaagcaggagcaccgcgaccttgctcgcgatgccgtgcgcaagtcgctcgtcctcctcaagaacggcaagcccggcgacgcgccgctgctgccgctgccgaagcgggcgcgctccatcctcgtcgccggcgcccacgccgacgacctcggcagccagtgcggcggctggaccatcacctggcagggcctcgccgggaacgacctcaccgccggcggcaccaccatcctcgacggcatccgccgcgccgtggatgccgccacggaggtcgtcttcgccgaggcgcccgacgccggcttcatgcggcggaacgcggggaggttcgacgccgccgtggtcgtcgtcggcgagccgccgtacgccgagacgctcggcgacaacctgaacctgaccatcccggcgccggggccgagcgtgatccagaacgtctgcggcggcggcgtgaggtgcgtggtggtggtggtctccgggcggccgctggtgatcgagccgtacatggacgccatcgacgcgctggtggcggcgtggctgccggggacggaggggcagggcgtcagcgacgtgctgttcggcgactacgagttcaccgggaagctggcgaggacgtggttccggtcggtggagcagctgccgatgaacgtcggcgacgagcactacgacccgctcttcccattcggattcggactcgagacccgcaaagctaattaattaaccccttaattaatcaggggttaggctaattaatctcgatcatcaacgataatcgcatgcattaattacgacttcggttaatttagttgcgtggttaattacgatccaactcgggaggagtactagcgtgcatgagtcatgtcaggtcaaggaataaaacaatttagttaatgtacttgtaatcaagtgtactcctccgaatttactattctgaaatttactttgactttaagtaaatttgtcagtgtaacacatgtggatttaaccattccgttttgccaaattgttttgaatattttgtatgccgaagtaaactcaaaagcacgcaaactaatgcaaatattatgggtattttatcagggaaattttacaatcctcaaggccgtgtttatattcaatcttttttaccaaaaacatcacatcgaatgttttgacacacacatgtagtattaaatgtggatgaaaataaatcaattgcacagtttgcatataaattacgagacgaatattttgaacctaattacgccatgatttgacaatgtgatgctacagtaaacatttgctaataacagattaattaggcttaataaatttgtctcgtattttatatgcggaatctgtaatttgttttgttattagactacgtttaatactttaaatgtgtgtccgtatacttaaaaaaatatttggccaagaaactaaacacaacctaaatacctaaattctacataaaaaaattgatatcttgagatactctgaagtaccaagtttttatgttagaaaatatgatatctttcggtattttcttaaagatgataaaattacttaggcaactttttctttaattttctaacttttccatcacattaaaactttcctacacacattaactttcaacttttctatcacatcattctaattttaaccaaactttcaattttgatgtgaactaaacacaccccctattttgttacaccgacacactaggttagtcctagagaagctagtgattcgagaaatgaccggatcgcgcacgccaagtctttgtatacgaactcaaaatttgcagcgatcgatgacgtcgtgagacaagatcactcacgcccaatgttttggatcaagggaaagggttgactcttagcccggctcactaataatatagactccgtacacattgtctgacactctatcgatgactatgagactgtttgactatgaccattaatttcttggacaatatctacattgccaataaaaaaacataactaaaaattcttaaaattatttcaaaatatgagtattaatttttttttgtatgaacatttcaaaatatgaataaaaatataaacagtactcatattttgaacatttcaaatactcgtttcatattttcagtgtacctgtgagtttgtgacaaaccagcctgatatgatatgaactgttgtgcgcggtgtgcctattaaaactggcgctgttttgttagactgcatgactcctgaactatgaacttctctagacatcttctcctgaactactgatcatctcgtcccatcttggctgatgaaaatgaagatggttgcacctaccttctgcagaatctaagtattttccagccaggatctaagattgagctggaccattgttggattggtctgggccgccgccattgtttgtcccatctgggccttcagatatgtttagactataactgggccttgccttcttggattagaactggcccattggttgattgatctggccctacaagtatgtttacattagatactgggccttatcgcaataaacttgacgaataagttcactttaggattctcaacttgtcagcaagtctgaattcatccctataccaatataacgggcccgacaatttacaatacaggatcacccaagatcctgggcagtactatgcccgatttggcaagctgagtcagcgtgagacccacacgggccccacaccacacagaccccacatgtcagtggctaacgctttcttcactatcttctcccatcctcccaatcccctcagatgttcaaggtcccatctgtcgtcctgggtttcacgccgactcggcttaccacgtgagctaaaagtttaaaacaggcataatactatctaggacgttggatgatctgattttgtaaattttataaattgagggacttgtattttggcttagagataaatttcagaacttatatctaatatttttgacaaattgagggacgtcaagtgaacttattcctgaacttgattacctgcccgaggccgtacttaccaattctcccaacgcataatatccactttaacgtaacattccagatcagtttaccgattggcaatgctattgctgcgcacagattaatcctcctactaacatttaaattcaccctgagaatttgtgtatcaagtcttaagaataatgcatccttcggttaattaggataatgattttagaggaaacaaagtattctaatcaaaatgtaatcgaaaacagtaaaccattgcctaagcctcaacctggtgtgtccatatcatcagagaaaccaacacaggtgcatcatcagggagacagtaagctgcttggcgttcacattgccaatacaaaaaacaaaattctccacgcaggaaggtaacaagcaatccaactcaaccgttgacttgtctttgtacttcggtgcagtttttattacaaaaagcaagaataacattcattggtatgcttacagcgccggctgtcactggaaaagaaaaccattatggagtgtccgagcatttcaaaatgccttgagagatttatggcctacaggaagtttctgatgtccaacttcttgacatcaggcatctcctcgtctttgaactcctccctgataacaaagcacgtcaacgtgttattaacctttttcaatagagacgcacacatgatatgatatgcactggatattagttagcttgcatgcagcaagctgcaactcttattacttctgataagtcccaactcaagcagataaccaattagtatataaagagagatgtacctctttagttgaacctccattgcttcaacacattccttcttaagctccgtcagctcacttttggcaatttccaattcaagctcttcctcaatcttgggaagatcctccttgcggattccaagcctatttgaaattttgaaatggaaagcaaaaaagcatgaaaaaggttagtccaactaataaaaaatatatataacacatctagcatgcacaggaggaagaaaaatcaatatatttccctgcaagccagcaataatggatctcgatcacctaagtacggagtaaaaaacaagctacagttggttacaccatcatctgagagtatatttggtcccttaacccttgttagcgaacaagaaaactcttgctagtgagcaaggtcagataaaataactatacatgccctgaatcgcctttgaaaccagaaaattatcatgcaagcagcttaaggaattgcacgtttgatctatcatgtggatttttattctcactgaaatattcagaaaaagtatatctctagagagtagacgagcagtgtaaatgatgatctgaactatctcaaacttaagttgataacaaaatgatgaagataaatactttttgtttatcttctcaaactctgccaagaggagacccatattcttcttgtcactcctcagaagtggcttcttaatctccttctcaactttctcaagggcttccatcatcatagcctcagcacccatatcatctataaggccactcctatgtaacattaagtgaacagaagaatattcagacaagcaaatagtgcaataaaattgttatgtaggcaaatatcacattgatttaattctttacaagggtattttggggctgagaaaaacataagatgaaaattgtgaaaatgataatagatgtactttatcctgatctcctgaagagtattcaagtaagtccgtgcatcagggatgccctttgtaaaggtgtcgatggtatatttaatcctctcagagtcggatagaagatctgccctgcatttacacaatggaaccataactgagtaaatagatcaataacatccagaataagtgttacaaaatgaaagcaataaagtggaagcctatctcgatagaagtatatatatatatatatatatatatatatatatatatatatatatatatatatatatatatatatatatatatatatatatatatatgccagagtatgttttgctgcataggatggatgcattaatgtacaagtaaaatatttttttattttcgatggggcatcctacatcaatggggaagatgaaaaattgtactagggcaaaccggcaaacagtagtaggtaataagtaatatcaaatgggagttatttctacatatatactgaaatatacaatagtgcttaatgaattcaaggtttcgtaaaccgcaaaaaatctgatttatttaataaaagaactttacgctagagaatagaaacaatcaccacaaatatgtgtaaaataaacacaaaaacaatgacaaatcaaaggaaagtaataaactaaggaccatgaatacatgtgacagattataagtgatcttacttttgtcttacagtcttcatgacttgggcataacgagaaactgctgcaggatcatctggatcaatagtgatcttttccttcttaagtacaccaagggcagtctcaaatttcttctttacctcaaaaaatatgcccttcaataggtcttcatacatacaaaaaaaaaatcagaccaccaaaattataatacaaagtaaattgtgcaacttaaatacagaagtaatcagaactacacagcagagtttaatcaaacaaactccaactcatgaacatatgtaatctcttcagttttgcattgaaaaacattttttgaatgacataaaaacacataacattacttgtgatactgcgatggacaaaggtaaagtacagaaagcatttttttctacagctcaacacaatggtcttatggaaaggagttttgcagttaggattaaaagcatttgaaattcctacagaatttgcacaaaataaattgttaaatgcacttaaaatttaagaggcttaccatcaccattgacgggagtacgatctgcctccttggcatacaagcggacttgagtggcacctccatttgccaaggcagcttgagcagagtatagctgccagaagccagagacattaaccaatgacaattaacataaacaaagttataaaaaaagtagagaagctagagatttctaaaacaaaacattccatatagctttgtactgacaactttaccaacatggacgtccttattacataacatatacttcctccgtttcacaatgtaagggcccctttgaatcgcagggtagaaaaaatggaggaataggaaaaacataggattctgacaggaattgaagtgtaaaacagaggattgcaaaacacaggaaaaacacaggaatggtcgtttgattggagcgcaggaaaaacgcaggaatcagatgagagagatagactcaaaggaaattttccaagaggttggagctcttgctaaatttcctccaaaatctacatgcaatgtgtcattccataggaatttcataggatttggaaagcttcaatcctttgaatcaaagggccaaataggaaaatttcctataggatttgaatcctatgaaattcctacataaatcctttgattcaaaggggccctaagtcattctagcatttcccacattcatat

SEQ ID NO: 8342 - DNA, 2415 bp, Oryza sativa
tagtgatgtcaaagccgaagaagtttccagtcagagcaatgtggcttttgctgaagatgcagttcaagataaggtaataccaagtgagccaccagaagatatacgaccagtgaagaagttggaacaagaagaaactaaggaagctgatgaagcttccaacgaaacgaactctgctatcttcagcgacttaaatcaagaagatagtatcgtggcaagtaaacaacttgagacagaactagcagaagaggctgctgcctttagtaacttagatcaagaaggtggtatagcagacagtgaatcacaagtggcagacctagaagaggcaaaggaaattgaagccactgaaactgaagaaatcacccaccaaccccctgctgctgtttccacagaactgccaaaagaagataattcaacaagaagtgagccacataatgatgatattcagcattcgctggaacaagattcaattgaagtgaaggatactgaagctgctgagattcaagagatctcccaagaaagaactattgctacttctaaggaggatgctgtggaagatgatggtacagcagaaggaccaacctgtgtttctcaagaagtacaagatgtagaatcagaagaagtcaaggacaccgaacctgataatgttgtagaagcatccgatgtggtaactgtcgatgacgaaggacaagaaaacaatgtgctgacaagtgagaatattgcggaattgcaactgcagggtcttgaatcagaagaaatcaagagccctgaacctattgaaacagaggcaggtttccatacaagccatgctgctccctctaatgatccagttgaagtgaatacaacagcatgtgagacacaggacacggagtcagcagaagaaataaaggaaaccgaaggcactaaaactgaatcaattccccaggaaagcaacatttctgtttctgaggaatctaatccagaagatagtataacagcaagtgaaacaatttccaacactcaagaactaactattgcaggatcaatagaggccagtgaggacaacatagatacaaaaactggagaaatcactgatcaaagtaatgaggtttttgctggggaggcagctcaaggagataacatacctgaaagtgtgtcaactgctgatacacaatcaatgcaggagctggaatcagaagaaatgaagaaacctgaacttgttgatttgagtggaacatttcatcaaaaggatgatgccatctctcagaagcaaaaccaagaagataatccaaccacatgtgagacgaatgagattggatcaaccgaagtgagcagtgttgaagcctctgaagatcaagcaattgcccaccaaagtaatattactcaatgtgaggagcaagcaacagaagaaagtattacagaaagtgaaccacaaattttggaaatggaatcagtccaggatatggaagacactgaagctactgaatctgaactcgtttcagagcaaaacattgtttctacttctgaggagtctgttccagaagaaaatgctacaacagaagaacctgcttttcatgacagagaaatacaaaatgatggagcagaattaacagagcaacatgatagtgtgaaggccgaagaattacccaaccaaagcagtggggctattgttgaggagacagctcaagaagccgatttagtagcaggtgagccaatcgatgatgtgcaagaaaaggatcttgaaccagaagaaataagtaacactgtagatggtgaaacaggagaagcttcccatcaaacacatgctgctgttgaagataattggacaggtgaggtagagagcagtgttgaagcctctgaagatcaagcaattgcccaccaaagtaatattactcaatgtgaggagcaagcaacagaggaaagtctaacagaaagtgaaccacaaattttggaaatggaatcagtccaggatattaaagacactgaagctactgaatctgaaaccattttccagaaaaacattgttcctacttccgaggagtctgtcccagaagaaaatgctacagcaaaagaacctgcttttgatgacagagaaatacaaaatgatggagcagaattaacaaaggaacatgatggtgtgaaggacgaagaaatacctgatcaaagcagtggggctattgttgaggagacagctcaagaagccaatttactagcaagtgagccaactgatgatgtgcaagtaaaggagcttgaaccagaagaaataagtaacactgtggatggtgaaacagaagaagcttcctgtcaaacacacgaggtagagatgacagaatcatcagaacagatgaaggacactgaacctcctgtacctgaaccagaatcatcagaagagatgagggacactgcaccaactgtacctgaaccaacactccaagatag

SEQ ID NO: 8343 - DNA, 9449 bp, Oryza sativa
cagtcagactgcatgcaagacagtaagagtatctatttcatggttctagtacaccaactagtcaacaaagaacagtctgacttattaaataatatggcaatgccacatgctaagccaggtggcacacctaattgaagagttttgcttctgaatctggaatgtggacatcctaactggaaaacgttgtgcctatcttagcctcttaggagccttgattaattctagaatgaatcaagattgcaggagtgtgaagtgcatatatttaagtactacttgattagttctgcaactatatgcttaggcatgcttcaagtatactttgctcacatcatgcctttgtcttacattgacacactcgactgttcatgctcactgtaactgccaatttctgattaacatttttttaccattttgtactgtttctgactgttaatgtattgctttctctatacaggtaaagtagaactatagaagtttacttttgaatgacactgttttctttttttcttcacgaaattaatgaaggaataaccaagttgggtaaaagagtactgctagtgatttttttttcgaaaataaaaggataagagtgtacaattgttatacttgctcaataggctacatattgaaaaataggatccctttaaacgaatctaacttttatgtaacaaaatcaagaaatggttaagtttgaaaagatcggcgtcttaattctgtttgctataaaccaaagcgaaacttgattactaattactgtgcgctaacctattgcatcgtttaagcccatgctttgctttttaagattgtttaggaacacaaatgaactcagtgctggcatactacatgaagagcatccatagaacccttcaaaagcaaagaacatcccatagatactatgaaggagattaacatgaagagatcatggaacaagaagtcacggtgatgattttccttgcgaactgggcatgatacatatatgctcaagaagatcatggagcaacaagtaagaaacactgatgatttaccttgcaaactggccaaagtctgttagctgatacatagagagctcatcaccattcaggtgatttctgcaacactggagctctctacgtagttttgcatatgcagaaagtatgcatgcatggaaacagaaacaagcaagttctgcacaaaactcagagactacgagaagccattggttacctggccatctgttgcttcccttgcttcttcttccgtcgccattgctccagatcaggacgggaagaagatcaggatgggaagaagaaaagaaagtgaaaacaaaagaaagaacgaaagaaagaaagagaggcttcttccctagaaagtcttgtgggtgcttgaaaagatggcggtctttataccaccctttcttctgtcgatatattttctattgctgagcagcggttaggaaagcaatggcagactgacactgctcttgattggcggttagcgctttgcttaaccataatctagattaactggtagaatgtatcgctgaaatggttgatcagtgaacatggaaacttagcattaggtgccaaaatgccaactggtacatgaggcacatggtagtggtggctggaccagtgtgtctagcattcttgcattgctggacccacagaaccttttctgtgtgaaattattgcatcgataattgctctcaagtatcatccttggatccctatctttcattcttttttccttgagtgtacctcggaagaaaagtttaattttcagtgtaaaaatactattatctgccttttcttttgttgcttggctttacatataacataacatgattgttcaatattccctacaggtgcaggtcatctcataccagttaggctgccatggcatcttccggcacattcgacgatctatacaatggggaaggtgtcacaaaaggtactgtccatcttacctcataatgcacttgtaatgccaagtggataatagtatggatgcagtcaatgtttcttcaggacatcaaaaggtttgctgaatctaatcgagtgaaaggagcaacacgatgaaagtaacttctcctctgatataatggttttgtgttaagtccaggtaaacaagcaccacaatataatatgttggttcaggtgtcattttttcttcctggacctgtgctgctgaacgccaaattgaagtgtctgttgcgattttttgtcaggtataggatcaccaacagtttgtaaacctcatatacttcaccatgagctcactgtttaaacatccagaagtatggtagccttgacacctgctgacattgctcatagagggcctagtttctgaagactgcagagccacaggtacagataaaggaggtgcatgccccctgaatattcaatcagtcaagtggctgctgatgacagtgatctgcagcaaaagaattccacatgatcaactactttggagaaggaaaataccaagttggcaaatccaaagtgccatgctggatccagcactccagctactgatcaaacaatccaaagttaatcctgtcaaagttaagaaatccaccggccgtcacctgcagtgctgctttcagagactaaaccagatgattttctgaaaaccagaggcaggtggtgtttatgtcatgtattattccatcattatcactgcgccgaaagagagaaatcaatggagatagccatgcgaagatgatgtcatggatgcttggaaatacttatcatcagcctctatcagagatgagtcagcatcgtacgcagcccatatcattggctggaaatattgttcagaggttgatgttttgtttcctggcactgttttcttttgctccctggaatatatatagccgtcaccctgtggtcccactcccaccgtctatgtacatgtcaatgtgttgctgctaattaactagcacagcaccatctccataagcttttttgcatttgtgaaaacaaaaattctgatcatgcaaaacagaaaagaaaaatgaggaaatgttaggtccagaaagaaagaaaggagctagtgtttttcttgagagaaaaaaaaaaggaaaatattggatgaaaggaacaagagtatagaatatatctgaccttgtgattggaaacaaacatgcaacagcacttagggaggcaccggccgtgcaaaagccatcttgtcatgttgtgccgccaaaatcataaccacctaaagattttttgtttttccttttttccttctcaatccatccatccatccatcagctgagcaatttgagtttggctgggaatatttgataatgacacataagacaaggaaaatatacacactaaaggcagcatttacaaataattagcactaaaattgcactaatatatatgtggagggagatagaaagcatcttgttccatggatggccagtgtttgatcagctgatgcctctacctgtttctgccatgattagtttggccagatcgacaattaaggcagctgcagttgtacgagctgtgcttttgtttcgtagctagggagagatcaatttggctcgcaaatgtttgtaccgtatacgcatccaactacgtatttgtttgcactagagactgactgatccagctacgtacgtatagctattgctttgttggcttatgatagatatttttcctcgcattttgttactctatcggttttctttcataatatcataattttattgggtctccaaatatatttctttcagtcaaaattaacggttatattggagactgattatatggtcaagaaggttggtgttcatatatgtagtataactcgttggttgtgtgtatctcgtgcagaggttgggcgggttcagttcgattatattatcttggtgtaattgactgagttttaataaaacttgaattatctaaatatagtataactctcactgtgccttttgtttcacttctgcatttccaagtatgtgtgagcaattcaaagatcaaaattccacaacatgtgtccggattggatagttggatctatggcctttcagagtgtagggtaggttggttgattggattgcaatataggtccacttactgttgtgctttccagccttgtttgactcaggaatcagaatagaacatgctctgccgtggattatttgttacacgcttttaaaaacatgttattcttaaaatagtttgttttactatgtttcttagatgacttgttgtaaactactcccttcgtttcgttttttaatagatgacaccgtttacttttaaacacatgtttaactattcgtcttattaaaattatttatgcaaatgcatgaaatataaatcatgcttaaaataattttaggataaaacaactaacataactaatgataatttcataatttttttagtaagacgaatgatcgaacatgtacccgaaagtcaacggtgtaatctattaaaaaacggaggtagtatttgttgagtttatttcttaaaatatttaatttatcgttgtaatcaagtagacaaatccactgtaacaaatctcgtgaataatctgtttcaaacacctccctaaaaaaaggaattgtcttagctttcatcatcactgcatgtttcaaatgaatgtttggattgccacaaatttttagccatacttgttgaaattctagactacaaaagttagtactatcaatacttgccaatgttttagcactaccaaacattgaaagagaaaaaattggcttcaaaccaaccaagacctttcacctgcaacacaggtgtactgaactgaatatactgctcctaccaatctcagacagatactgaagattagctgcttactacattttacagatcagacaagctactacgaagaacttgctaccaaacacggcatctaggtaggatggagaaaggggagaaaagaaggctttttggaagcaaaagcttctgcattgcaggctggctagtgctcatgtgggcacatcaaagacagctttttttcccctctttttttttcttttctttttttttaccatgatcacagagcaaaagaaagaagaaaggttgcttcaagaggcaggtgaatccagcgaagtgaggacattttcctgggccccactcttgtgctgtgtcactgacatgtgggcccccagtatctgcactcctctatccattccagaccacactagtcacttgcaatcagactaacagagtaacagtagacaacaaatagctgaccagatacatctaaagaaagaatttttctcaccagatatgcagataaacagacaagattagttgagtactcatcatctctgtatgacttcaatctcatcataattctgtttcaagttgacaagattagcactaagcagtttggtagccatacatacattgcatgcaggaaggcaggcaggcagtatcgatcaaaccttgtactgaaaactctgaaacttctgaaaactctgaaagtgaggctcgcggtcgtgtctgcctgcctgtcagtcttctcatcgtctcctcgtggttgagctgtccctacgcatatggcgctgacgtcatgtgggccccaccaaccgcccctactacaattaggtgcctaattttttttctctctctctctatcccttctaagcaaaataataatcatcattggggttctagattaagagatggattatgatctgggattatctgtattatatttgccaatttgccaaaagcccaaattaaacggtaggtacacagacagacacactcaccagaatgtgcagctatccagctgggagcccatgtcatcactcactctcatgcagctggatcatcaaggtgtccatccaattagtccaatcgaacacaagaggagcaagaacaagaagtactacacttgcatgatggtttggtttggcttgctttggcttgaatcatcagcaaagaatcaggagttcaggactaaagaaatcaaatgagcactattgtctttgcagctaattagtagacagaattaagattctgcagttggcaattgcctgtctgttaacaacagaaagctgcagaagaggctagggctagggagaaagacatcaaggcaggttcaggctcttcagaattcatgcggtttcaggatggtcacaaacagagtgttgcacatcaaggactctttggaacttaggatttttagaataggaataggaaaaacgtaggatttgaataccatcacatgtaaaatcccataggaaagaaaacagaaagaattatttaatacatatgtttggatatatcacaggaaaaccataggaattttgagagaagaagccttggaaatctcaaaggtttttgaaacaatgaggtttaacctacaaaaaggggaggaatttttcctatcttttgattttcctttgaagcaatcctacaatctaaatgactcatataggaattcctatcctttttttcaaaaagggtatcagtgtttctgccaaattgccaaaaacagtggagttagcaattgagatgtattactttgggcctgcccaaagtgcaattagtgatatatatcaccaataactactacaagcttatttgctactgggccttgaagcccatgaagacatgggcctcaacaactactgaaatctctgacaagtatcagtatgcatgcagcttcaataattaggagcctaatacacaagtacaaagcctatcttaatactaccagctttccatctcaaacccagtactgcacagttagccaccccttgcctttgacaaaagaggacaactcaaaaaaaaaagttgtaaaggctcacctatttaattagctccctttcttctgttgctctctacactgtcactctcactgcacttcctagcttagctgttcatctctcacctgactgaaagcctccattgccagtttcttcacctgctttgcttaacaccaaagcttaattcagtaattcatcagctacactagctgctgttaattaagcagcagaagaagtagcagcttagctgctgtaattcatcgcatccatggggatccaagaagtgaagaagaggctgcatctccatgtcgaagcccaaccggagagctgcaagaagaaggagcaggccgccgtgtgggtgctcgccggcggcggcggcggcggcggcggcggcggcgagatcacggtgtcgctgaagccggtcaaggtcagccggccacagctcggcgacgaggaggaggaggaggaggaggtgacgacgccgagaggggaggagtgcagattaccggcggaggcggcgacgtgcccgccggcgcccaagaagccgaggacggcggcggtggcgatcgtcgccggcggcggccggcggtgcaactgctgcgacgacgacggcggcgactcgctggagttcttccgcgtgccggcggatttggaggccgtctttgccaaccgagttgcaaaggcaaattagtagtaattaatttcatagagagataaattcgtcttgaattttaagtgtaatttgatccaagtctagctctgaagatcagtgcaattaatggtgtgtgcatgcatgggtgagtgagtgagagatcagtgcagctgtaaaaaaaagtttctctttgtagcacatgatagtgtgagtgatttccatatgattccatcccttttgattgatcatttcttcaagaattaatcaagaggcatttgtaatttgctctctcgatctcttaaattgtgtgtgctcagtgatttcccgcgtttttttttctttcatctctctttctgtatggcatttggatagagtttggatatttccaagttctttagcaaatggcaaaattttcaagtgcacttgagcttggtgattgtgaatgtttgcatggccatgcatacatcatccaccaatcattttttaatttttggattttgtagatttctttttcaatatttacacaagatatttttccaactacaatgtgtaattaagccataagtattgatgagattccagagtattggcatcagatttccttcatgctttttttaactattgctggtgacgatgaagatgtcttaaacacacacgctaaccctcaacctgggatctaaataaacaaaacttcgcaaaatgttttcgggattatttgattatgtagcaattctcaatggaaatcatggggggattcacatatcttgttgtgttttaaataaataaaattgctgcaaaatgctaacatatgtactcaggacagcccatgattcaatatagcaaagctctaacccgccaaaatttgaaaatctgacttcttagcacaaatctaattaattaaatccccgaaaacatgcaagtcacttgtacatttgatataatcggttgttcctaaagtgatttactttctcgagcttcgagaagaaaaatatactaagtatgatcccaattggaggtactatttatattttacacaagaactttagcaaagttgccaattcccgtacatgatacacaaaaatgtcatccaattcttgtacttgaaaaacctaataaaagaggacagtagtgctttttttagaggacaataatgcttagtgttggctatctcaaacaaaatttgtaagtccatcatattacaggattaatccatccaagttgtataaatcaaatcctacatgcaaacacaaatcagacactccaaaacactgaaagaaaaaagagtcaaagtgcagtggttaacaatacatgcatgcacactatcaacttctcactgatttttcttttttttacaactactactacctttgaagtgctagtagcttctggtcagtgtaggtatcccaatgttccatggaatgttctaatcctttaaacattaaaaattcagatacaactgctgctagatggatgcaggaggcacacacacagtatgtagtatatatgatcatccaacccagttggactggactgaactgttaacttggcaatatactattactgtataaacatttggatactagtgtaacggctcccactaggcctcagtgctatctactataccttttctcccttggatccctctatgcatgggcccctacattgctcaaaggcaccggccttgcaatgtctgtcttcccgcttctactggtttgaccctgcacagtgaaaaggtgtttgttattacaaccctaaaaagaaagtaaaaaaaatatacatcactgctgttaactatgtctttttactaaagatacattactagactagatgtgcccttttgtttcatatgattcttaatcagtttaagatgtgtgatgatggataaagaaattgattcatcttgtggaaatcatctacaagcatgatcactaattgctgctgtcaattattgttgaactgttactgtcttataggatcaagattcaagaggttttgttttatttccaagaattgtaatgcacatagaaaagagtaaaaggccgaataaagtcc

SEQ ID NO: 8344 - DNA, 10348 bp, Oryza sativa
attcctgcagccccgccaagctttccatagcttgttgaccagtaccgaatcatgaaatgttatatgtgggaggatgctgaattgggaaattgcaactgtggtgagaggatccgggatgttaacaaccaaaccgttcccttgtttgtcccctcacagaggagcattcccccttctaatctgaaggatatcgcatcatcccattcgctccaatcaacagtaacacgaaatgcaccggactcacttgcgcactaaaaaaacgccacccacccccagccaccgcatccaacccccaccattgcaaatttgcaatcgatcccaacaaaaaaaacccctcaacgcaaccaaccacagatcccacgcaaaaccgaaccaatcgtcggcgccgccgccggatcagatctacctcaaaactagggtttccgcggcggggcgcgcgtgcgcgcgcggggggacggggacggggacggggaagggagatgcgaacctgccgggagcgggagacgaggcgagcggccaacgccatggctgcggctgcctccgcttcgctgctccgatctcacccaaacctccaagctccgcggcgagagcgagagcgagagagagagagagatggggatgggtggagaggagacgaagaaatggaggcggcgccgcgctttgtgagggctcctccccctctccccgccgtccgatcccccgatcaccccgcgcgtccccgcacgaatctccaagcaatcctgaccaatgggcccatccggttcgatcttgtattttttttacttttttgttctttttaaaacttattctctcgcattttcatttatgcttatatttactgaccaaaatttttattttaatattaaatttagagtgttttttttcgaggtttatttttcaacctttgtttatatatatatatatatatatatatatatatatatatatgacactcatatggggcaccatggtgcccgggcaccatggtatctaatgcacaaaatcactcaaaattttcaaattgtgagtatatatctagttataataattcgattcatacctatacctatcaacaaaacaactcaaatttaactttatttcacaatccatgattacatacctaactaattatatgtatagatgctatatacctagaatcaaaatctaacaaaaacaagttcaaattcagttcaaacttgctttgaactagttagtaaagtggttaatgttaatacctaagtaactgaaaaagattcatactcatttaaattgggtatatactcaatttcaacaatggtgcccggacaccatggagcacaaaacaaatttactatatatatatatatatatattatttataaattattttatttgcaatcataccgaataagccatagagcccttatttataaataagtttttcggaaaggactaaaatgtaaaaaaaatatagtcgtcgtgttcctccggctcggcggctgcattgaccttgggctccgccatgaactcgatgctgctcaggccgctcccgagcgcgggggcgagcggtggtcggggctcgccggggagggggcgggtggttggctcggcggtgagtttcggcgggcgcgggagatggcggcgcggggtggcggtggtggcggcgggggcgggggcggaggcgtcgtggatggaggaggcgggggtggcggtgctggaggagggggtgaggcggaacccggcggtgtcggactcgtaccggccgccggggatgccgcggccgaacgcgacggtgctggaggcgcaggcgcgggtgtgcacggggcccgagcagacgcgcccgctcggggaggagcaggccatgcgcgtcctcgacaccatcctccgctccggtgagtgagtcaagtcaccgccatccttgccggcgggtggcctcgcactctcgccgcttcagctttggtgatttctagcatcgatcggatcctgcgttgcagccaccgtctgtgcggcaggaaattgaaattctgctgctttcactgtcactactggaatttagaactcgagtcctatgacactaatatgtagactgcggttagttttgatccacattatgatgattgcagtaacatctcatctccttttatctaggaatgcaaaattttgcttgaaatggagctttctagagtttagcacttttttgtgaaacattagctcgcgatttatgctcaattgtactccggagtgtaatactaaactttcggtgggacatttattgactttggatactgatttttacaatttgcttgtaaggttgtatttgagtgacaagtttacagtaggtctgatttgtgattggtttattttcattgactctttgccttccataacaatcttatgatatatgttacttataatctcttgtgtaggaatgggagaactcaaagatgagccagtatccagtgcacaactgggtgcattcttcgctggcatgacaataagagctaattcctttccagaagccacccaatggagtgagggtgagcgtcgtgccatgagcttattttggccacggcttgtcaatgttcttccccccgaggtgaaatttatagcagatccggaaggaacaatcatgggagcaaatggtttaactggacctcggtatgttggtcaaagcactgcagagatgagacttgtcagtgctttgagagaagttcttgctggtggccatttgggttatgaggaagttcagggtgtactaaaggatgttctaccagttgaattagccagtgcaaattcaactatggttaatgaagcactgctggcagcatttcttattggacagcggatgaatagggagactgatcgcgagctcaaaggatattgtctagcctttgatgatgaattaggtaacatcaagtcagtttctctttctcaaattgaatataaaaaaattatagtgtcattaacaccacattatatcaggtccaactccagttgctgatgtcaaatcattgacacactatggtgagccctatgatggaaatacacgctttttcaggagtactctgtttgttgcagctgttagagcctgctatggtgaggcttgtctcctccatggtgttgagtggatgccacccaaggtcagtacaaaagcatacccatcaacaatcatcatacactagtgtttttctttaatgctatggaagttttggttaggagatggacttacctatcacttaattttgaaaaccctctgtattacttaatgatcaagattttcagggaggcataacagaaggtcagatgcttaaattcatgggtgcaaacacacatttgtccacattacaggccaaaacactactggaggtgtgcatgaacttctgcctaattttcctgcaaccctttttgtgcactctcctctgactgcatctaattatatcaactgttttggttgctttcaggatgagaataccggctttgcatatttgggtctccaagaagcttgcccaccattgtaagttttgacattttcttggtaattatgtgcttcagtgaccaagtcttgttgatatagtattcctgtagacattcagataatcaggaatggcacctcagcctgattttctgaagaaaactgatcataatatctgacttaagtccatacacagccatgaagtttagcagtaaaattttcaaaatggaatcactgcctttacttttttttggaactgcaggaaacttatgctttcagtttaaatgttgccgctttataatatttgtcttcatttaaaaaacaatttattgaaagttgtaatgtatgaaaatgtgttctttttactcactattcttccagatattcgattattgggcttagggagcatattaagaaacggccaccgctagctacctctgagaaagttcagcaatttgtgagagtgagtaactcttctcatccacctgtagtcctttattgtaaggaagacagtatcataagagcaccataatgggtacaactattataacttttgtagcatcctttatgtttatatatacattgtagatcatttgtgcatattataccactgtagaacataaaattggtcacatttcactgctggcagatctttgataaactactaatttaaatatttagtacaacctactgtcttcatttcttagtaaaatgtttggcagtttagtagcttacattttcagagtgtttcctcaacataatgtatgcataaaaaactctttgactacaagtcaagaagactggagatatttcttgtaattctacattcattgaatgtaaaaatataactgttctgtatcacctactatttgggaatccttgttaatttgttgtaaatttgagatgaatgcattattattatatgtccttccttgttcaattatgtttctgttgtaaatgtcacaagttctgctcacttaaataaatactactggttgattggcttatttgtcttcaaattttccaccaggcgcgaggaagagaatcaatggttgctggattttatcatgtgggctatgaagatccattgcttatgctcatgaggaggagaactgttcatgctggactagttgtaaaggtattatcttgtgttaatgtgttatatggcgggtttaagctttatgttactgtttagatgtcttgccccatataacccagcctatgggtttatttgtgcacttgttgctaagaccacatatgtagaaattggccgccttgcgctattaacattttgagttccgtttctgacagataggtcattctcctgaacttttgaacaaacagcttctttcccttctctattattctcggaatgcaaatccaataattaaacatggtcatttctcaaatttatggtgcgcgtgtagggtgaggagggtgcgctttctatgacaaccaaagaaagatctgctcatgcatcaaaaggacttccagtgaaccattgctcagggttccggataccaaacagcacagatttctccgagactgatggtaaagatatttcgctttttattgattataaatattcctcttcatagtgatcatatgtgtttgttggtgatgatggggtatgttcagtgttttcaaaaatttaagatttatacatcttggaagttgattcatattttttttaaaaaaaaagaggttttgtgaatgactaatctggattgcttgttttgaaatgcccaataacatggttatgaaataatttcagcctgagcttgtctcaatcatctttcaggcatttctagagagggcttcagtgtcattgtgaatgctcaggaacttggttttgaatccactgagactccacgaactgatagatcagtaagccattttgcccatgcctgcggttgttctaccttagtttcatatttctatatgccgtcaacttccaatagaggctggcagtcatccatacaagtctgttaatgctttgtaaaatgttccaaattacccttgtattaacgtgtatcaccctgacatgttagtaggatattatatttttagcatagttataatgtttacttactgtatctccggactgaatcaggtcctgaaaaacttggagttgggtttggcagcgctgagtggggagaaaggaccagcctatgacagaatagtcctaaatgctgccatggttgaccacctcttaggctgcactggagctgaggatatcaagtccgcacttgacagggcaagagaagccattgacagcggtaaagccctgagcaggctcatgaattacataaaaatctcgcacaaagtgtcctagctcgcaagtgtgctggctgtacaattttggtttctggtgtcgtggtggaatactctcatcgactcatacacgagcacgagtgctttcaagttgctcagctaacatggagaacatccctgacgtgaatagtcacttgcaaggccttgtcaataaattaactgaaagtctgaaaaactgaaaatgttagcgatggggaatacttgattaatcaatctttctttagccatgttctgagagaatctggctgcgtgtaccatatgcaaattctgttcatgagatgtgtgaccgaatacctgcatcaagacacaagggatgagttatcttgattttgttcgtgaaacaaaatctgcaattctcgttgtaatgggttactccgaagtctgaatatgggtgctcgtttggaattacttgtactgtttgtttgaagtttggttgtgcaagagctttcgagaggatgcacctgttgctaccgcattttcagttttgaacccctgctctccttacatctttttttctagaaaaatgtgcatgtacttgaagctaatgtacaagctcccttttcacatgtctttttattttcaaattcaaaatttaagtcgagttttggcctcaaatggatcacccgtgcttccattttcctctctactcccttcatcccataaaaaaccaacctagtactggatgtggcatatcttgtacaactaattgtaacatatccctgtccaaattcgttgtactaggatatgtctattcgttttttggtgacggagggagtaggtaccaattcaccaaggtcagtttctggcctagctaaaagaaaatcgaacaaatttcaaacgttagtgcatgcaaaatgcaagtatatattatgaaaaatgtgaggatttaacttttgttatgttggttttgtagttattataccctactaaggccttgtttagatcccctaacaaaatttttcaccacgtcacatcaaatgtttggatacatatatggagtattaaatataaacgaaaaaataactaatttacacatattgcatgtaaattgcgagacgaatcttttgagcctaattgctctatgatttaacaatgtggtgctacagtacatatttactaatgacggattaattagacttaataaatttgtctcgcagtttacaggcagattttataatttgttttattattagactatgtttaatatttcaaatgtctatccgtatatccgatatgacacggcaaaaaatttcaccctggatctaaacgcagcctaaatatcaattgtacaagaattattgaccaaatctaatttttgaacactccgcaaatcaaaatgcatcctataatatgaaaacgaaatttgaatttatgtgcaaaacactcttgtccgtagcggcatactacgcctgacggtgacggggccatacgccgcgtcgccgtaaatggcgaacaaggttaatggggaaattgcgattggttcgccttcccggctgttcccgctctcatggctgcgccgccgccgccgccttcgccaagctcgggagaggaggggacgagcgcaatgtgaaaccgggggctaccccggggtgaagaacgagtgacggcgggcggccgccagcactgccccgtgccaaaagcgccgttgcggtagcaggtccgtgtgtctcctccacggcatgcccgccacctgctcgacgatagttctccgccgcccgctctcacatttcatgccgctgggtgtgcgcccgcgacggggatggagagcattgtgcgtggaggaccgtggtccgtggatcctgcagaatccgcgatggatgggttttctgtatgcaatgcagatgcagtgccaatccaaagttgcttcctgcgtttgggattgtcatggtgggtgggtggaatgttgagctggcaatgggaaaaattaaggtttatcgcctcacatcaggttaggttctacaatatcttctttttttcctctcttcagcatttttctactactcgtagtagtagaatgctaactgtagaggccaagtactttttctgtagcgaaggtctgtccagcattcattttgcttatccaaatgaaggcgtaggtcagcaacatgagtagttgcttctttctctaaggagtctgaactgtgatttctttgtattcattcacatgtaaaacctcatcctactatgttttagcactagctagattcagagcaaaacaccacataacatcacatggtttcatgaagaagtgtagaatatgttgcatgattaccacaaaacaacacatgcatatcaatgaggaagtaacaaaaacaatatgccatgtacatgttgttcacctcacaccaagttggtgaaacaattacaaagtttatggaaacttgaactacacactgcctgcctatatttacaagcgtccttaagaacacaacctttgaatgaatcgttcatacaaaattacagatggttcactaaacccattgcaatatcctacacctcacataaattccttacaaaaatacatattgtacaagaattacatgctctaaggtgaatcaattttatgattttggtgattcagactttgtgtgcccaggtttacctatgatggctttcttcacttttgctagttgatgcttcacctttgatccaacaccagacaaaatgttatgttttttatgtgataccttctgttctgctcctcgttcttctattttcactgttgcttcatcagtgatattattagtttcctcttcagcctttgttttctcatcacaagtattctcgtctggcttatttgattcatccgcctttggactatgttcttcatctgtgctgaattctggctttgttatctccacaaatttttcgtcggcctcagaagttgctttgggtgaaaccacattgagaccacgttcctgaacctgtgaatcaaaaagttctttctcttcattagattttatcttcactgcttgagtgttaccttcaactgtttcatgtacattctcttctttgatcacaggctctgttattgccataaattcctggtttccttcagtttcttttggtaacttctgtgcagcagtttcctgctcctcctgccgattagaatcttcaagcttgtctaacacggtgttatggtccaccacagtttggttatcagctgtttcatctttcttatcttggttaacatgcaaatttggactatctgagtgtgtctcaagggctttttcaaagttgctgacttcattgtttgagatcatactctctttcttgtccatgcatgtcgaacttgcaggaatttccttttcataagcaaaatttcgatcagtgtggctaactggttcagttatttcaggtgcctgctcatcagatatttcttcagaacatgtttctttcgacttatcatcatgtaaattttctatctgttcttcagtatgtccacctgcggtcgtatgctggtcctcctcattcgtttctattacttcactctccacttgaccctcagtagtacttctcacttcaacataggaagattcaatggactcttcttgttctgtgcaaggagggctttgaacactgtcagcctcgttaggcaatttttcagcgttgcctgtatcgggttctatcaaggagagtgtttgctcatcctttgcaccatgtctattttcatgtaaagactcatgcggaagttctgttcctacttcctccaaagcatcctcttgtgaagcctttgggcttgttatgtcatcttggtccctattcaagcttccgtcttcaatttctgttgctgcttccacgttttcctgacaaactgtatcaaatgactcttcatccaattcaaagtctctagcttccatttttttgatcggatcagctgccttggctgatatcagtttgctagaaatttcatcctgggcattatcttggtatactggtgcttccaaatcacaagtgttccttttgagctcttcatcagtttccaatgatttttggacgtccatctcgacatcataactctgttcttttactggttcttttgtttcttcagagccttctaccttttctttttcttgttcaaaggtgagtttttcatccaccgatttttctataggaaatgccaccaaattttcttcttgttgagaagcgatcaaacaacttccatccttcgttgtttcttcttgctccttttcaacctcggtttctgaatctttctttggatcatcattgtcttttcccaatattaggttcatcaggaaactagagacaggcaaataatcttgttcagcttctttgtgatcttcttcatgtgcatcaccaagttctgcatcatgcctgtcttcttcatcttgttctttggttacttgattctcttcttgctcctctggttcagcaggcagtgccttctctggtgacatggactctttttctgtatcttccaaaccaaatccctgctcagttgtgttttcatcctgtgtaggatgcacaggaagaccaagcttgtgatcttccgtctccttgttaatattttctccctctgattctgtaactacagatgaaacatca

SEQ ID NO: 8345 - DNA, 40255 bp, Oryza sativa
catagttactctacaaatttgtactacgggggtagagctgggtttttgctgctccacagctccactccactttaaaagacacactaccctttaaaattttagtgtatttacatgaaaatgccactgaactacctccaccaacctccccctcccgttctctctccttctccgtctccctcccgagccctaacagatgcagtaggcggcatcggcgtcggcgtcgggctgcggcgttggcggcggcgccgtcgatggcggcggcaggctgcggcgtcgttggcaggcggcggcgtcgtcgtcggcggcgacggcaggcgccacggcggcggtgcgcggcaagcacgcgggaggaagatgggcggcgcgcggccggcggagggcagagggcgcaggggatggggcggccggcggctgggatttttgtttttatttttttttattttttttctttttttaaatctgaagctgaaatgtagccaaacacttttgatgggtgtccaactccaactagagttagctcccactgtagtaggagtttggagttaggagttgtagtttggagcactaccaaacggagcctattttagcgaagtgttagcgtttgattttcatggatcgtcgccgtgatgctcgggtgctaccgggaggtgaatccggccactattatagtacttaattgaagtcatcgaactcgttgccgtcaaaaactaatctattatttaaaccgattatttatccctcgtctgatgagtaacctgctctgtcacgtgtatcatagctctgctcggccttgtttggatccaatgaaaactcccagcttctcatgggaaatgggccggaatcccggtatgttagttaaggcctcatggaagacagtatgggatcatacactgacactggccagcagggtttacaaatagcaatctcgattctccggaaataaaaaaacacaatctaagattggccagtgaaagacgagccctgttagattgtaataattggctataactctttaagcaaaggccggaatgtttttccattatctaaaaagaaagacgagccctgtgaaacattcgattttttttcgcaaatttcaaacaatatacatgttaaacaaatttcgacacattatgaaatttgaataagacgcacattttcaagatgatcgaaattcgttaaagatgatgaacctgttggccaagatatattgagatggtgttagagatgtaatcctgctataatatgtgaaataaacagttttaaaaactcggtctagccatatacccctccatcctaaattacagggtgtcccttttttttaaagaaaacttaaactcggtagcttttgattaatgactatactaaccatacatttttttttgcggggaaaagggaagtattactcaggaataatatcgtcaattacaagctttgagataaaggtgcaatcattttcacaccaaaatcccgacaagttttcactgcgacttttattagctaacatatgactaactaaaatttggcttctatgaaccttcctgagcaaacactcccgacttccagcgaggagatccttaatctctctaacggcaaaggcaagctccgagcgctcaacttctttggcttggatcatttgtaacgctaccaagcagtccgtttccacctgtactgggagcagcgtccactgaagcgccaaggcaataccctctctgcacgcgaccaactctgcttctaatgcactatgacagctgttcagggttttgcaggaagcaaaaatcaccctcccctcccagtccctcatgactatgccaatgccccccttctctgacagggcatcaaaagagccatctatattaaccttcaaccatccggtttgcggtctcacccatttttgtttgcaagctggtcttgatcctggagggacctctttcccataagccaagacagattagaacgttttttcctttctctgaaccaactacagacttttgtcggatgttgaacagtgactgaatatagctctcaaggaatcttttagaagactcgatcgttggaggggttttctcatggacgatttcattacgaacaaaccaatttcgccataacaccaagagaagggccgcccgttcagattcggatagcctgtctaacagatcaaacagccaggctttattatccatacgcacatcagtgagcacaggaaagtgcccatcaccttgcatagccatcagcaaaaatcttgactgggaacagcgaagaagagcatgctgggtgtcttcagtttctgacccacataccccacaggtagctatccgctcaagcttccttttcgttttattagccattgttgcaagggagtcagtggcaaccttccaagcaaaacttctcactttctgagggacttcacacttccagatcaggtcccatctacgatcgcctgccatattcgacggacctgtatcctcttgattcttcaaattcagagccaagtaataagcactcctgactgagaatctaccatgcaagtctggatgccaagctataaaatcttcgtcctcccaatttgaaatacatatgctaagtagtatgcatgttatattattagatttatattttaaagtactttcatgtgacgctaatttcatattcgttaggaaaacataacattaaagaattactgatcaaaataatttgggacggaagaagtagtagtgcacacttttttttctcaaacttaatttacagctaagctgcttagaaacaacaacaagaagaagaacaaaaaatcaatgacgaatcacattatatcatccagagaacacatctagttatacactgacgacgaggaataactaatgcactactcagcaagcaataatttatcaaggctacatggaagcatcggcaaggtccttcctgtacggagccggctggtcctcgtcggcggcggaggcgtccaccaccggcgtcccgccggcctccacctgcgcctgcgcccgctccggcaccggcacgtacgtcgccaccgtgtccttcctgaacgtcaggtagacgacggcgaccaggtaggcggccatgagcgcgaacaccaccacggagatgaggccattggcatacttggggaggttgttgtggacgagccagtccacgtatgtccacactaggaagtaggtgttgacgacgatgagcgcgaagctcaggatccacgcgatcaccaccgtctgcaaaaattattggatcatttgccaatttatgtatctagcatggcgaattaatcggttttcgtgtttgtgtttgtgtgggtgggtgaatgtgaatgttttttggttggagaaatggtttaaggaagcttacatagatggattccttgaggggtccaactttcttgctgctgttgcagaacttgagtagagggatgagagcgaacggcagctcaaatgacaggatcatctgtatccaaatcaagaattcaggatattgttgcttttggaggagcaaagcgaattcctacagaatgttcaattggaaaaataaagctgaaaacaggttgatgagtcttactgatgacaggatgattagcttgccggcgcctgagggaccactgacaatggagacgatgaggctaggagctatggcgatgactcgggtgatgaggttccttacccaattcttcatcttcatgtccagaaacccctggataattatcataacaaaagttggctatatttactgaaatagataatactcaagagtggacaaatgatatgcaaggtatcaaatagtttgtacaaacttgataacacctcgatcaatagtgtaaacttgacaaaccctgctccaggtttactatcaagggtgagcactacggaactgaattacctgcatgatgacctgcccagcgaacgtgcaactgatagtggtgctttgcccagaagctagcagcgcaacagcatacaccaccgagcttgatctccccaaaacattctgaaagtaagagataatcaaaataaggcttgaattcagaatgtctgacatgatcctcagtgagctctggtctgtaatttcttccatattacagaacaagatgtctataagatgcttctgaaagtactatcttttatccaggaaatgaacattcgaacagttcttaccctgagtaaaagaggtgtggattgcagagttaggtcaccacacgtgttggcatcagctggagaaagattattcgcattgcaaatggatccagcaacaacaacgactgaaacatttatgaggaaagccacgatgaatgcaagactacactcaataaggaagtatctgcaagcagcctatcggaaacaagatagggtcaaaccattagccactcaacaacaaaccatagctgatcattacatcatctattatcaatgcaacctactctgatgcttttgtctgatcgtggggtcttccttgacaggaccagagcagagtgcaagaacaagttgtatctgcatgcatgttatgaaaactcctcatctcatgaacttgtaccatggatcaagtaaaaagtagctacgatcaccaaagccctgataactgattgggtttcttacggtgtgatgatagcgccaaagagtgcgatcgcattggcagcagcgcctttcccttggagagaagggacaaacatgcccttgaccacctctcctgcagacggcctcaaatagcttagctctccgaagaagcaagctgccatagtgaacatgaatgctgctatgatgaactccagcttccgagcctggtggacatgtcatatggtaaggtcaattcgtcagtagcccattctcagtgtaattcatctgacaatcatataagtctgagaaattctttgcgcaccccaaatctctgtactccaagaagcaagagggtgctgaacactgtgagaataactccagcccacactggaatcttaagcaatatgttgaacgcaaaagctgtgcccaacactgcactaacaaaagaacgtgttactcatgctaaatctagcacagaaataaataaataaataaataaataaataaataaataaataaaacatcgatcaaccttcaggaatgtcatcagaaatcaccgccaactccgcaatgatccataagaaaatgttgacatagtgcgggtactcttccctgcacagttcagcaaggtgccttcctgtacagaactcaacaaaagcatggacaacataagatgataaggtgatgatgcatgattagcatgcaaagagcaaggttaatggttaagtgaaatatacctgttttcactccaaggttggcagctaatgtttggatcagaagtgcaaagaccatcccaactaagatgacccacagaagctgttcattgtaaaatgtaaattgatgttaccagaagaagcattttatataaagaggaggcaggaaaaacgaaatagttaattttgtttttctcctacttttctgtttcttgattgaatttgtcttctttaaatattaggaaagaaacaaattattgaccaccatttactaggcatgggagactttgtttgatttcgtgtactactgctactattatatcatatatataaggttcatgtcatgatagagtcatctcaagtcaatgattgatattccaacgttcttatatgtgtactccccaaaataatccaattttctttcttcaaataagacattgttgcttatgctagttaacggggagtccttttggtacagtccttaggatagacttaagtttaaactttgattatttaggcctttaaggaaacatatttcaatattctgtaaaggccacaccctcagtggaaggtttagaattcttcttgttcagctatgaaatcagtgcaagaaaatctcaaaatattatttatatttggaattttaaagatatttcaagtcaaaacatccaggaatacctctaaaatgtttaagagtctgttttgttcagatttgatgcccaaataagtgttttcctgacgcttatactaagtaggttctttgtaatagttaacaattttcaaaggccaaaccaggcaattttccaactaataaatggttccaagatagtctttcaatcatttattccaagattgggagcctttcaccaggtctttatttgattaaccttggttacattcaccctttccatgcgcaggcaaaaatctatgacacatggttaattagttcgtaaaagtagttcagatccaagacgaagaggcaagaactatgcagtgtacctcatacttgaagtcagctccagcttgcatgtcagtttccactgtcaaatcatgtttcagaaaaaagctataccacctcaacctcttctttttctttttttcttaatgagcgtatcaaaacaatatgaagctctaggcaaaagataggagcttacagttgctaggatctaggaagccaatggccaccagagctccaggcccaacatgagccaagaatttcctccatcttggctgttccacccagcaaaaagtaagcataggattgaaacaagcactagcttattgtggcattagaactccatgaatgcgcaaaatgtagtcgcttacctgcacccgaaactgcccatctttttcactgtcaatagtcttttctttgtactcatcagtctcactaacactctgcaccacacctccatggagagtttctcgtccaacctctctcatctcaccagtcccttccatattctatgttgctaatgcaccttgtctggaagatatgaaaaagtatgtcttgctctagttaagagccacatacatcctttgtattttatagacccagagaccagttgacgactgtcccatacagaaaccaaaacttcaagtacagtacaagagcagagtgactagctatcatgatggttcctgttgattcctcgcttattagatgcctttcagatctgctactcttgttgattgcagtaacaactgagtctgcaatattaaaatggaaattctaatcactttattttcagtattaaccacctcaatctagaatgtttaagctgctgaaaaatagcacttttagtcacatttcaacagcccccgccgcactataagttgtttagtccactgctacaactaaatgagatgcaaatatttttcatcggacaaataagtcatcacaaattctggtaaacttgggcaaacaaatgcccagtggcatgaggggcccaaggctaactgcagcataacacaatcacaattacaagctgactaccacgcataagaattcaaagctgcattacccaaacacctagacgtaaattcagcatgaccatcgatgttgtcatccgtcaaacctgaggatctacccaataggattttttaaattagaagggatttccttatctcccatacacagccacatgggtcgtatgggtcttcgctcctagatattttttggcccttatacaaagtttgatatgttcctttacagctaaacacctaggcttaggaaacaccaacgtctctacctaagatacaataaaatacatttgataaattgttaagaacattaatgccgccgatgtacctttgcttggctgttgctttccgattattttggagcctttcgggcagccatttttcggtgaaggcaaccttaagcagctcagacctggtgcagtccacatctctgtattctattgtagctattcagatgataagacttaaaaaataagcaacagatgaaaggacaataagcgtacagtcagattgtacttaaaaaacctcaaacctactctccattggaatccatattctactcaccaaattggaactagcagagaagagtgtgatgtgaccaccacctcatggaggatgaggtgcccctccatgcaccgaatggttagcttgctaacgagttgatacgcaggcgtgcgaaaatttatattgtcggccatggcttcatttggtcgaatgtggaagtcaagaactgtggatttatggcagtggacagaagaacaatgacgggaagtgggaactagacttgggaacggggaatttaaaatgctattaaaattttaaattaaaattgggaattgcattttaaaatttaaattgcaaatcgacttaggttttcagtagtactaaaatcccagaggcacaggacgatttggagtgactagcagtgatcaaattattggccacgaatcaaccagaaagctcataaacccctactacctaataatttcacaggacagtaaaacacacgagtagctcaccatcgccgagggagagaggcgcgggcggctcctcgccggggggctgcggcgacgacggggacgacgagcgcgaggcggacctcgacatggtcccccgcggcgcggcgctcgggaggggccgcggggtcgacgagcaccctcgggacggggaccctgtgggggacgggttccccggcgagcgagaaggagaggaggaggagcgagtcgtcgaggcggaggtcggcggcggagagctctgggcggaagaggtagaggcgtcgtcgccggcaacggcggccatttcggtcgcgaaggtccaggcggaggagtttgaagtcaggccgagctttaataagagaagcccagcccactctacataataaaagaagcccagcccactacctaatgaaacgagcccagccaataaaataaaagaagctcagcccactacataatgaaacgagcccagccaataaaataaaagaagcccagcccactctacataatgaagcgagcccagccaataaaataaaagaagcctagcccactaataataataattgtttaacaagcgtcagacgtgttggttacgtacgcggactcgtggagtactacacatatgtgtgcaggtgcagcacattgcgaccccgaccgcaacccaattaggcgcggccgcgatgaacgacgacgtggtggctgagatcctcttgcggttgccggcgaagagcgtcctccggtgccgcgccgtctgccggagctggcgccgcatcaccaccgccgactacttcgtcgccgcccactcccgccgccggccgctgcagctcctcggctacacggggcccaacgacgagtcgctgcgcgacgacgaattcttggtcacctccgccccggtcaccgccgtcccagccgtctacgacgggacgacacggagtgccggcgatttctgcggcgcaacgtgcgcctgtgcctccgtggatcctgcgacgggctcctgctgttcgagcaggtgaacgccgagaccatgctcatctgcaacccggcgacacggcagctcgtcaatctgccgccggtgagcactggcggcgtcgtcgtcgaccggaacgacctccggctccactcttccgccttctacttccaccggccgtccggcgagtaccgcgtgctgtgctaccggaagggcaccaactacatcctctccaccggctccggcgaggcgcggcggctcggccccgtccccgaccagcaacgcaggacttgctccttctccgccgtgaccgtcggcaagacggtcggcgagagcgtgtactgggaccgccgtgaggtcgacgatcggagccggataatggcgttcgacacggtgtcggagaggttccgggcggtcgcgccgccgccggtggagcatgccgacgaaggcccgctgctggacatgcatggacggcacgctcgccgtggcggcgatgccggcggagccgtacctggacgtgtgggccagagacggcggcggcggcgagaggtgggtgcggcgcctccgggtggagctgccggcgggatattattccaaggagttgaagcctcgggggcttggtagagctatcttggacgacgcgggtctactgcttgtcaccttgtcctgcagatggggcttggtgtacgacaccaaggagaagaggatgctcagctgctctcatcgtagcagaagcaatccgtggaatgcagcttaccgggagagcctcatcacggtgaaaccttgcacacccccgctcccgctaaactctgagccatggttaaatttctactagtggttgcagtgatatgagtagcgccccaatatctcaagttcaaatttttataggagcgaatttcagattggattatttaagagctaagttcctaatttaaaaaggctgcatatatagttggatgtaaaggctagataaaaaaaccctactaacaaaaattactgtccacgagcatactgtcgacacatcggtgacggagccgccggtgaggaagtcggcgtcgggggaggagagtacgcaggggcctctccggtgagatgccaacgtctccatggcggataccaccttgctcgtgtcgtgactcatgagggttttgtttttgttttttttccttttttgttctttttttttttaccgtggggttttgggggctaaagaagaagatggttacgtgtatgtacagctgggtccagttctaaaaaaaatacagctgggtccccgggtccaccggcagtgaaacaattccggtggaccaagtctatggcaaagctagccgtgtggcatagggcccacgaattagtagctgggttcacgtggaccagcaacagtaacccaactagagttatatctcttgaacagaggcacaagcgagaaaattgcacatctaccattccataagaatggcttcgctagaataccattatgaaaatgggcttcgctagaataccatcctcaatcagagtgtcttcgccaaaatgccatcctggacggaaatgcccctggctcttctttttcctccatcccgtgcgtgaagagctcgccggcgaccatggccagctccaccgccgcgccaccgatgctgccttgccgactgcgattggggtgttgctctccctgccatccccgccagtgccgacggcgggcgcgggctccagcggagggctgcacggtggcggcaggtgcgatcgacggcggcaagcgcgggctccggtggagggctggtcgatggcggcaggcgcggttgacggcagcgggcgtgggctccagcggagggctgcgcggtggcgacgaggaggcggcggccaggagcggcgccaccggctccccgtgcatgcgcgtcagccggatcctcgccgtcgctgccggagtccttccgtgatgacctcagctgcacgagcacaccactctaccgtcggcaaggcggcatcggtggcacggaggtgtagctggccatggtcgctggcgagctcttcacgcgtgggatggaggaagaagaagagccaggggcattttcatccaggatggcattttggcaaagacactctggttgaggatggtattccaacgaagcctgttttcataatagtattctagcgaagccattcttatgggatggtagatatgcaattttctcggcacaagttgaataacctaacctaaggctattgcttctgtagaggttagaacatttcatcacacttttctaaacctctatgatcaagcagaaccataatcccagaaggaagatgcccccaacttaaaaccaagagaatatgaaaatgcaaggcacgtttgaggtaatttgcacagatcatatgaacataatcagttgcatcgaggcacatgaatccgttgcatacagatgtaagaagaaactgacaacttatacagtatgccaacagacacccattccaaacttatgcaaagacaagagacgtgcaaatcgattcgtcatgaatcatgattcttacataggtaaaaaaaatggaatgcgatggtttcactgctactaaatgctaagtactgtgtgaagtagattgccagatggttgaaccacctaccaccggaaatatactgaaccgaattcactggtagctgggtctaccgttactccattttgatgtcacactgtcttttgacagcagaagataagctcaatgtcttgcagtttatcgagatggtcaatgtgttcactgaaagaacaataaactgtgcatggaaaggtattaggacattgggacatgatcacatgatctaagtttatcaaattttcaagtcaatgctctggagacgagaggaacattctctagagagaaaagcaacaaagtggaactttatccctacctgagcttaggcttccaataaattcatctatttggtgcctcatcatgtacaactcttcagccctacatttggatgatcactcctctattatcctgcgtgctgggaaaagcagaagttcaaaatggtggcagaataagagtaaataaacaatgtatactcatttgcacacaacagacttgcccaagtgcaacagttgccaatgaagctggccaaaattgatatcgaactatgatttagacaaagtatgacactgtgcaaataatcgaatgtactaacgttgggtttccccagaggcggcgcagatgaaggtcccaatctagcacaaatcaatgggatgtgcagctgtgcacaacattcatcatcaactgtcgcttcagttcacatcgaatccctatacaaaaataagcaagaacgattagttcagcattcagaaaaacttacattaagttgtatgaatcaagctgtattgcatatatattgttgcaaacatagtttcgaacgtctcagaatagtatagagctttaaaatcagatcaattgcatttgggcccaaaccagtaaaacttacctatgtatagcttaacacccattcacagggaatctgaaagtttagaatagagtattaaaaaccccacaatataactgaacgttgttgttttaatggcaaaagaaaacagggattgctctagtttcaaaagctgcaattcattgtagtacaccgacatctgaatgcccagtttaaaggtagatttgttttttcttatgctggattgtatgaattcgacataatttatataaagaattatcattcatttgccaatcataactattatactgttagtccaaactccaaagaagagtaaatataacagcacaatgcactgaacatgtgagatgttgagcgcaacaatagtgtggcaaacacatgctgctcatgtacttaattgcaaaacttaccagatatagggttagatcctttgacatgtctttcttgacataattgctttaatcataactctttctgaaaggtagcctaaaatagcaacactgcacagcaaaacaaaaaaaaaacctattatatgcaaaaatctactatatagtagtgctgtcatgtaacgatgatcttaaagtgccaacatacatgatatttagtgggttgtagaacaaaagaagtgcttggacagtatgaacctcagacaggtaatctagcgcatgtgttaacatatcagtggatctttcgatgaatagagagtacaacattcaaccaaagagtggttatgagttatcaatgaagatgaaatgaaatttgttgccttattatactcacctttcatatgttgcgatctacttatatgttaaccatccatattgaagcttacaacatatgtgctttcaagttgtattagctagttacaagcaagttctaaaacttattatcattcataagcttctactgtctgcatgtaatctagggtaaagagaaacttactcagccagtgttttctagtacataaatgtcatcattctgctgctgcttattctcataaacgttgcctctttgaccccatcctgtcttcactctcttggtgattttcatgactgtgcgagcactgtcatctctgttgaatcagcaacaaaatcaatccgttgcagctcaagttcgacacacaaaggtagaaagtgcagacctatttttctagacaggataaatttcatttctaggttctgagtacatatgctttatatactaaatcagttataatgctttgttgctagtctaaccaatgcaaaaacttgcacaagaaaatagactaaagaaaatgtcacaaacacatcagaactaaatttgtcatcacaatacctgtgcaaaagagcatgccaatcactttcagcatgcttgtcctgtccatgcttctgacttctaggcttaaattcgccagaaggagctgcaagaccattatcacgctctgccatttccatcattttttgtgagagcatatcaacatgttgcttctttcccctttcactcaatgcatcaatcactggcatgaatgctgctggatcaaatgaatatcctttaaccattaacagcttgagtaacctatgtccatgatccacctcatcaactttgcagagtccctcaataatctgcttatatgggaatctatggatagagatccttaattcaagcactgtttctagaatattcatggcttccaaccatctaccataagtagataactgggtgcacattaaactatagagcacttccttctgaccacatgtactcagagaagcatcaaatactctctgagctgcagagaaatctgaagttttgcagaaagccttaatcaacaactcaaaagaagttatattaggaacaatttcattctgtaacatttcatctaaaagaggcatggccttgttcaccattccccgttcacaaaatgactttatcaggctattataggtcatgacattgggacaaatccccttccccttcatttcactaatcaatttaaggatttcatctgaattgtgtttttcccgaaatccccatatcaacaagttgtatgtccttgtgcttggcttgcaacctttcttttccatgtccctcaggaccttaacagccagagaagtcttcccatgcttgcaatacccatgaataaaggtatcatatagaaccgaatcaggagagatatctttgcctatcatctcaagcaatttcttctttgcttcatcaaacctgccctctttgcacaatgcactcaccagtgtagaataagtgattcggtcaggaagacatcttttgctgctggaagaatcagtaagtaaacttaggaatgaataacctaatctgccaagagccaaactaccttcgttccacatgccatcgacaatgtccatggccatatccaatttgttgtttctacatagtccatcaataatgatattgcagcttgctgtatccaagctgtatcctttctcactcatcctctctaacaatcgttctgcctctgtaatcctaccagctttccacaaactttgcagcagaacattgtaagtaaatgaattcggggcacaccccttctgtgccatctcatcaagaatcctattggctgcagcagcatttccctctgagcaataagcgtggagcaaactagtataggtcacaacatctggtgtcatgacaccactcttcacaaaatcctccactttcctcacatcaaacgctttgccctccttgcacaacccatccacaataatattgtaggtgtagctattaggttgaacaccctcatgcgccatctccctcagcagctcctgtgcttccccaaccattccattcctcaccagccctgacaaccaacggttgtaactctcaacccgcctcaagaaaccaccgcacctcataatatccaccaggactcttgcttcatccaccataccagcctcacagaacccactcagcatcacgtcaaacgtcacctggtcaggcctcggcagacctctctcccatttttcctgcatgtcgttgaatatcctgtatgcatctagcacccgcccagctttgcagagtgcagagatcctcgcattgaatgtgaccacatttggagcaagaccctcatctctcatgcgctcaactagcctctcagcctcatccacctggccctcgcggcagaaccccgcgactactgtgttgcataccaccaaattcatcgttggcattgaatcgagcaccccaagcgcgtccatactcctccccgcacggcagtacccacgcgccaggatcccgaagctgaactcgttcctttccggcattgcgtcgaacaccctgcgggcgagctccatccggccagcggcacagagcgcctggagcaggatgttgcgcgtgaagacgtccggggcggcgccggacaagaggagatccttgtagagcgactcgacgaggtcgaatcgggcctcctggagcgcggcgaggagcaggcggttgtagacgggggtgggcggcggcggcgcggaggggagcgcgcagagggagcggaacgcggagagggagaacccgagcgggaggcgcagcggcgacgatgaggaggagaggagcgcgaggaggtgcggcgcggggtccgggagggagaggaggtggcggaggaggctcgggaggagggcggcgtcgtgggcggcggcggcggcgaggatgcgggcgaggaatgaggtggagtgcggcgacggcggggacgcggcggaggtgaggtggaggaagaggcggagcgcgacggcgggggaggcggcgttgcggcggaggagggcgaggaggtggttggcggcggtgggggaggtggacatgggaaggtggcggccgcggggcgacggcggcggagagggtttaaaccggcccgggccgactggccggtggggtacacgtctggtcaacggcccagtccactgacactgactggtgggcccggccatgttacattttttatgttacattttttgtgtccgtatttccacttgctgcttagagcagatactacagatttgtagccagctatagcacggactccaagacacaatgtgtgtatgataagtgggactagatgttaatagtgtagtacgtaactattgtatgaattggctattaagttgactatagatgatttatagctagtagttggctatactattaaacttgctcttggtatactccgtacctttttttttctgaaatttgcgcttaattagttcggtgttctgggttcctaaccctgcctcgttttccgaacacacgtttttaaactattaaacggtgtgcttttttaaacaaatctataaaaagttgcttaaaataatcaaattaatatattttttaaaaaaaaatagctaatacttaattaatcacagactattttagttcaagcttactccactccaaacattttgaaacagggtgaatatacaggaataaatttgttatttcacgcggctgtgaaattgtaagttggaaacagcagacgttacagagtatttcacgttacatgaagcagtgcagcacaaaccactgcagatttactcaacatgagatcattgccaggctatagataaagagagaaaaaaaaacataacctaacacacaacgctgactgaggtaaagatcagtaaaatgaaaaagaaaagaaaaaagaagaagcaagaaactaattccagttgtgagaagagatcagaagcaagaaacattctcggttctcatgaccaggttgcaagtcgagtagatggaagcggcagcagcttgcactgcccactcgctctcaggagtctccgagttcttcagtttcctgaaagacatcgtagtagtagtatttcagtaagatatatcacgcataaagtgaaatgacttggaaactactccctccgtcctaaaatataagcatttttagctatgaatctggacagattcatagctaaaaatacttatattttgggacggagggagtaagacatttagttgctatatatttgagtactttgttcaactaagtctcatctaacagaaaagggtggatcgaatcgaatacgttgagaggtgatgatgagctaaccataattcagccattggtcctactaatggagcctcgcaagccatgtatctgagccctttctcacaattcatttgcatttcttgcacttccttcaaccgattctcctgcaacagtaatttagcacggtgtcagtagtggaacactgcttaccagaatggatgtgcaattgcgcatgcacatatgcttttgtcataaaaggcgatattgcgagaatatgctagttttgtgcacctataatgaacactattatgaaaaaaactcaccagatgcatcccctcctcctgaagtgttctgtccatctgaagaaaaagagaccgccatcgtgccacatgcgcttctggaactgtttttccagtagatccaccatcagaagaatgtacaacggatggttcgttctcttggttatatgaaaattctgttgatattaggtagggcagttcagtctgaagggcattcctgactctcttcttgctgcgcttcaaagcttcaagaataaagaaagcatattaagcagaatgtatgggttacagctttgaattatgtttcaaactcaagaattagtaccagcaaggcgccctctgatgtcctgctgtagtagctccaaccactgagaagcaacattggccgctgatcatcaaaaaggcaaggcaactgtcaggtatagataattctacaaacagtgaacaatgcagttctggtgagagtgtatgattgacgaaataagagatcaagtataccttttactgataacacagtcatgtaatcatgattagatgcaaaatcatcggctgatgtactgcaggtcctgtctgaagccatagtgactgctgatgagagttgcagtttcagatcatcaccgtcctctggaaggaattgtgaagcagtaggcaacccttggtgaaacggcatgttgctacctttcatcaagaagtggcaattcatcatattacccccatatctctggtcctgagccttctcactaaattctctccctctttcgcctgtttgactagcatgaactgcctggttctctttctcaagattctcagagtgcaccatagcctttattatggagtaaacttgcttgctgtttctcacatggttaatgattccagggtttagcccagataataggccactcggagcagcaaccttcatgaacttgtttgtctgttccttctgagcaaaagtgttccttttggattcatcgtctcttttccttttgatgggtcgaccgcgcggcctaggacccactgcagttccttgagatgaagaaaggaacccattctgcttcatttctctccacttcctgtgtgactcactctctcctacagccccagttgtgctaccacactctgacggatcactaactttcgtctgccccaacttcttgtaaggaaagaagggattaagttctgcagcattggaagaatctactatattaagatccaatccaagaggtgcaccattcattctgttctctacatgtcttacatcaggcttaggttgcaagtctgtcctgatgttttctttatcacacaaattgttcacctctgctgcatcagaagaacggcccaaggtgaggcaggcagcctctggctgaagaaatgaaccagtctcaagcaatgagggctctccatcttcacttcttgttgcaacttcagcagtaacttgaggtgtatctttcttgtcacatggatgtagacaagattttgctcgatctgacgaatctgaaatccccactctcatatctacatgatatagaataattagtaagcattagcagtgcaaagattaagggaagtaaccagtaacacggtcaattaggataaatcatgccttggacagtgtacagtacataataggaattcagtggtgtgaattgaggctaaggatgtgtacagtacataataggaatcaggaatgcatgggtttatagccgtgtttttaaaaaaaagtgtacaaggccctgtacaaggatgcatacaaggaacgagtgacccaaccttgtaccgcttaagccgcataagttctacaaggtggggtgaccgcacgaaaccacataccgcttttcaaaacattggtttatggcaatagaaaagagtaacactcacgaattattaactttgcatggcacagaaatcaattgtcaacagcagtttcatcctgaatttatcatttgcacattctacacatccaggagtaatcttatgttggtagcggtacagaaatatgctgagtttgttatgtcaattcgctcctcaacagaagcaaacaagaattcttaattacagctacaagaaaggctaatcgaaaattcgatctactcatacgcttagatctgtagagaagcaccataatctaccgtcacatgtcgaaattctgtgctgccagcgaatgaagtactactgcatacaaagagttcaagaacaactaccacccaagaaagtaaaaaactagcatttccagatcacccccgcgccaagaatcatccaaccagcacagatcaggaaccaagacggcaagaaaagaaaatcaagaagcgccgagaaccccccacctcccaatccgaccgccgcccgcgacccgcacgacgcctccgcagccaccgcccgacccaattcctgcaagaacacacaccacaacgtcaaatccaggctccccaaatccaaaaccaagaaccaacgacaccaacatccaagaccaccccccccccaccccaccttcgtggtcgtcgtcggcggcggcggcggggacgacgcgcccgatccggcgggatccgaggccacacgcagccccgcggggtccatccgggaggccgcggcggcgcgcccgcgaagggggagggatcttggagctagggtttgggggggggggagcggggcggagggaagctttgcgtggatttgaaatggagacgggtgcggaggcgtgctgtgtggggtggggtggggtttttatggtgtgcgggttttttttgaattcgagcggaggtgggcgcggtttggatggggatggatggatggataatgagacagatggacggacggatgggtggatggatcgctagcctttaatcgcaggagcggccttgcggttgcggatgataggaggggagcccgcggatttattttcttcttctttttttcccaccttggtggtttgaaggtgattggtttgaattttggttgtatacacagctgtgggtttgaattttgaatggtgggctactgaccttgtgtgacatatggtgaacacgcttcaattctcttgatggagtaacgaggggaggaacatcaaaaggacaaaaggaacacaagccatgctataggctatagaaactagtactagacaagatgataaacattgcttgagaatgttctaacagggcacttgagacgtattttgtgtgtacatgttctttagtgtgcacctccaaagtcacatgccacatatatggttgtatgtctaacataaacgcaaaaagttgcacaagagtgcataccgtctaacaagatcatttgtgggatggaagaagtatatttttataattttgcttatgagcattgctacatatgcaagcctcaacacgagagaattcattatatggccctaggtttatcacatgtctacaatttaccactgacttgtcacgttgtacattatgctatcgacttttgcttaacttttacgatttaccatcgctatctggttagcctctgttagtattatacaatcttatccaaatgaccaaaatacccctaggataaaaactttcaaaatttgaacaaaatttttgaaatatcatattttaagtttttgccaaattttggatgtttacaatatgatattttggaaaaaaatccaaattttggaagtttttgtccttgtggtattttggtcatttagacaaaattgtataacggaggctaaccggacaacgatggtaaatcgtagaagttaagcaaaagtcgatggcatattgtagaatgtaacaaagtcagtggtaaatcgtagacttacgacaaactcaatttttttttgcggggacttacgacaaactcaatggcatatatataatagattctctctctctacaaaactcttataaacaataaccttagctgtttgatttaagtagataaaagctatagacaatctagatgtactcacgagtcacgacgtaagatgtagtgtttgtaagagtttggtatgacacaatttaggccctctttgtttaggcttaggcttattggcctagacttttaagtcagcttattggcttatatgatttataagccggtggatttaatgtcctaagtttagtagttgagtcatacatctacctcacataagccaaaaaagcttctccaacctagcttttggcttaatagtgttagagtggcttatggctttaaaaaggccaaacagaaaagctgcttgtttgtttaggcttagacttttcgacttataagttggtttataagcctaaacaaagagggccttaatatgtatagacttttcctttgcggattgacaaggtattagtccatactctcatatacaccccatattaaaacattataactcaggcaaataggatagagaccactaccaaaagtaaaattttacatcctaaaatatgattctttccgtctcatttgataccaacccttcactgaggatttatttagcaaatgggttataagaggtgagatcgggataggaaataagtgaaggaacaagaaaataaaccaactgactattttgttgtattataactatggctcgttgtatctccactagctccgactcatctagacggtcgttgttggatgaaggtctccatcttacgttatcatgactgaacttaagcattcatcgacttgtatgcagggttttacggtgccaatgcacacttgaggtaacacaaagtgccatgtgtcgatcagattgtaagttatgaataattttttcgtcacaagtgcggcgatatttggtaccaaacaaaatgtatggcatataatagttatagtaatcactttggctaacaaactgcggcaattctaagatttgatgtgacaatctttgctacaatccgaacaagcctaatattttacaaagataatccatcgcatagctagatcacaaggaaaaaaggctatcacgtgaacatgttccaacctagttctggcaacagttagagcacatttggtttttcagttcgcattacgcatcactcttccgcgccattccatccaacatttttatgagatacatgggcctcatggcccaaataggtgttgtgttttttctctttattctcaaacttgcttttctgttttcaaatacatatgtataaatttccatgcaatagttctatgtagaatatttctatgctaaaagtttctatgtgtaggtcctaattggttacacatattctctaataagtcaaaacgacttattagaaaataaaaattaatttataggtaaaattttttatatatgtattctttgcgacttaaagctaatgttaaaaaaactacgttgaaaatatcttaaaatcaaattcaaaattaaatttgaaaatataaattttggctttagctttggcttattaggacaatcaatggggctcgtaaactttctagatcaacatacttttcaaaacgtgggggcctgatttcaaatgaatatatccaaaacgaggaaggaatgcctatttctatctcatcttcattctaagtttatctgacacgaaaaaggaccatagacacatatatagttgactcgcgcaacttcagttcacgcaaacacatgttgagaaggctattgggcgatcagtcgcgcgcatccctccccgtgcgactggacacgtgtcgcgcgtggggagggagcggcggacgcgccgcgcgagagtccgacttttccttttttttttccgtgttttccgtttctgtttgtttggcttttttttttccgtttctgttccgtttggtttttccttgttctttcggtttcccttctgttttttttcggttttttaatgtatgaataccaagttttgtattcgtacatatgcaaagtttatatacacgtatgcaaactttgtatacgtgatgcaatttcttgtttttattttttaatacgtatgtatataaagtttgtatacatcgtatacaaagtttatatatatcctatataaactttgtatacattgtatataaactttgtatatgtgtatatattttttatgcgttaaaaaatattcataaatatatacacacacgtatatacatatgtatatacatatgtatatgtagtatatacacaagtatagtagtagatacagagaagagactagaggggaggcgactgaccccgcgcgcatgggggcgcgtggcttatcgtgtatcattgtatcagcgccccccaacacatgttattaaacccaacccgacacaaaacgcatcgcgacaaaataattatgacatgaacagtactgaatatcaattgtattttataattttctacttactgttaatattaggattttgacaagataaatgtttttattcgttttaataaggcacaaaactgttttgagcacttgtttaatcgcgtttgaactttgacgtgttagttttatgttcccattccattccaccatgcggtccacgccccctcgattctctctgctttccgcgctgctgctgaccgacgacggccgcgcccctgtcccggtctcctcctcgtccctcctccccgcctctccactcttccagaacatcgccaccgccaccgccgccgccgccgccgctcgccggccacgaccgcccccggcccatctacacctccgccggatctcgcagccgcgctccccccattggagggagatccgttccagcgcgtgggtaagcagcagctgccttcaacggttcaacccaacctgcgtgatagataggtggtgggtggtgtgacgcggggggtgttgcaggtgatttggttcgagagcccgcgtcgcacgcaccgatcagtttggggggagggggggggggggggtggtggtgtgtgatttggttggagaggagagtatagccttgggaggggaatcggaattgggatgtggaatccccttggattggatgaggtgatttgatgatttggtaccaggatatactagctcgagcacatgtgctgttggaattggattcccacctattgggtttggttgctgctgggttgagggagagtagcgttaatcattggtccccgtgtagtattcactgcagcggtatcagttattgcccgttgatgctcgttgttgaattcttgaacatttcaaagttttttgatgcatccaattgctaatttctagattctactcaacccaatgctgttaacagagcccgtaaatcagaggaatgttgtaggacatgcaagtggtgcagaagtaacacatactcatttattaacgtatttttctacgaatcacatcaattttgcttaaaagttcgccaaagcactagcagaaagcagccctagtgacagcacatgatcctattaccatagcttttggagtataacttatcaccttccttcccctgattgctaactgaagaggagggtactaatatccatacttcaaaccatcaggacgaaaccaattctgcgcaacttagtaatgtggcttgtacctttcttttgcgcagaaagagaactttcattaatcattaatcaatacccaaaaggagtacattcagctactattgttaatacaagtggcttgtattttatacagagtataaactgctataccctttcagctataaattgttagttattgttaggtttgttggtccttttgcccctgcaggatttaatttcaacacatgactggtgaaatgtttgcttgatgatgtccggacatgatttcagtattgttcataatgcagttggcatctcatgccactcaagcagatgaagcaacagagcttgcttccagctgtgattgtgcagaagtgccagcttcacagcagatagtttctgaatcaagtacagcaggaagctccacagagcatctagtttcatgtgaaatcaagccactgggtgttgatgaagacattgaaactattgatgctaacgaagaaacccaccttgtcattcaagactgtccacaatgccggatttgccttgataatgaaggtccattctgtgacttgaagtatctttcttatggagtgccataaaggctttcgattttttttttgataatattcatatttttatgttgagtctacatttgatctgatattttttccatatccactacaagcaggtgatgacttgattgcaccttgtcattgcaagggcacacagaaatacgtgcatcgatcctgtcttgataactggagatcaacaaaggtggattcatgaacatttgctctttatgcttcatgtacctatatttactgccatcgcagaatccagttaatcattaacctaatccagctctgacctagtttctatgttacatttccaccaggaaggttttgccttttcacattgcactgagtgtcgggctgccttcttacttcgtgcaaatgttcctccagatcgatggtggttgagattgaagtttcaacttctggttgttagagatcacacgttgattttttttattgtacaactggtacgagttccacaccttctgtaatctaattcaacaaactgttttttctttactgaaccaatactgaatacatctcagtaggatttctccaactgtttaccctaaaaaatgaacatgctacaatactgaactcaagcatgacatggttgcaccttattctgttaatgtataaagcagtaatgattttatggatttatattgatatcaccatttctttgaagagatgtggtagttagttcactgacttcttactaatacattgccatgatttctggcgtgagatccaaaagataaacgtttttgaataaatgcacaagaaagaggcctgaaaatggtcacgatgtgctgctgtaagatgcatctttgtttttgtcttacaatcttatccgttttcctgcctgataggttgttgctttattgggtatgctagtatacagattttatggagatgaactacgagaaatgtttggttatgaagagcatccatatgctttttatgcaatggcaagtaagttactttttcatagtgatatctggaaatgtcatgaactgcatcttatctagaaagctcatagagaactgaaaaacttatcgttttcttgtgtagcatctgttcatgttgatccagttcatgacatgtactgtcaacatggcctggcatttatgtctctaaagaaagtcactccattctattacatctttcatttcatacttatagctaccatttaaaaatatggtgtggaaccaaagtacagtgcaatttatgtagaattgcttttatgtattgtgaagatcatcgcgcagtttataatggcagctatagctttgggcctttgagatgaaagataacatatactacacttaatgttgggcgtccatgattatctaagtgctctctatgtaaatggaatcacggaagatgcttttcagagggatttgtttccatggttcttttagaagactgcacgaattgtaacatagtcaaaacaaaagtctatgtggtcagagggaactaaaagcaactggcagattagatgagaacgccgatagcacatatctcctttgttggcatttaactcaatgcatgtgattgcacaggtcttgatgtacatatttttgccctgtgaatgttgtctgtgtacaggaataagaactatatcctctacttctacgttaaaaacttgttgacaaaataattaacgttttaaatgttacttaaattgcagtattggctattgttttggttggtttgctgtatggattcttcatagctataatatgtgggcagaggatcacagaacggcattaccatgttcttgcaaagcaagagttaaccaaggttggttaaagaacataaagatggaaacacaattttcattgactgatcttttcattttcaagaactacactgtgtcattgaaatattaatagtagtgccatcaactgttcaatctgtatatgcacaaaaacatgcagatttcttcatcttttttttttttacttattccaaccattacatgaccttataaggttgtgaacagactctctcatctctatttgcgaaaacaaggttggtttgttttagtgaaattaaataaataagttgtgggtgtattagtaataagggtgaaaagactgcctaatcaatgatttaatggtagaccatgatggccccagcagggaacacaaaatgaggtttcttatgacataatgtagattctttcttagctgacagtttttttatgatgcgaaaagtgttctatttacattcttcccttttccttatggccaggggtgtagccgagattcttccaagcctaggactagagcattgcctttgttatagctttttttgccatgtgggacctgagctctagttgccccacacatggttcccttcctgcctatggcatattatcttcttgtataccacataaagcttgtatttaaagttctattcacacctcacagtatttgatattcctctgatggcaggagtatattgtagaggatcttgaaggaactgatggagttcctgaccttgatcctaatcatgttacagagctgaggattctggggctatattgagtactggagatatcatcaattcatcaggtaggaaatttagcacttgtgctataaaatgtctgtttagatctttttatgtggttgctacttcctcagagatctctctttgcatcctacaaatgtagcagagctcttgattaacaatagccacttaaaatgataaaatgtggcatcaagcatctcacacatccatattttgccccagacatatgtttttggtcattttctacagttttgttttgtactaatgtgcaatgcatgtgatgccaaagtatttctggataatattttatgatcactgaggttttgctactgcgtatggtcagttgaatgccacaaatagttctttcactgtgataagatgaagaaacttgtacagaagagccccgttttttaatcttttttttttaacctaggagtgcttatagctgacttatatactagtgatccaagatgaatcattgtaactcagttagatcttccacattttctgaaaacagttggattcagtccttgagagttgataaaccatgcttgatgtggcttctgatgaacagattcagacacacctcaaaatcttagtttttttttgtttcatgggaacaacacttggctaattcaagttacaatacaaagatttcccaccacaagggacgtaccaacttgatttgaatatgccatgagccatgaagagtgcatacattttgatggagaagctgtagatatatatattcatagcttcaccttcctattgagatccaaaactaaagtaactgcattgcaataaccaaatccatcaattgttgttgtgctggcataaatcaggctaatttctgattaatcttttgtactatttgcaatgctattacttggcttaagaaagagcaaataaaaaatgtgattaaaagacctgatgagatgatgagaaaacgggaaaaaattataggagaagaaaaacaatgtagtcggaagaaaaaaaaaactggaaggagaacaagagtgtgtgaaacatttttgtcaagcagaaatgtttgctgaatggaggaacaattacatggaaggtctgtggatcagctattatctttggagtagtccctagtgccttatctaaggttatgccctctattatgagattgcctcgggaacaagtttttaagctcccataagggtcggctcctctgttcatgaaagacctgctgccctgccctgctaggctgcttgcgggcccagtttcaggatgtcaaggaagttggtgaactgatgataggaaagcaaaagccctgtaaactatggccatagccataacatccaaaggtaggtttatacttttgttcctttagccgaaccttatccatgtccttagtattattttgttactgccttgattttattctatcaagtttctgctgaaaattccaaagacggataaatcttcaatattcataccttgtcactgttccagtaacatgcgggcacccaacttggcccagcaacacctgataatttgcttgccttgttggactagcccagcatatccgctgcagtggtgctagaatgttctagctatgctcaatagagcaaaaccataccaacttgcgttaaccttttggatgaagaacataagcaccattggttagctggtgtgctgtagatatacattgcatgttacaatacacgaaaaacagatttcttggaaaataaatgtccttttcttacctaccgttgggagcaatgtcagagacaatctcttggaattacaaaactactccagcacataaagactttctttgaactcacaaatcaagagcttgtccttgagctatttcagcagcacattttaaaataaaatattttgtttccattgagttcttgtgctctaatttgtaaagctgaaacagtagaggaatcgatcactgatcagtttctattggagcagctataatttctgattggatagcttaggataaaataaataaatagaaggagtttcaggatgaatttgcaagcctgttctcatcagttatcttcccagaaccaaacattctgttcccattgcccgctacttaagcgaagaatatattctcctatgcatataaatttggtagtcttgcaggcatctttctgaaagtagcagaatatatgggtagagactagagagtactgttttttgttatattgacatccactaataaagcatttctctcttagcaaacattctcttggcatttttttttaatcttgattgcgtgttcttgatcttctgtaaattcgttttacttgctttcctttgtcagttttgcctgatacagtaataccatccttcatttttccccctttttcatgctatacattttagttttcttatctgttctcctctgcttttgtttacttcagtgagcaaaactgtcaataaacgaaccatcattctgctgtagtacttgcttcaaaagattgaatttgcatttatatgtggcaacacttgcatcacctatgactagtgtacattaaatttgggcaagtcaaggctgcacttgtctgtaaattttgtcaatgtgggttgccaagttctctatgcatgttagtgtctcttgacaatggcttgaatctgcttcccatttccccacttttcaattttatatcctggctttgtcactaccagcctagactacatgggttgtggagtggagatgatttgccaattgtgagcatgtttttgccgtatcttctccaggtcacctttagcttgtttctttgtttttcagaaacacgacaaatataacaagaacactattgattgaagaaaaagaatgttagtgccatttatcaaccagacaaatgtttgattagccactagtgattactaacggaagtgcttaacaatgaccgcaaacttttggatgattcaagatctaggtatcataagttcacaacatcatatcaggatcatgccttcattgatttatggaggaaatacgccttgggtgaattacctcctctggggaccagggttcaagacaaagactcttcccttctcttggggataaaaaagagctcgatagcttgaattgtcatcatatggccagtgggatcgatttgggagttcaaaaaacaattagaacataagaacaatataacacataaaaaagggacatgcacctgagtcccttatcactcgtaactattttcagctgtgctctgtcatggtcggtgcaatgattgtgtagagaaggccatttattgctcttgagacaccgtgttgatgcatctgaaccaacaattcatgatgacatactgtttctctgttatgcaactcaatatgctatcacccagacaattgtgcaaggttgggtgtagttggtgaagttactgaaaatgtgttgggtgatagaagtggtactttgagaatcagttcatgccatgtatgtttccatcagattcatctctagtagccctaaatgttcttaccatttaaattcttgctgaatcattaacatcaattgcaatgcctaaccgctgtgtttatttcatgtgtgttacactagaaaactgtatcacaacatgtaatcaaaaggaattttgcttttggaaaaatgactgtcaatagcaatattcttagcacattttgttaagttatatggtgaattttacttttctatatgtttttcagctaaatgtcgatgctaaaatggtcatatgggaaaagctctgtttagatacaaatccataaggctgatgctgcacggacatcatccagaacttcagcacaaggcatgacaaacgggcttatctgcgttttggaagacatgtttgtctgaaggcatccaatagagtttagagctatttcccttttttccccatgtaggataaattgctctcacacaaaaaggagaataaggtgagtcccctcagactctgaatcgatgatgaggattatgatagaaatgttaggatgccatttcgaatggacattttattagatattacttgtctcttcatgttcacaataaacatgaatagttataagaaaatgaggtaaatagagacgtatgcaagctttgcttttctgccttcataatttgcaatgcacatgctgggcatgtactggatgacctttttaattgtttctcccgtttctgattttctatggtttgctagtaccttgggacttgggatatgctgctgaaatgaagggcaagcatgtagggcagtactcctgccttgctgcctgcattttcacaaattcataatgtagcaaacacctctaagtggacagccgatcattaaggatccagtggaaccatctcatgtgcaaaagtggacatgattctgatggacacatgaactggattctgaaagttcttggcagcaaccctaacttttagcttgagcattgcacattattttgcccagaaagctcttcattttccttgggtgatcagacaagctcacaagcaacataaatttgactaaacagatggcaccaatccacccatccattattagtttctaatgttaggtcaactacacacttgcagctacaactgctgaacacaactttgacatacagttgcttaactttgttcctctttgatattgacagagatgatgttttctctaacatgaacacgtgcacagcaattaaaaatatcgccttctcgttttgcacaccaccttaagcaactttctcagctttgatcctgagtaattaagctaattaatgcaagtatgcaactatacaagattcaagcttttgttggaagttgaagacccactcactaatggtgggagtctaaagttaaactgcagcagcaagagcccagaagcaagcaaccatatgtacttaatctggcaagaatcactgcaatttgttctccatggcaatgcattgatgaccaactagttgctgaatgctactctgatggtgatgtatcatgattatgctgggtgacagttacagatggagacttcagcttctctatgccaaagtgtcccattggaactgtatctccttgattaattaggtggaggaactgagacttgatttgggtattagttaataaatgctcatcatccggggtttctgttgcataattaagacttaaccaccttgcaattacatatatatgatagtattattaaatgacaagcaactaaaccaataaaatgaaggtcaagattgatggctacatagggtgcttcagtctttgctcaactgggagtaggatcctaggttcacagtgtggtgaagctgtctcttttctagtcgtgcgatcataaactgaaggtcaagattgatcgctacagtaattcatcctgtcagatacttgtaacgagaaaacaatgacaacattttccctaaaaaaaagaaatcgatgacaagctctttctctctctctctctctccccctgagaaaacaatgcatagtaaaaaaacttccagtccaatatggacaacagatagaattgcagagcattattgcaaataatgtaatcatttaacaaatatatccatggatatgccatgaaatctgtaccataagaaaacaatgcatagtaaaaattccaatccaatatggacaacagataaaattgcagagcattattgcaaataatgtaatcatttaacaaatatatccatggatatggcatgaaatctgtaccataccgtatgttcttgaaatatatatcttgtttatgcggcaagaaacagaaacctgattggtttatggatcggatcaagatttttgcaccaagccaagaaggaatgtgatgctacatcaaaccttgatatctctctgtgcctccacaggatgacagtagctctgcactcctgaatttggaatggaaaacctcatgtcaaagaatttctggagagataattatgatatcatgttatatcatatcatataatctagtagcacccttttgaccaatgtgcctcttcagccacagcatcgagttgctcaaggtttctctcaacttgagatcaagaaaattgctttcaagcactattgtttaacagtgggattcaatttctctgacaatgacatgcaattccaatttgcttaataatatgaaaaaaaaagacagagatgtccaatggaatcagaggagaggtccatctgcagagctagtgttcatacttcatacgcttggatggatcaaccagccatttgaagcagtgattcagttaagctctcctcaccctaaaaaagagagaacagattaatggagaactccactaatatcatggtagagaagaactttaccatctagataattttgtgattcttaacttagatgagctagacaaggaatcctttgcttccttcttgtaatatttctaaaactgcaaaagggattgctaaaaggtcaggagcagaaagtctgtcaagtaaagtttaaaaaagtgcactcgatcatgcagtctgatggttttaatcctttcagagcaaggcaaatgcagctttaccacacaacactgcactaactgcaatgtcaaattgagccctaattggtgcatagctggtgcctctaagctagttggtctgtatgaactggccagtcaacatccataggtgcctggaagcttcagactctcagaaagttagtacaattgtgctaaattgaactgaattatacgcaaccatgcagtgggatttcccctctatccaggatttttatctttgtacaatttctgcaattcctgcacccaatcagtggccacaatctcattggctggcctccaaatggatgtgaagagcagtcactctccctgcctgctcttcagagtaagttgctactacaaccttcaccttccatgaatgcacattgcaaatctgcaagaacttcttatggcattgcaacagcctgcttttgaggccttggttctcccttgaactccacagacccctatccttcgcctcacacggtgatcatgacgggttctttcgtcgtgcatcccgccaataataccgcctttttgccttccattttgctcacatagcgtgtcaaaaacatatactaatgtgaaagtaaaagagtaacagctaacgatgtgtataagaagagagtagtatggctactttacagagcagtatgtatgcaagttcagttacatgtagcaaacaaaagcaaagaggcagtgtgcatgtgtgagagtattgttttggttttatttttatccttttccatttgcagaaaaggtgctccaaaaataaaaataaagcaggccgaccacgcatatttccctgtggccgatggctacctgcaacatggaaatgcaagggaagcagacaaatttattcagattctgccaattgtctatgcaattctttggtagaataagatggtcctggtttcgaatttttaatccttgcgctttatgctcttcagggaagtctttgaaacgcgtcgaatttcagaatccggtgcaagtactcatgaggatcgatgatgttgcgcgattcatatcgggctcaagaacatgttcctgacctgtttctgtttcaaatgcctatcaaaatgctactttgaatcagcttgaatcaacccaatgctgacccttattaacaataaacttttaacagtttttatttctgtttcaaaataaaggatttacatttcatcatgcaaacttcaccaaaatattgaatcctctaattaacaatgactgaatctaatctggggcttgcactgttcaagtactgatggagcaatgtgactgaacatgaacacagcagcctttgtctccaacacctccatatgagtgctaagcataaggcatcaccggccacatgggattaagaaacacacaagcaggttagtgcatgcataaaccccatttgcagcaggtcataatcagtattcaattgtgcacaagtacaattctgctgaggtgattaaaaagtgggcagagccttggtttctgcaagaaggaatcaaaaagattgttatttaattccagtaagccatatctcagcgtgatagatcatgtttgcagtgcccactatgctttggtaagatctgaaatttcatccactattaagatattcttatcttcgataagtaatagttttagccacatttagtgtgctttgaataatatcattcttctctttattccctggagaattattgttaagggagacctttattccatttcttgttcggccaattaatcaaattgtatatttaaaagtgtttattctggtgtaacctttgcatctccagataagatatttctgtgtcatgtctatgtacaataatcattttgtattaaaaaaactgttggctgatttacaagctgaaaatcagtcagctcagctaagaaaaacttaaattccctagcatcctagccttgtcaagtttctgaagagagatagttcttatctcaaccaccacggcatactactcaacttcactagtctcatgtataatgcatgaaccaacctttggacccaagtgacactatgatccaaaagattctgttttttttttgtgctcttctattttccatcctctgtgacatctacatctttaaaagttaacaataattgctaaatgcaaatcagaatcacttcaaagggttaatatataatggataaatatctgactaaattatttctctcttctccacaagcacacacaaacaaacacaaaacataaagaacttttttgacacaccaagtcatgctaaagtactattaagtaatgcagtgactctagtgcaattgagtacctgaagaactttcaagataccaacaggagaaccaaggtctatagttcttttctgtaggaagcattttttactatactactatatctacaagaaccagagttttccttctgcaatcaacacctacttactttatatatatatatatatatatatatatatatatatatatatatatatatatatatatgtatatatatataaatatatacatatgtacatatcatgtagccggatcaaaacagaaatgtagttgtgtaatattcacttgaccaaagagaacaaatcttggcaacatatgtcatttaatacaagtgaaatcccaatcaattcaaaccaataatactcatatatttcaggatgtcactagacttgttagtccttgtactcacattcagagaacatcagctaaggtccccatcggttggtctagtcttattataagccataacggtttattagcgattaaaaaaatgatatgtgagtaaaacttttgtatatatattcttagtgattgaaaagccaaagttaaaaaaaaactatgttgaaaaaggatcaaattcaaattcaaaatcaagttttaaaattcaaattttggctttagcttataagccatagggcaaacgatgaggcccaaagctacatttctgcaggctctgaaacaatcaaaaccatcaagctcaactctcatctggatcgccggcgatggccgaccggagcaatggcggccggagacggagaaggagaatattcttggttggttcttggtgatatttgtttccctcttatgtatgcaatgcaatatgtgggtggtggagaggaaaggtggtggctgaggtgaggtgagaccaccttcttggcccttgattccctcccttttgcagcatgtcctctgcaatctccactggggtgagagctggctctactccatcaatgtagcaacctcccaggcaatgagtcaagcattgcagctagccaggtccattgcaccaattgcatctgcagatactgcactccactgcactgcagctgcagtggtccattccattccatttcactgcattcagtatgatgtagtgtaccctaagtatgtatagtgagactgtgtgtacatgaaccagttttttttctttagacaaagtaagtttttatttaacttagccaattacatcgaggaaatacaattgtactgagctaagcacggtctggtctctacataactaggatgcacacggtcaaaactcacgctcgcacccttacatgagctagttagcatggtgcattatgtgtatatatattttacaattgtcaatcacaagttgggagtggttggtgatctgttactccagttatacccactggaagatcagattcatgtgtggcagcagaatcaccaggaagcatgtggtttggtgggtaccaagatacatcatgtgagctggagccagatgaaaaaaaatgaatgaatgagggggtgtttagatggggctaaaactttttagcccatgtcacatcggatgtttggacgctaatttggagtattaaacctagactagtaaaaaaactaatttcataaatgagagctaatccgcgagacgaatttgaagtatttaagcctaattaatccataattatcaaaagtttactgtagcatcacattgttaaaatcatggcgtaattagactcaaaagattcgtctcgcgaatcagtccaaggttatggaatgagttttgtaattagtgtatgtttaatactctaaattagtgtccaaacatccgatgtgacaggacttggaataagtctctagaaagcagacaggcccgaatgaattgagctgaactgatgaaaaaaatctgtgtgctgctactgctgcctgtgaatgaatgagaggagctgagctacaagagttgtctgtcactgctaggctgctgctactgttggtgctgctgccattagttttcagagatgtgcaacagtgctggttggtacatgacaactagaaagtagtcttctagtacactcaaattcccaagaaaccaacagaaaaaagatgtagtagtggtagagaataggggggagaaaacaaagagggtaatttggagaatctctttctctctgcacaataaccatcagtactgtactgaacaaattctgagaaaaaaaaaaagaagagcaagcaagaaagaaaagaatactaagccagttaatacatttattcctgccataaaaagactggctgttgtcactcttattattcccactacctgtggaatattaacaagaatttcctgcagattgattgatttaatttactaccccaacatgtccatgagcatcacaaaaatgtagtactagttgcaacaatctgaggctagtagtaaagcaccaatataacattgcatctcaacacagtttagtaattcttaaaaaatataagaattactaaactgattaattcaaaagcaaacatacataccatgagtccatgagacagcagagagagagagagagagagtaatagtagtagtaattatatattgcacttccttgatttgttttgacagagaaacagaaagcttactgcctcattaatccttacatagttggagtacatgatgatgatgatgcatgcagaaggcttaacttaaccatcacttgatttaccaattacacaagataattaggccattaattagccctagcagctagcttagcttcgttaggtgcagtgcttagttgcttacccccagtggcaagtactgtaattttcttcatcttcttcttggtctctgccatggcagcttcagcttcagtgtttgagctagcaaagctggaacagctcgggggaggatctgaagaggtcgtcgaaggcggcggagtcgaaggcgaggagcgggtcggtggcggcggcgacggtgagggcggcggcggcggcggcggcggcgccgttggtgttgatgcaggagaggatgtctttgagggaggcgaggcgcgcggcgagctcggcggcctgggtgcggaggacggcgttctcg

SEQ ID NO: 8346 - DNA, 8988 bp, Oryza sativa
actagctgatctgttgttaaaagaaagtagagtgaatttcagaaaactacatatactttggttaaattatcacaaaactatagatttaaagcgttgtatcataaaactacaaattttatgtcaaaattatcactaactatagatttaagatggagtgtaaaaaataacttcaatattaaatctacagttttgttatacttagtcttaaatctgtagttgtatgataaatttactactaaatatgtagttttgtgatacggtatcttgaattagtagttttgcgatagtatggtcaatgaagtttttaaaattctactaaaaaaagtattgttttgtaaatacaactatatctttaaaagtttatttgtctatattttctctctctaattaaattccggcagtgctcctgccgttggtttcctaacaataataaataaataaaagttattcatggttaaagttgagacattgatgatcagaaatgacaagtaaatgaggacgacgggggtaatttagcacgaccgtatattgtcgattggatgcccatgctgttaggtagaggtaggcatcagcgaaacaatttatgaaggcaagaacgcggccatcaggccgactgtgacgcaggccaaggcacacagacacgggctcagtttggatgtaatcatgtaattaatcagtccgatttggaccttacaccaaaccagccttaacttaatcacgtcgatgactaataaagttttgtgttttttttggtaatgctgccaatttggacttgatatataaaagcaaattatatatataaatcctggctgattgattatatatatctatgttacccattcctttttaaatatataacgttattatcttttagacagatcatttaaattcttttgggacatatcatttatttattttgttatgacttatttattactacatcctattataagtcacattgattttcttttctaattgaacttttttaagtttgatcaagtttatagaaaaatttagcaacatttataataccaaattagtttcattagatatagcattaaatatattttgataatatgcttgttttgtgttatagatgttattatttttttataaacttgattaaacttaaaaaaactcaaaacttaaaaaatatgtcgacgcctgtggtgacttcgtcaatctcaagatatactaccctagtcattcagaggtgctcatagaggtagggtgtgcgtgtgtgcattcataggggtgagtgtgcgcgtgttgtagacgcctgcatttgtactgtgtttctaaaataaagcttaaaattgctttactatgaaaaaatgtcaaaatgacttataatatggaacggagtattataactactttaaacataacttatatcatttatatatgtataatttgttttagtaatataaatggttcaaatgtcatgtcatggaagccaacaacgctatacatagtactatatattataacggagaaaataattcataacgttgctatttaactaacaaccgatctggacaatataatgtgccacctgaacagttctgatcatacagacaacaaattttgtagccatgtgctctatcttttttctcaaagaaaaaagatagcaccaatctgaactgaaaaattgtatgttctatccaatgacagcaagataaatcaattgatctatgtgccattaaccgttttaaaattttccagagctatagattccgacataaagctgatgagaattaatctaaaacaaactccatccatctcacgaaaaacaaactaaaactgaaagtggtatatcctagtacaatgaatctagacgacggaaggagtagaccacaccttttctaggctcgaacaacttaattatttctagaatctaatctatactgtacgaggagctagagattactagggctatgatttattttacaaaaggtatatcattatagatttgttgctggaaatggattcataatattattgttgtcttataattacaattttatttatttttttttgaaaaacataccggtcaaattcatacctcgaagaccacaaaactaaaatcacaagcattaagtgaaaaagaacaagaacgaaataaagtagctagatagataagtataagataaatgtgtaggtaggtggattgaagataccttgagtatacatggagtgatgtcactagagatatacacctatataaatgttgttaatttatatgcatttatttataccactaagaacttactacaacaacaaaagggtctgatttgatatgatttaatttggtcatttcttgtccctacctagtgtatatggaattgtatcgtagattagaatcccttctgattttagcatgattccaacatttaaagatatataaactagcttttactaattaagtactactactaactaatggtgtgcaaatcagtagattaacgccgtgtttagttccagaataattctttaaacttttaactttttcatcacatcaaaacttttttatacacacaaacttttaactttttttatcacatcgttctaattttaactaaacttttaattttagtgtgaactaaacacaccctaattaacacaacacagccacacaggctacttgacccactagaccatagaccattttctgatttgcctatatcatccactgaccttctcttcttcctctctgccttcgcaaagttgacaccactcatgcatgaacacgtcgctgtctacacgacgtaattagcacgcagctgcgatctccgaaacagggagctcgccgcgcgcgacgccgacgaggtcaatgaagccgccgcccaccgccgccgctacctcggattccgacggcggcggcggcggcggcggtggcctgatccggccgtcgcggatatgctacatggccatcctctccgccgtcttctggttcttggtcttctccctcctctccggcatgccgggcggcggcgacctgtcgtccgtgctgttcaggccgtcgtcgctgtcgctcccgctcctgaacagcttcacgttcgaccagaacccttcgccggagcagcagccgccgccggcgccggcgccggcggaggatcgctgcgccgggaggtacatctacatgtacgacatgccggcgaggttcaacgaggagctcctccgcgactgccgcgcgctccggccgtggacggcggaggggatgtgccggtacgtggcgaacggcgggatgggcgagccgatgggcggcgatggcggcggcatattctccgagcgcggctggttcgacaccgaccagttcgtgctcgacatcatcttccatgggaggatgaagcggtacggctgcctgaccggcgaccccgccgccgccgccgcggtgttcgtcccgttctacggcagctgcgacctcgggaggcacatcttccaccggaacgcgtcggtgaaggacgcgctctccgaggacctcgtcgggtggctcacgcggcggtcggagtggcgcgccatgggcggccgcgaccacttcttcgtcgccggccgcaccacctgggacttccggcgagaacgcgacgagggctgggagtgggggagcaagctgctcaactaccccgccgtccagaacatgacggcgatcctcgtcgaggcgagcccgtggagccggaacaacctcgccgtcccatacccgacctacttccacccggagaccgccgccgacgtcgccgcgtggcagcgccgcgtgcgcgcggcggcgcggccgtggctcttctccttcgccggcgggccgcgcaagggcaacggcaccatccgcgccgacatcatccggcagtgcggcgcgtcgagccgctgcaacctcttccactgccacggcgcggcggcgagcgggtgcaacgcccccggcgccgtcatgcgcgtgttcgagagctcccgcttctgcctcgagccacggggggacaccatgacgcggcgctcgacgttcgacgccatcctcgccggctgcatcccggtgttcttccaccccgggtcggcctacacccagtacacgctgcacctcccgccggaacgcggcgggtggtcggtgctcatcccccacgccgacgtgaccggccggaacgtgagcatcgaggagacgctggcggcgatctcgccggagaaggtgaggagcatgcgggaggaggtgatccggctcatcccgacggtggtgtacgccgacacgaggtcgagccgcgtcgacttcagggacgcgttcgacgtcgccgtcgacgccgtcgtcggccgggtggcgaggcggcggcgcgacgagcccgacgcccggaggtgacaagatccaccgggtgattttgtatgctttgattcgatttgattgggccattggattctccatgaatctggggcaaagtgcagtttttttttaccttttgtaattttagttttatatatacttttattgcctcgatatattggcatgtaagatcttgattgattatgtatgaaacaaagcagaattcctcaaagctgggctagctgaaagattggcctgtcaaattaagaaacggggggatttttttttttggagaattaattttcttgtggatttctctaaatctcacgcttgtgaaatttctccgaaatcctttgttccaaacaactgggggattttttgtgcttgcagaatttctcaaaaatcctctgttccaaacagcgcagagcatccagggtgaactgagattcgaataggatgaacattcgaaatgtgttcggcctgcatgaatctccaatgattttggtagcatcaatgtataaacggcattattggctttaatccttgcaataaaaaagtgcaaatgcagtgacgaacaaatatatgcttgcttcgatctggtagaagtttagaacgacaacaagttgccctgacaactcgtgatggaaatgtatatattttcctttttggagaggagcaaataaattatttttgagagaacgaggaaattagaaaatcaattagctgagtaccctaacaagatagatcgcctggttagcttttttttttttctacttacaagttgaatgtccgggcattgaccccgataaaagaaaccacactacacaatcatatatcgccaattacaatatttatctttaaatatatgaaagattgtactcacctgtgaatgtgtccctgaatcacagcaaatatatggtggaaataattacaacgtaggtgaatgacaaattagaaaacaaattggtggcgaagtgagcgtagctgtagacccccgattttggaaatcggaaatcatctgtgtttatccgtaccaatccctggatcagtagttggtacacacatacatagttgaatcacaacatatcacgaatgaattcaggctaaaagagttaaatacttacattagggctagataggccaacaactatcagagaacaacaatggaagacaaaataatataagggtccagttgacatgccacaggcagtcgactagggaacgagacctagaacaggaccgcactccgatcatcttgttggatacgcaagcgtaccgacaaaggcttctcttcaacactctcctaaaagatatataaatagcaagggtgagtaccaaccgtactcagcaagccaccacaacaacaatgcatatgatagagggtatttcaaggaatggcttcaggttcttttgcataaagctaattttacaattcttttcacaagtctaaaacctagcatagactgatcaaattttagtaccagtgttcactttaaacaacgacggttctgtccaccatccattgtgatcccaaggatagcttcccgccattgaatcgtcatggttttctgaggatgtccaccttccctcctctcgggaagtggctccatcagcataaaattcatcatgcaatatctcatcccccacaagttaagaatttagagtctagccaagtgtaatacatgtccctgtgctcaataaccgcgagcacggctattcgaatagacttggtttactcacactgcagtggatgtacactttacccgcactccgcgactgcccaacacatgagcctcgtcccaacacatgagacgcgtcacggcaaagcttttcgataaccttgcattggcagtacccgctccatgaactttacatcctcatgcactctaggcgtacaaggtttctagcagtgagaggagttctggcgtacccgggaagggaagactcacacatgcattaagttataattatgtttagattctcacatggcagtcctaccaatggcgacaccactgtagacacccgcctcgcggtcctatcaatggctgccccaccgtagagcccctgcctcacacatcaagaaaccactatgcatggatactgcctccgcttagctatctactccgctaggtctatacccatacgagaagtgcggttgtacggaggtcatttcatgcttaacttcatgactcggtccttaattgaccggggacggtactagccttttccggataccacccaaatcctccgtccgccccagtcgaaaacagttgtttaattttatttctcttttcacaaatcatgtcatcaacatcatggcaatgtggcgctcatgtctccacataccgcatctcaattaccttcccaaaggtaattgcccaagcatatagcatttgataaatatgagtatgcatgattctagagtagcatctctaagcatttgtcatagttgactggggactcatacgtaatcatggttacaagggaataagggtaaacaacaataatcaaggtatggcatattcaaaaataggatgttcatcattgcatgcattcttatttgtaaataaaaataatttcgcaattgggatcaacatgttcaagggatagtgatgacttgcctgctcagaattgtccttattctttatacaatcttgatcaaccttcacctcctggaagttgcagacgttgcctcacgactaactgatacacaaggtctattatatgcgagaaaaaccaatattcaaacaacaatcaaatatgcacaacaaaatatactattcggtttgctaatggatcccaatcatgctaaggctaaagtttcttaatctttctattgtcatcgtggcctatttaggagttaaccaacatagcatttatgggatacatatatatttggctaatcggtggtttagtctatcaaatggctatggaaggattatggctatgtatgcatctatctaaataggactgttatatactagaggttctgttgttagatggatttaggatcaatcaaataataaataattacagtgaatcatttgtattattattttattgatggaagctttgaacatattttacttgtcaaaataaattataaaaggttaataattatccatgctttgtatgttagagttgtttaggttaatcatattatggttacagattatcccatcacataattttacaatgaataatcctaagttacagttgaactataattataattatatgaggtcaagatttataactagcatttatctaatatacatgtttgtcatatactccctctaatttaatatatgcaacacgcaaattaatactataccgtacaactataatgggatgtatagtatatgtgtaagcaacaatatcttattattggatcatatatttgagtagttgctttttactgtaagctatacaatacatgtcgattttaagatggctctgtttggttaactaatggatatcaaccgactatatatatatattctacttcacatgacattgtatcgactaatttttaagtggtccaaatacagctagctctgtgattactctcctaaacaagttaaagattcacctatgtgtgtttatattttagttacaaaagatgaggctaaactttatgtaaataatttataagtcatggatttagttatatttggacatagactagtaaatggcactaatattttcctatacacccattaatttgaaggattgattataactaatttatttggttgctatagtgacaagacatattaaagataattatgctactgtacaatatccatttttatttattggcacactatttaggttaactattatctaatcatttgatattaattaatttataattataaatatattatattaaatagtgaattatatatcattggaaagcttatgaatttagatgaatttaggttcaagtttcactcaaatccgagctaaaacgaataagttacgctagtttaaagattcaaatttgaattaattctaataattgcgaaatggtactgttcctaattcatttatttttaatacaaccttatccacaagctatagtgactgacatgtggggtcttcctattttccttttcttttattttatttttctttctaaaagaatccatatgggtaaatgacaggtggacccggctcctttgactagggtcaaaccggccattaaacccggtagggcccgcatgtcatagactcgagaccataaaacttctataattagatttttaaccacccggacccacatgtaatagacacaactaataaagattaagaaagggattactattcaccaattaggtggggcccactctaatctctcctctcctttttctctctttctctccctcccggcttcttctcccttcctctcttcttttctctctctccctcccggctgcgacggcggtggacgcaagggggaaaaggcggcggcttaccgacagcggcggtcggcggcgacgacggcgacggcggcgcaagcctcggcgcggcacatggcgtggtgcagcggcaccgagggcggcggcgcggcggcacaatggcagcggcgctgcggcacgaaggcggcggcgcggcggtacgagaacgacggcgcggtggtgagggtagaggggaggaggagggagtggagtggggagaatgggggaagg

SEQ ID NO: 8347 - DNA, 10181 bp, Oryza sativa
tatggtaacatcagaaagataagcaagaatgaagaaaaaaaaatagttgcactcaattaagtaagaacaagagtctaatttgaaggtccataagtgtattgattcttaaagcactagtgtagactttaagagtaaattgctaactccaacatgacctagctcgttccgctgagcaagtcagcttctagatatttggttataggttcaatttttccactgcacttttacaatcctttatattgccatcacttgtacatacgtagatcatagatttgacatgtgagtgacacaagggacggtatacagggctttgggaattttgtggtggcgtgtcagaatcttaccattttaagaaatgcattgctaattgactcaatctgtgatgtacctcatcaaaagcatgtagatatttagcatattattttgcgttagtcaatccaagaatattttacatgtgtgcaggaaagccatgatccattgtgaatgcaatcaatgtcagtaacgagaatgagtgattgtaagcttgaagagaaaagcatacttaagaggagcggaaagggaaagaaagtcaaccaaatgaaggattggtattgaagtaatctactagaaaaaactaactcaaggggggtagaggaagtacaaccaaacaatgtcagaatgcgcaacaacagcacggatgaagaggaaagaatacatgcaactcaagcggggcatgaagcgtgcaagaactgatggaaatgaagaaaaaggaagagctgatccaacttacatcagcaatatggagttgaaaaatacccttagctggaacatgacctggccaaaatgcatgtgccgactttgccaaggacccaacggaatttacaaaaacatcaagaatgtagtggaaccaaaatactgcaatattcaactaatgcaactcaaggaaccatcagttataaacagtgcaataatatacagccaactgaagaaagcaaggcgggcaaaagaattagcaaaaatagcaagaatgaagaggaaagaacagaacacactcaagaggagcagaaaaggaactagaaccaataaaaatgtaataacgaaagagatcatttccagtgatagtaagatatggaactttggggggccaacatgcatgtgccaacactgccatgcgcttatgtggcatgcagaaagatcactacattcaacagtcaaacagccatcctttggactctgctgcaagcaagggaaggtagcattgccaccgttaaaagaacagcccccttaccttacgagtttattgacaagagatggaggaagatcaacaaactaccaacagaacattagatcatacaattcgatgtttgcatttacatcaatgggaggaaccgttgacagaaaaataaacaacgggcatggaccttatattttccgactgaatggccagaatcaccatcacataggaactctgctaccagaaggtagcaacaagcctcgcttccaacaattgtacgtatatgacacagagaatgagatcgaaaataggattgaagcatcaaaatctggtgcaagtaatgccccattagaccaaaaaactattgccagcctactaaaaatgcttgatgagaacaacacactagcccagacattccgaatggcaagagatagatttaaagaagatgactatcacaattacactctgagattacttgataatagggatcaagatggaaggcaagacaatatgccatcagcatcagaagttgctctcttgatagtcaaagatccgaccaaaaaaagctatggacgcgacattgttcttgagtacaaagatatgagacctaaaaggatatcagaaacccatccaaaattaatggccatgcaatacccactgctcttcccttatggagaagatggttatagacctggaataaaatacagcggaaaggaaggtgtaagaaatgacaagaaatgtgtcactatgcttgaatattatgcgtatcgcctccaacagcgccaagaccaatcaatgttgccactgatgtgtggaaacctctcaatgcaatacatggtcgatgctcatgcgtgcatagaacagattaggctcaactggatcaggcaaaatcaaggagttctaagaacagaactttatggtgggctacaagatgcactcagaagaggagacacaagaacagagcaagtagggaggaggatagtacttccagcaagtttcacaggaggtcctagaaataaagagcaaaactaccaagatgcgatggcaatatgtcgttgggctggacatcctgacttgtttgtaacattcacatgcaacccaaagtggccagagatccagtgcatgctagataaagttggataccagaaaccatcagaacgccctgatattttagttcgagtgttcatgataaaactgaaggaattaatgtcagatattaaaaggaatcaacattttggaaagactaaagcaagtaagtgacgagacaaaaaaagcactcatccgtacaatttttttaatgaaaagtaattgctaacacatatattgaataaatattgcagttgtcttcacaatagaatttcagaagaggggactcccacatgcccatatcctaatcttccttgataaaagaggaaagagcctagagccctcacaaattgatgaactgatatgcgctgagattcctgacagagacaaggatcctgaaacatttgaagctgtcaagaatttcatgatgcatggaccatgtggagaagcaaacccaaagtcaccgtgcatggtagaccataaatgcaatagattcttcccaagaggattttctgatgagacaatcattgatgaagtcaacttcccaatatataggagacgagatgatgggagacagataaaaaagggacgagttaatctgaacaatggattcgttgttccatacaacaaagatctcctagcgaaattccaagtacacatgaatgtcgagtggttcaaccggtctaggtcaatcaaatacctatttaagagcatatgcaatgaagatgaccaagcaacagcagttgttgaagaaactgacgaaaagaataatgatgagattaaaaggtacctgggatgcaaatacacaacagcaactgaagcttgttggcgaatattcaaatttcctctacactaccaagagccacctgttgagaggctatcattccacgaggagaatgagcaacatgtgatttttcctgactcaacagacctacaggaaatcgtaagacgaccaagatcaggggtcactatgtttactgagtggatggaaacgaacaaaaggcatgaagatgccagagaattaacatattcagaatttcctacaaaatggacgtgggataagaatgtgaagaaatgggtaaggcgaaaaggagggatgaaaattggcaggatctacaatgcccatccagcaagtggagaaaggtattatctcagagttatcctcaacacggcaaagggttgcacaacatttgaagatatcaggactgtaaatggaaccgtgcactcatcatacaaatcagcatgccatgcactaggatttctaaacgatgatagcgaatggattgagtgcatcaaggaagcatcatgctgggcatctgggatgaaattacgacaattatttgcaactgttttatgccattgcgaggttactgacccaaagaggttgtgggaatccagctgggagaaactctccaaagatatacagcacacacaaagttgggcattgaactttcccacctcctgcctcacgccttcacacagaaggaaatgtgctttaatagaaattgagaagaacatgcgacaagctggaaaatcactaaaggaatacgctggaatagaaccgccaaatatggcaaagttaagtgaaattgagaacagtttataattgaagagatgaactatgacaaagagaagttgaagcacgagcacctgcaaatactaaacactctgaacatagagcagaaaaaggcatttgatgcaataatagaatcagcacatcaatcactaggcaagctaatatttgtggatggttatggtgggacaggcaagacatacctttggaaagcaatcacaacaaggttaagatcagagggaaagatagtgcttgcagttgcgtctagtggcgttgcggcacttctacttcaaggaggtagaacagcacattcagcattcaatatcccgatcaacctaacagatgaatatacatgcttcatcaaacaaggctcgcacatagctgatctattaatgaagacatcactaatactgtgggatgaagctccaatggcaaacagaaactgtttcgaggcactagacaagagcctaagggacgtgcagaggtgtagaaatgagaatagttgtcaaaagccctttggtggcatgacagttgttctaggaggggacttcaggcagatcctccctattgtgccaaaaggaagaagggaacacactgtaaatgcaacgatcaaatgctcatacctctggcaacatttcgaggtgttcaatttgacaaaaaatatgcgactcaattatgtgtccaaagatcaaacagagcatcagaagtctgcagaattcgctgagtggatactacaaatcggcaatggtgacacgatttcgttagatgaaaaaggttgggtgaggatgcctagtgacctgctgttacaaaagggagatgacccgaaagctcaaatcattgagagtacctatcctgacctacaagacaattgctgcaagcagaattatctagaagaaagagcaatattgtgtccagtgaatgagaatgtcaatgagcttaatgagtatattatggaccagatccaaggtgacaaggtaacctaccttagccgtgacagtgtgagcaaatcagtgtcttacagccatgagatggaaatgttatatcctacggagtttctaaacagcttgaatcactccggaattccaaaccaccaactgaagctcaaagtcggtttgccagtgatgcttcttcgtaacatcaaccaaagtgcagggctatgcaacggcactagaatgacaattacgcgactaggcaataaggttattgaggcacagattataactggaacacacagcggcgatatggtatgtatcccacaaatcatcatgtcaccaaccgaaccgaaatggccgttcatgctaaacagaaagcaatttcccctctcggtgtgttttgccatgacgatcaacaagagtcaggggcaaactctaaacaaggtcggcctctatttacctaggcaagttttcacccacgggcagctctatgtggcagtctccagagtcacaagcagagatggcctgaagatcttgatcgccgacgaagaatgcccgggtgaaggaatggtgaaaaacatagtgtacaaagagatcctccagtaatttcctagtgtttgcagttaatttatgcagtgttcttccccgaactgaagctgtaataaaattggccgcgctgttgttccggccactagctagttttcctaaagcattgctgctatgcaagtaatgctgagactatcaatcgatgtacttgctttctataagcaatcaattatgttctgttatatctaattgaatttgcatttcaatctctgcactcaaattggctgggggttagtatcacttatcactgcgtttctgcaccaaatcgaggttgcatcccaggtcccatagctaatccagtggcaggcatagcgcaacacaaactgttcgaatcggaagaacaagcagagaacgggggtggtggttcatcttaccagcgcattggacccggtccgcccggtgccgccgcccgccgcgcgccgcgcgccgcgttcgcccggagcggacggaggcggccccgacgaagaagccagcattcgcgctcgacttgggccacggcggcgagttgccgccggcatgggccgacgctgatggaggaggacggcggaccagccgttcattttgctggaagccgccgccgccgccgccgccgccgccgtcgccggagtgccgggcgacgaggcgggtgagcaaccacgtgtatgggccaaatgatgggcctaactttcgagcattcagagcatttcgtatgggctcaaaatccggcccatatacgggtatggacctaaatttcggcctattcacagcctgcttgaatgtccaaaaatcccagcccatcttggagacatacataggttcgtccgctgttttttttttttggttacagacaaagaatgcaaaatccagcttcacttttgcgaatttctcggaggtacctccaaatagggccggttgctatcacgtatcaaacattgagtattaacagactgaaacatattttcttttatcggaacatgatcatgcgatatcttgttgtgaagattaaattacaacaaacacaacggtgttatcggatcgcagattagataagtagtttaggagaaaattcattttgaaggctgctaaatccatgcatgcatgcatggataaagaggagatagtaggggcaaaaaaaattcgtccgtcaaatgttacagttgaccactagtgaaacattaagttatacacagtgaaaaaaatcagtcactgcaacatttaaatatttttttgaaacaaagtgaaaacacacgttgaaacatgttgctatcacgtatgaaacattaagtattaacagactgaaacatatttttttcatcagaacataatcatgcgagatcttattatgaagaattaatataacaaataccacggtgttatcgaatcttagattagataagtaatttaggagaaaattcattttgaaggttgttaaatccatccatgcatggatggatagaggagagagaaagttggggcaagtagtgaatgcacactttaaaacatattgctctatttaggaaacattaagttttaacagtctaaaccatatatttttcttttattaaaatataatcatttaatatctcattgtatagatttaattgtaacaaattcaatggtacgatcggatcgtaaatcgaataagtagtttagaagaaaatatttgaagtgttgagaaaaaaagaaaaagaaactagttagtactcatcttgcatgcatgcagtagcaaggagcccgattgtttctcttcaaatcgggctaccgagcaagaggattcttggaagatatacatggagtaacgagcagcagcgccctacactggagaagcttgatagagttctggtcaaaacttgagggcttcatggatgttgtaaaagaaagctggcaacaagaagtggatgccaccgacccttacttaattctgcatgtgaagctcgctaggctatgtaagaaactatcatcctggggtcagaaaagaatcagcaaatacaggcttcagctgcagatcgccaatgaaattatcctaagatttgatgttgcccaagagtcacggttactatctgatgacgaacgacatcttcgtgcagcctgcaaaggacgatgtctggctttggcgtcgttagaaagaattcggctgaggcaaagggctaagattaggaatttgagggaaggtgatgctggcacggctttcttccacatgaagataaaatcaaggcgaaggaaattactgatcccacggttggaacatgagggcagaatagcttcaacacaacatgacatgcaaaacctagacagagaatactttgaatcagtgatgagtgcggaggacagtgctacaagaaggctgctgtttgaacaaattgggctggctgctgctgatttgactgagcttgatgttcctttcactgaagaggaaatctgggcagccatccgctgcttaccgaacgaaaaatcacccggcccagacggttatacaggattgttctatcaaaagtgttgggacatcatcaaacccgagctcctcaacgcactggcaaagttttgcaccggcaatagtcagaatctagaaaaattgaacacggcaatagtcacgctcattcccaagaaggaatcgccaactctactcaaagactacaggccgattagcttggtgcatagtttctctaagctggctgcgaagattatggcacagcgactagcgacgaagctggatgttctaattccttattctcaaaccgcctccatcaaagggcgctgcattcatgagaactttgtttatgtcaaggggctcgttcagcaattccataggcaaaagaaggcaatggtactgttgaagcttgacatttccaaagcatttgacactgtatcgtggggttttctgctgtctatgatggagttcaggggatttggcccaaattggagaccgtggatctcggctattttcctcactgaacaaacaagcatcttgataaatggggcactcaccgacccaatcaagccagcaaggggaccgaggcagggagaatcgagcgaaactagctggtttgctgtcaccactaaatgcaagaaggcatttgcctcccatctcagtgtacgctgatgatgccgttctgttcttcaagccaacggctgctgaagcaagcgcgatcaagggactgttgacgttgttcggcgaggcaacaggcctcaaaacaaatttctgcaagagtgcgatcaccccgattcagtgcagtgatcaacaacgggcaatggttgagtccattctctcctgcagagtagaagatttccccatcacctacttgggcctcccgctaggaacaagacagccaacaaaagccgaagttcagccgatccttgacaaattagctaagaaagttgccgactggaaacctaagatgctctcgatcgatggcaggctatgcttgatcaagtcagtgctcatggctcttcccgtccacttcatgtcggtgctgcaattgccgagatgggcagtcaaggacatagagcgcaaatgacgcggtttcctttggaaggggcaagaggaggtgagcggcgggcattgtctagtctcatggcggaaggtgtgctctccagtggcgaaaggcggtctcggagtgaaggacctgaacttctttggtcaggctttaagattaaaatggctggcgaaatcgctggagcaaagggagagaccctggacgatggcatctttcaggcctggttgtgatgtggaggccatatttcgctcggtgacagagtacatcataggcaatggtgaagacaccgatttctggacagcaaactggactgggaagggatgctttgcatggcggtggccgatcctgcactcttatgcaggccgtgtcaggctttcggttgccaaagctctcaccaacaatcgctgggtccgcacactgcagggggcgctgtccaacgaggcgatgggcgagttcttccagctttgggacgaaattcatgatgtgttgttgctcccctcgacggatgaaatcaggtggaaactggcgaacgatgggcaattttctgtggcgtcggcctacgacatgttcttcatggctacggaaaattgtgcattcggcgagctgctgtggcactccagagctccctcgcgagtccgcttcttcatgtggcttgcgctaaaggaccgttgcctgcggacaacctcgccaagcgaaactggccacatgatgatctgtgctcactttgtcagcgagatgatgagaactgccaccacctgttcgttgcgtgtgattacacggcggcggtgtggcgttctatcaagcgatggtgcaatgcaagctttccaataccggcagatggggacgctgccctcgctgattggtggctggcaactagatgccgttttcagaagagctacagagcagattttgactgtgctttcatgctaatatgttggctgatttggaaggagcgtaatgcacgtatatttcagcacgtgtccaagctactggatcagctcgcggaggacatcaaggatgaaattgccatttggagggtggcggggattttctcccaatttcgcgagtaatccccatggatgtttgcggggtttagcctcgcctttgcttttcattcttggctggctagggaccttccttggccgccacgacattgtaatgtcgttgtaaacttttactatgtttttcctcccaatcttaatgaaattggtcggctaacctttggctgacccggcaaaagaaatcgtatgtataataaggtaattaataagacaaaggggcaggaagtaaagtgcatc

SEQ ID NO: 8348 - DNA, 17715 bp, Oryza sativa
taaggagcaatgtaaactattgtcctagaataattgcatttgtaggaaattagagacagattagcagcatacacaaataaccacaataaccctatgtaatgaccacactggacatgcacacattccatacataaacttaattaaaaggatatcttccatctaattaatttgttagatgctatctcactagaaatacaatatttccgggacaaaatttgaatggtaaaaatgcaattattctaggacagaggtagtaatgttttccacgtatctatttccttaagaacaaactcaaaccgtaaatattagatcagttgaaatctttccataaattctgagaatgttcttttagagaaaagaccggacctttctatagaaagcatagttgagatacacagttttggggctggggataccagcaaactagaactgacctattacaggtttccaacactccattataccctgaatcaagaacaccagcagcaagggtagtcctcaaccatggtaagcaaggaaacagtgagatcaccatctaataaacagcagccaaaacctccagcccaaaattcaatgctcagaatgttatctctgaacactactgaaaggaaatacctctagctgttccaagtcgtttcctgtatatggagttgcagtccctgaactcttgacactacatgatgggaaaaaaaagggagtaagagtagggttaaattcatggtagaaacagtatatatatacatatatatgttgcagcagaagggtaaaagagaagtataatgcctttacctgctagactgctactaagcttcttcctccagatcaaactgcacacagtgttgccgttttcttgactgacaaatgcgagaactctggattgattttggatttttcaccgcagtggatgcacaccttcgccaagccacggtgaaggcagtggacggtgcagggagcacaaggcagaaggatgccaagtaatggaggctggagcagcagcactgcagcggaggtacgtgcccattttacagcagcattgcaaaatcttccctctgaacgtggcgccctctctcctacaaagtggccaatacaagtagcgtctaaaccttcacaaagatatgtacacgctctatagtatgcacacctccttggattctctccatcctgtgcctgtgagattcccaccgcttgagctgtgcatcaggacaagtcttgtctgaccttttgctctgcctctagtgattcccccctaggatgtaagatgtgtttgaggtagtctatatatattttttctcttgtttctgttgggggtacctttttcgctgtgttgtttttttcttgatagatatcagtaaaagctgtattatagtggtatatagataaacttcaagggaataaatcttaatgttggtaaactcatgtctttgaaatattttctgcagtcaggattttaagataaagagtttcgttttccaaatgagtacatttatctttgaatgagattcagcttttgtgatgaataagaactaaactgcaacgtagaaatggtatcaaatgcaagaacatctttaaacagtttaactaatgcacatggtcttagtcagagatctttgttgtaaattcaatcaagtggttccagacatgtctttggtctattatgctgtgtgactgtgtcctaaagagactgcatgatgttagattcctagtaaaaacttaagcagttgagtacgttgaagatgggcatgacgcatggtcaaagttggatcctcaatatcaaagttcctctatcatgttcgtttccattacttattttcgttttattcttgctactctttatgactatattcagcctaccgtactgcattatatgatcttctattagaaatgttagggcattaatcatatatgcgcacatggctgtcactgtcagactgtgtttaagaaccgagttatttgtatggtagcatagcgttggagatttggagtttctactcaaatctgggattcacttggaacaagcgaaatcctgaaatttatctgaccataattttagtttaagtatgtgacttaacatattcctggagttattatagcagtgcaaaagctgagaatatggttctcaaatttttaaaaaggggcatcttatacatttgcatataattttttaataagacgatcttatacatttgcacaatacctttttttcctcccttttctctctcccccatctctcttctttgtttgccgtttgtgtaaattttattcctcttaatacaaagctgcgcaatccttttgcgtattcccaaaaaaagtttttttaataagacgaatggtcaaatatgtgttcaaaagtcaacggcgtcatctattaaaaaacagagggaatacttgcactgttgcacatctgttgaatggttgagcagagcttccaatattttgcatcacaacatagctgtagtctgcaggtgcttggctatatgctggaagaaagctgaaaaatcttgagttgttacttttgggcacccttccatcttctggtaataccatggctgcaactagaaactatgggattggatcaccattgcactgtcttgagctgcaaaatctttactagttgttacctttgggcataagaatggtgcgggatgctgctatccattgtccagcaacaccattgtaccgttcctcatcgaggtaattacattcttatgcatttgcattgtttgctcttcttccacgaatggttttcaacttaaggctacaagtttttgtctctttgtcgcgtgatatggttgaataaaaatgatgtggagataaagttttctttgcaggtcgtcctcaagggaacatattggacagatcaatggtcgctgctgctatttatggaagatggcgttgatatgtattgcgggctgttagaagcgagagtaaagggagtttttttttttttttggctaagtgtggttggaactttagaaacagggattgaagcttagtcttcctcttatgttttgttcggaaccttgtgtgtaatgtttcaactcgttatgaggtgttcgagctaagtactcgtgtattatcctttggatgtgtgcacccacggtgagtgtagactgtagaggcaagatcttatcgatccattatctaaaaagtataggaagagaagcttactggtaagtttagagtagaaaccaaacactggaacacagaaattttgggtttttctacagcctttctgggttcttcctgcaccgtgaaaaggttcttgagcaacttttttgtgcataaatatgttgcaacatatatgatcgttcatgtcctccaaaggccaatgtgcaaatgttatctcgaacttggttaaataaatttagggacaatcgcatccatgcctccactttcaacctcaactactgttttaatatcactttttagggtttgcaatttacccccaatttttaaaaacgaaccaaccgtttgcccttagttttaacgcccgttagatgggtcccacatttttaggttaagaaaaacaaatggaaatgaaaaatgatttatgaaatatcaatttaccgttctacctttgagggaatggataagcatccaaccagctctcctctcccaccggattggtccttgcgcggaggcgacagttctggctccagcggaagggcacgcgcggaggcggcggctgcgggtgtgaacgagcgggcgaggcggcggccgcgagcgcgtgcagaggcggtggcggcggccgcgggcgaggcggaggcggcggcggcggccgcgtcgagggctggtgggggagagcatagcgctgcgggtgcgctcctacggctgcatccgagtgttcctcgccctgtccctgctgctgctcgctgtcgagtttgccgcctacctccaggggtggcacctcgaggaggtggcgttgctcctcgccgtcgacggcctcttcgccgcctcctatgtcgggtggatgcgcctccgcctcaactacctcgcgccgccgctgcagttcctcactaacgcatgcgtctttctcttcatggtccagagcatcgaccatgaagggtagtatttgtgatttttgttcaagttttgtaatttcttagtatttgtgaattgtttttgttaaagtaaaaaaatcacaagagatgctcatatttggtcgatgctcatcacacaagctgaaatcacaaaataggggcaaaatcacacaaagctgaaaaaaataggggcaaaaatgcaataaccaccaagggtataaatgtcaatttttctacaactagcaccgttaaactggctattagaagtgggggtacgcggctgattcagattcaaaaggtggggtaaaactgcaaaccctaaaaaataggggtaaaacaacaattggcttcgaaagtgggggcacagatgcaattgccccataaatttttttatggaaatcggaattggagttcccaaattcggacacccaaacctcgagctagagaaaaaaaaatccatcccttgccaagacgagaaatttgtttgaaagcattgcaattaggaggggactaccgatcgggcatgcgatctagacgtacaaaaatcgggcgctgatgttagcatgatgtcagcgccacccatgcgtgcaaaaccactttaaactaattttttttcttaaattatttatccaaatcatgatccgattgcaccattaaattcgttgcaactaaatcttcaaaacaagaccacacatggatatattccgacgaattttttttagcttgttattgaaatatttttaaatgttgcacaatgttccaccaagtatatcggaattgtttcactaagtagatcgaaaatgtttcaatcgtttaaattgggcgttgtttcaccttatataaaaacaatatttcagcaaatagcgaaagaatgttttaattcactgcaacattagatctatacatagtgaaacattctgagtacactaggtgaaacatttttagtggaacaaaaaataaaacgaattcccttaatagaaggtttccaaaatatatgggtgatttgttgcaaaagaatatttcgttcactgcaacattagatctatgcatagtgaaatattgtgagcatagtgaaacattgtgagtacactgggtgaaacatttttggcggaacaaaaaataaaacgaattctcttaatagagggttttcaaaatatgtgaatgattcgttgcaaaaaaaatgtttcaattcactgcaacattagatctatacatagtgaaacatgtttggtagggacacgtggcaggtggaagcatgacaaatggtggggcccagagggcatgcgcgtcgccaaggaggggggggagcgcccgattttgctcccccgcgctggtcacccgaggcgaaggataatcatgcaaattaaatggcatattatcaaatctctacaagtgaaaagtgaaacttgatatgattctagaataagccacgtcactcagtcaataatagccgttggatctagctgaaatcattatgaaccgttggatgaaggatgaataatgggaattaaggttcctgtaaataagggactatagtgtgttcacgtgacttcttcggttggaaatatcacctgcgttttttagtctcccaccagttttacacatgcacccctataaagatcttttattttagggtcctctaaataaataatatttttacaggtaatttgctccggtccttttacgataaagatacatagtagtatttacctagaaagccattgaaatttcgtattttcaaatttcaaaagtaactactgatgcaagtcagtagcgagagttgccacttgccagccaggtggtgagattgatatacgtcaatacgtgaagtgctgggattatttactgaatatatagacagtaaactcgatataatgacatgcacatagtatcttttttttaaaataaatttgctttgacataagaatataatctttgtgatacattttacaagtttgacataatcatgactaattattgttattataataatattgcttatttcaccaggtcaaaaaaattgcttatttcatattaataaatggaacatttaaaaattaacaatgatggaggtgatgggcgtgaaaacatggtaaattattaaatgtggtcgtactattgttaactacgaatcaagataaatttgttaatgctattgctaaacctacaactcatccatgacaagtatattctaccatgctcctccttggaataagtcacgaaatcccaccgtgctactccttgaaataagtctattttgtgtcccttatctctttggttcgtgccatgccgggctggcccatcatgccgaggcagaggcctaggcatgacccaaaggtcggccatgaacccgacaccattcgggccgtgctgtgtctggaccgggccaaaaacccgtggcatggcccgggccatgccccgggctgtttggccatctatatggtcacgcgaaccgtataaactagtagtttggaataagttcatctgaggtctctttaattgtcaacgaatatgattttcgtccttcaatcggaaaccagatataacgggtctctcaactattaaaactggtgcaacataggtcctatggcagtttgtacgacggttttagctgacgtggcacttacgtagctaatttgactcggtcttaatctgacatggtattgacatggcaatttgatttggaaaataataaaaattatgactccacatgtcaattacacaaaaaaataattaaaaatggtggctcaccctcctcttcttcctcatttctcccctctcctctctccacgtgccatggggaggcagcggcgcgcggcgccctataggagacgggagaggagcggtgcgcggcgaggcgtgaggggagggaggaggcatggaggccagcaaaggccgggggtcgtgggtgggggctcgacggcgacgggcagagggagaggtgcgtagcgggtgacggacaacagagagaagggagaagggtggttaccggcaagggtgacggccggtgagagaggctcacggtggttggaaggtagaggctcacggtggccccttcctcttcctctcgtcgctgcagccgcacaacgccgtcagaccatctcgatctgcggcacatccggagttgaggaggaggatgatgacgacgctgcagtgtcccgtcccaacctcgcgcatatcttggacccgtcaccgccgcccccttcccatgctcttgtcatcttgtcctaacctcaggcagcgacaacactagggacaggagttgaggcgcgcgggtagggcgcatcgttgtccgcctctagaggcggcgtcccattggatccttggtggcagagcccgccggccgatcgtccttctcaccgctctcccccttttctacaagacgccaaggtggccgaccagcgtagcaccgtccctcatgacggccatggtcatctccatctttcacgcccgtctttgccttcctggtcggccgccacccttctccccctctgtgtgcgcttgcctgccggcgaggccgcgagggagctcgaggagaaaggatggccgggagggagagaggagaaggaagcgctgtcgtgccgtcgttcgtggatagagaggaggatgggacccactgacatgtgggtcccactatttttttcttttgtctaactaacatgtgggcctcatatttttgttttagttttaaatttttatattttgctttcagtgccacatcaccgccatgtaggacgaggaccaagtcaaaccagaaacccagatgccacgtcagctaaaaccaccatctaaaccgctgaaagatctcgtttgtaccggttttaatagttgagtgatccgctgtacgtggttttctggttgaaggatgaaaatcagattcgttgacaagttaagggacctcaagtgaacttattccaactagtttctcgtgaaatttctctgccacgtcccgcacgagcaacggccaccccatcgaggtcagcttccgcgccgcccgcccgccggccctctccgacttcgccgtccactgccccgccctgcggctgcaagagccagccgactacccctccatggtgcccaaggccatcgccgtcgacggcgacctcttcctcttccgcatcccgatcgaccgcgtcggcaccatgtccctcactcacaacgactacttcgtctacgcggcgcggcctccccctcgccgcccgaccctagatctcctccccaacccgtcccacgacaccctgggagacagggagatcgccctactcagctgcagcggcggcgatggcggcggcgacggcgagccgtgttacgtggtggctgcgctcaggaccatccccggcagcacaaccatccacaggctgcatctctaccgctccaggccgggcggcgagcaagggagatggacctcgcggatggtgtccgtggacgaaccgccgccattgatgagggacgtggtgttccccatcccggagacgtcgcaccggcaagtgcaccacgtgacgagcaaggcgatcaggctgggatcgggcggagacggcacggtagggtgggtggacatctggcgcggcatcctcctctgcgacgtgctccacgagagccccaagctccgcgacgtgccgctgccgccgccggcgaaggggaacagccacagggccttccaaaaacaccaccgaccagtactgcgccgacatcgccgtcagccgagacaggaggttcatcaggtacgtccagatggagatcgtcacgcccaggatcatcgcgagcggcacgccaccgggcgaccgtgatcctgacccgttcctcgaatggctgcgacgtcgagaatccaacatgcatgtatgcacgtacgtgaaagattagagtaactttcctattatgtattgaatagactttgtttcgtactgataaaatttcttttttttgataaatctacaccctttaatttatattcattgtaatctaacggtgtagcttttttctctttttctccgattaatgtgggaatttctagcctccacagcgaacgtggtgccttcgttcaaagctattttaataatataatagatgattatattttgggatggagggagagaggaggggtaaaatggacctttcgcatggtccgatggcaagagtggcaaaaatggttccaatatcctgcaagcgtaaggcctcgtcgtagcgtaatactttccctttcccctacctcgtaaccgggaaactgttttaatccctcgaggggatatctcctcgttctttacatgttacttaaatggttataaaaagattaaaaaaatgggaagatgtattaacatgtgatataacactccacaaacatgtaagttcaaattcatcttgtacatctcgtaacgaaaaaaacaaattgaacagcagctagttaatgtatattcagagtcaaatttgtttttttcattgcgagatgtagaagttgaatttttacttgcatgtttgtggagtaatatatcacatattaatacatcttcttaaatttttttaatttttttcataaccatttgagtgacacgcaaacaacgagggatatcccctcgagggatcaaaatcctcttcccttcgtaaccctatcaaaccgaagatcccagatccaatcctcaccaagatcgatcaagctcctcttctgattggatcctcgattgatcggttgccatggccgccgtcgcctcctcggccgaggtccacgagggcacccggagctgcgtcctgctcaacgtccgcggctacagggcggcccgccgcgacgccaccaccgccacgtcctacacgagcaacggccatcccatcgaggtcagcttccgcgccgccctcccgccggtcctctccgacttctacgtctactgccccgccctgcagctgcaagaaccagccgattatccctccatggtgcccaaggccatcgccgtcgacggcgacctcttcctcttccgtatcccgatcgaccgcgtcggcaccatgtccctcacccacaacgactacttcgtctacatggcgcggtctccccctcaccgcccgagactggatctgctcccgaacccgtcgcacgataccctgggagacaaggagatcgccatactgagctgtgccgatggcggcgagcagtacgtggtgaccgccctcaggaccatccccggcagtaaaaccatccacaggctgcatctgtaccgctccaaaccgaacggcgagcaagggagatggacttcgcagatggtgtctgtggagggaccactgatgagggacttggtgtgccccatccctgagacggtgcacaggcaagtgcaccacgtgacgagcaaggtgatcaggctgggaacaggtgcaaatggcatggtagggtgggtggatatctggcgcggcatcctcctctgcgacgtgctccaggagagccccaagctccatgacatgccgctgcctctgccggccaagagcaacagccacagggccttcctcaacaccaccgaccagtactgcggcgacgtcgccgtcagccgagacaagagcttcatcaagtacgtcgagatggagatcgtcacgcccaagatcgtgagcgccacgccaccaggtgactgtgatcctgacccgttcctcgaatggctgcgccgtcgagaatgcaaggacctgaaacgcaccttggtccatggccgctggaaggccaccacatggaggatgccgatcccggtcacctcatgggacgattggtgccgcgactgcgctgttgaatctgccgagctcagcactgacaacccaaaggcttatgagttgctgtgtgctgtgagcaaagaaagtcttaaagaggatgatgatgataaggccatggaggcggcaacgacaaccacgacgaggttgccattgggacgcctgggcatggcttaccctgccatgagcatcgatgacgatgtcatttacgtgctgacaaaacccgtcatggggaatggcaaggcggcatttctgactgctgttgatgtgaggaggaagaaggtgctggcagtggccaagcttgatagcgccgttttcatgcgttactaccttgccgttgggatctccaaacattttttcagcgctccaggtacttcgcacctactgctccctgttgccatttatgttttctgataatgattgaaatttgcttgtgtgttgtggtgctaattaacctgtagttacagcaaggtagtatatgcatcattaccagcaatgctgacttaatttaggaggatattgcattcagtgcagcgactgacattagaggacagcaaaactgttgtagaaatttaagtatttcatttttttttgcctagttatattgtccaattgtctaatagccacacatagaggtctcatttttgttaggtacttttgctattcaaaagtatattagtgactaggtccagcatcactggaggtcaaatgtttgtacataggattcacagtaaatgggaaactaatctaatccctcgaggggatgtttgtaccgaaaatctgcttcacagtaaatctgcttctatgtttgtaccgaaaccacatgacagaatgagaaagatcagtatgctgaaagttcaggtctctgatcagcataacaggaggtcatctcctataatggaagacaaattttaaggatgccacatttttcaccataatattcttctcatcacataactcgtacaagatgggatataagatgctatgtggactatttgtcagtcacttgtatatcttccaaaaaatgtgtggcaccaccagacatagagatcagatcgcaaattgtgtacacatttcacattacgaactacatagctttgcatatactccatccgtttctaaatatttgacaccattgactttttagcacatgtttgaccgctcgtcttattcaaaaacttttgtgaaatatgtaaaactatatgtatacatataagtatatttaacaatgaatcgaatgataggaaaaaaaattaataattacttaaattttttgaataaaacgagcgatcaacatatttaaaaaagtcaacggcatcaaatatttagaaatggagggagtatatatttggccgtcgatcaacaacttttgccataagcctagttcatcttccaatctgctttttttttttgaaacctatcttccaatctgcattgccatttacataactaggtaatgataattttcctgggatatttgaccccattacctcttttctttttaaagatttagggcctgatccatatgacagttcttgcttttggatggtctgacgaatgaccattcgatgaacatagcaacctggtaaccttgattcaggacggtaaacttaatgttggtgcggtgcaatggtagagtactaccaagagtctgcactgtgtctgaagataaatcttagactacttgccatagatggaaaatgaaacttaatctgttccaaaagtaaaaatgaaacttgaactttgttagaatgcactgttgcagtctgtgcagtggattcttgtaggaacaaccaaactgttgtttttttaagggaaaatggcaggattactgcccattcattaagcaggaaatgtttttccttaaaaaacagtttgataatgacctgttcttagacaaatgcagctccatgtaagtattaaaatgccttcggtggtggccaaaagttaatttcttgttgtctcaatgccacttccattctcctgtgattaatatatctaaaattttgaccaaggtataacatcgtttgcattcgtcataaatattaatatcagtaaacatgttgtcaaatcttatttctgcctcgttatgcttctaattatattatattgttattatgcggttaatttaaccataaaaaagtaataatcaaattgcattagatattaatatcagtaaacatgttgtcaaatcttatttctgcctcgttatgcttctaattatactatattgttatcatgcggttaatttaactataaaaaagtaataatcaaattgcattaggaccaagttaatttcaaaacaagaagggaatgaagcaagtaataagatattgaccaaaccaatttcgaaacaagtagttattatactgctgtattgctttggattttgtctgtcttattgtacttgccgacgacaacatgaatgctcttacccttgatcccagataatgccgtaattgttgcttctaggactttctttaaaagaaaaaaaatatgagctattttatttggtgtaggtacaagagaatcacttggacaagctgaagatcatgggcagaagtcagcaagaagaagaagaagaagacgtggaaagcggcaagagtgatgctgtccagcagtgagatgccaatggtagaatattatcggcttgagtctgttgctttcatatggataatggatttgctactgctatgtgcagttctgtaacaaattctagaaccttatcatctgggtactttttttgttctttttcccttcttgcaagcttcttggagaaaacctctacaatagcttggctataaatttcagttaactatggctccctctaaggttccatattttgtcctacggtttatgagtcctttccaaaattggaattttagaacttttttaattaaagtttatttataaacattagtttttaaatcgctaaggatacattataaaagttctactcgtagtgttttttctaataagccgtacaacttataatcagcattaggtcatagtgttttttcatgatggtgtatatgatcatgctccctataaaaggagttgtttaagttgtcacaaatattggaatgcaaacatttcagtatgaagatgcatgcagcaccgagtgacacaaggcatgcacacaacagggattacaacagtacaacttagtgttaattattatagttctaatgaaactggtacgtacttcagaattaaatgggtgtatgtatcttctgaattgaattggcctgatgcgttggttttgtcctatgaattgagactgaagattcgactctggtttttcgttgaaatggaatggaatgggttcatgattctagttggaaatatatagtgtgagttgagaaattcgaacagttaagcgaatcaaactggaatgaaaaacttatatcagtgtcagtgcaagtaaacggcatggttccattcctctaagccgagatttttgcacaacgaaacaaacttttgaatgggccggaagctaggcccatataagtaaacaagccggaatttaggcccataactcggcccatacacatggatgggccatcgtggtgcatccaaaactcgattttttattaaaatatttataaaaagtaattttcattttgatctgcagatcattcagaataaaaattactttttataaatattttaataaaaaattctccaaaacttgccgttgagaagcgaggagggctgctaggttgctccgccgccgcgttctccggcgaggagtcaccgcctccgtcgccgtcgacccaccggaccgacgggattgaggtggccgtcgccgccagcgctgcggcgcagattgccgcgccggaagcgcgaacgatgggcttcgtcgacggggcctcctccatccactccggtgaacacggcatgcagcggcggcggcggcggcaccgggtggactggctccaacgcgccggtacgatgaaccaccaccctgtactgtgtttgttgatttgttcttctcattcgacctgttgcgctatgcgtgcgtgtgcccttggatagttcatagttggatacctggatgcggcctcgatttggtgtagagctgcagtgataggtgataaccctaaccaatttgagataagagatttcaatgccaattcaattagagagatgagaacacaatatgttaattaggccgcaagtccattgattgatagtctcagtatcatgctttaggaaacagtaggaaaattgcataaattaactgcaaaacagtaagaaaaatacaacatcagtaggtaaaactagctagtggccggaacaacagcacggccaattttattacaacctcagtacggggaagaacactgcatagagtaaccgcaagtagtaggaattactggaagatctctttgtacactatgtttttcaccattccttcgcctgggcattctttgtcagcgatcatgatcttcaggccatctctgcttgtgactctggagactgcgacatagagctgcccatgagtaaaaacttgcctaggcaaatagaggccgaccttgtttaaggtttgcccctgactcttgtttattgtcatggcaaaacacaccgagagaggaaattgctttctgtttagcacaaatggccattttcgttcgtttggtgacatgatgatttgtgggatacataccatatcacctatgtgtgttccggttataatctctgcctcaataacccttttcccgaatcgcgtaattctcattctagtaccattacatagccctgcattttgattgatgttacgaagaagcattactggtagaccaactttgagcttaagttggtggtttggaattccggggtgctttaagctgtttaggaactctgtaggatacaacatttccatctcatggctgtaagacattgatttgctcacactgtcatggctaaggtaggttaccttgtcaccttggatttggtccataatgtactcattgagctcattgacatcatcattcgttggacacaatatcgctctctcttctaggtacttcggcttgcagcaattgtattgtaggccagggtaggtactatcgacgatttgagcttttggatcatctcccttttgtagcagcaggtcactaggcatactcacccaacccttttcatctaataaaattgtgtcaccgttgccgattcgtagtatccactcagcgaattccgcagtcttctgatgttctgcttgatctttggatacagaattgagccgcatattttttgtcaaattgaacacctcgaaatgttgccagaggtacgagaatttgattgatgcatttacagtgtgctcccttcttccttttggcacaatggggaggatctgccggaagtcccctcctagaacaactgtcatgccaccaaagggcttttggtaactattctcatttctaaacctctgtacgtcccttaggctcttgtcaagtgcctcgaaacagtttctgtttgccattggagcttcatcccacagtattagtgatgtcttcattaatagatcagctatacgcgagccttgtttgatgaagcatgtagattcatctgttaggttgattggaatattgaatgctgagtgtgctgttctacctccttgaagcagaagtgcagcaatgccacttgatgcaactgcaattactatctttccctctgatcttaaccttgttgtgattgctttccaaaggtatgtcttgcctgtcccaccatagccatccacaaatattagcttgcctagtgattggtgtgccgattctattattgcatcaaatgcctttttctgctctatgtttagagtgtttagtatttgcaggtgctgatgcttcaacctctctttgtcatagttcatctcttcatttataagactgttctcaatttcacttaactttgccacatttgggggctctattccagtgtattccttaagtgattttcctgcttgtcgcatgttcttctcaatttctattaaagcacatttccttttatgtgaaggcgtgaggcaggaggcaggaaagttcaagagccaactttgtgtatgctgaatgtctttggagagttcctcccagatggattcccacaaactctttgggtcagtaacctcacagtggcataaaatagttgcgaacagttgttgtaattctatcccagatgcccaacaggatgcttccttaatgcactcaatccactcgttgtcatcatttagaaatcctagtgcatggcatgctgatttgtatgatgagtgcacgaatccattgacagttctgatatcttcaaatgttgtgcaaccctttgcagtgttgaggataactctgagatagtacctttctccacttgccggatgggcattgtagattctgccaattttctttcttccttttcgccttacccatttcttcactttgttaacccacgtccattttgtaggaaattctgaatatgttaattctctggcatcttcatgctttttgtttgtttccatccactcagtaaacatagtgacccctgatcttgggtgtcttatgatttcctgtaggtctgttgagtctggaaaaatcacttgttgctcattctccacgtggaagaatagcctctgaacagatggttcttggtagtgtagaggaaatgtgaatattcgccaacacgcttcagttgctgtcatgtaactacatcccagataccttttaatctcatcgttatcttttgcggtatcagtttcttcaacaactgctgttgcttggtcatctccattgtagatgctcttaaataggtatctgattgacttagaccggttaaaccactcgacatttatatgtgcttggaacttcactaggagatctttgttgtatggaacaacaaatccattgttcaaattgattcgtcccttttttatctgccttccatctctcgtgtcttgtatattggg

SEQ ID NO: 8349 - DNA, 20053 bp, Oryza sativa
  unsure (1)..(20053): unsure at all n locations
ttgcttttcattcttggctggctagggaccttccttggccgccacgacattgtaatgtcgttgtaaacttttactatgtttttcctcccaatcttaatgaaattggtcggctaacctttggctgacccggcaaaagaaatcgtatgtataataaggtaattaataagacaaaggggcaggaagtaaagtgcatcttctggcatcataatttgctaatcatgtgaagattccagttgcaaactgatacagcttatcttgtgaacccaaaaaatgtctttttccatttccttcactacttctatacactgataatcctaacatacaggatgtatactacgcaaaagaaaaaggtaacctttacaaaagtataaaatgtgtaacagcaatgacttgagtaagctaacaacaagtcatttgacttcaccttgatctaccgtctctgtttagcgtctcccaactaatatcctggccacattctttgcaactcgtgctgcatccaggcttggtgccttggcttctcagagtaagcaagtggctcaggttgttacacttcttttggttgtttgaagtgatcttaggctgctggggttgccggcttcttgaagtagctttaggtggttgtataaggctgctctctgttggaacagtacttggttttctctcggcgtcatgtgtagctttcctcggggcaacttctagcaacttgttgtagcttaaccatgccatatcttgctcctccttggtaagcctttcttcttcattttcttgcagaagggtttcatgttcatggtaacttgcgatccacctgtaaatcccaaaaacaaagattaatgtttggcaaaggcgagcatggggggaaataagcactacgagtttgacaagttttgagttatatgatttttatagtttatacgctataagatttatagaatgacatcctgttaggttgagtagcaaaaaatataagcattaccgggagtggtcatgaagtaggttcaccatgagcctgtccaaaggtaaatgttcagtggtttcactggagttgggagtaggtggcttctcagtcccaactttactgtgaccattcatggtagaaccgctctgctccagtagttcctcatcaccaaactcgaaaagatgcaacatctcttctttagagattgttctagacacttgctgtctatccaccacccttgctgcaagcccttcttttgtcacctatattaataatactaattaatgaattaagtcaataacacaactagagttttaaacaagaaaaggcaactgccaaattacctgccgtttatatattttctcttccattgttgcatgagccattaggcggtaagcatacacaggcttggtctggccatacctggaaagaacatacggtgagtaaacaaataatcacatgattgttcaacttactagtaaaaatcaagcaacaagttcttgcctccaaacccgatagatggcttgcaaatcatgggttggattccatgaaccatcaagaagaatcacacggtttgctgaatgaaggttaatgcctagagatccagcacgagtagatatcaatgtgcatttcactctaatgttttcagggtcattaaacctctccacaagattttgtcgctcagaagatggagtgctcccatcaatcctattcaacatgacagaaaacaagatcacatttgcagaataagataagcttcttttaaatataaatatcgccgttgccaaattaaatgctggtaacagcactatctttgcagaagaaaatatcagcaattcttccctgtcaaagccttgtgatgcaaaaggcaatgttcatttttccattttgtgttgaggcagtaactataaacagcacatttgcagaactacatgctggcacagacaatcacttgtgcataactaaatatcaataatgcttgtatatcaaagcctttggtgatgaagtatcacctttgcataactgaggttatacacttatactggcaggtttagcactggtgcactagtgcgtgcttcagagtaaattattaagtctagatacacctatggtttatttgctataattactgtacatccatatttaaatatataacgtcctgactttatttggtctttagtgtgcaactttgaccactattttttattagaataaaacaataatatctaacgaaactgttgtaaaagtacttatgtccaaaaaatacgagttctttatcccatcgtcaaaaaagttgtaatcatctaagttgattgttttttaatttgctataatatttagttagattaattaacagtgtggtatactggtattatgaaaccttaggaccacaatacccagggttatgtgccacatgccaaaatccatgtgattttgtgcaacttgaaccataatactcaggattttgtgatattaactctatatttaaatacagaggtaatactagtttactactgaccagcaaaaatatgtacataggcagaaagaacatgttatgatcagttgcaagcagcagctgtgctagtgaattcatgctcgtagaacataaaatgcaagcttgcagtgtttggatgtgtgtctttatttcttaactactcagtagtgacaatacaattcatttgaaaatagagttgtatgtaatatgaacctttatatctgaagaggtaattttattatatttgatatacaattataacagctctattatacatatgatgatttggttaagttgcacaatgcaacacaatagatgatgtagatatctctttttccactgattaagcggaagtagaaagtgatgaagtatatttctcctattttattatcatgctagatttttcaggattcagtttaaataacaaaatatacacttatccataaggtgatgccaaattcctagtatcgcttgccaatatacctgtgaaactccatacagtccaaacagggctaggtgcgtagaaaataacaaagcaaagtaacagaaaattgtcacttatgaaaccaccactgatagttgtattgttcttgtgtataaaaaataaaatgcatagagtgtgaaagtgcacctgtaccaatccttgccttgtttccaatatttgccctcttttccattaacttgcaacttagatagataaaattccaccaaatccagagtgctcaagctctggctgaacactaatgccttgtcacccaattcagaacatgatgacaggatatcaaggagtaaaaccattttgccactataatctgcttccttataagcattttcatctaaaagattctcccaccagttactttcctacaataaaggatatgcacataaacaaaaatactggaacgtgtgggtgtaggtgcgatactaaagttatgttccttaaccatctgtttttggtttaaattaaacataattgcacaggtaagaccagactcaccagactatcagacaaaatatagcgtgcagctagaaatcataatattaaaatatgatatgcatgaacgaattacatgacaatcaattcctaaaatactgtaaaatttgaaacttgaaacaatttatagccaatatatattcaagtacctcatttacaacatcagaacttttcttggatagctgatcatttctgcttctcagcttctctgtacaaatcacaaaggtgaccaagtgttaatttctcacagaaaaaaaaaaggagaatttgaaatatatcagaagtttgggttctgacttctgaaccaaaaaatagtcaatcaaacactgataaaattatacgagtattatattttactaattacaaatagaaaaaaaaaagagctcaaaaggaaggtctgtgaataataaattacctccatttggcaagtaattttcaatattatcatcactagagctctcatccatcagaaaggactcgacatcttcttggcgcaaatttcctttctgtttagccatctggagaagaccaggatggttccatatctacacttgaagcatattgtcgggcatgagaagaaagaacgtaaacaaatatgatagtacaacagaacattggcatgttatctaataaagacataaagatgcaaaaatgtcgcaccagcgctaacgtttggtacttggcaaagaagccactccgctgaaaagatttttctgaagcagcactgcttgagaaaccattcacgtccaagaatcttctgtacagcttcctttgtagttgagagagtttaacagtaacaacaaaaaccttcttttctggtagatcattcttcaccacgttcatgtccattcgctggacaaatcccttcagttgttcatacagaatatgtgaccgttggttcatgatcttgacatcatctgatgtagaattcgtgtgctgcccattttcaatggggttctggaacctgataatgcaaagcatatcattcaaatgtccagaatattaatttgccacagtaaaagagatcagagcatcaatttacctgttacggaactcatggctacttccaagataaccttccctaacaaaatcaaccatctgttaaccagaaaatcaaaagccattagaaaagtactacagtcagatatcaaaatactgttggtagctggaaggtaaagtagcaagggtttagggtaggagtgcataattccttacacagtaatattccatcaaattattctgcaatggagatccagttaacgcaattcttctctgtgtccttacttgtttcaaagcttgtgtagtgtcagctctcctgttcttaattatatgtgcttcatcacatacaagaatatctggcccacactgattgtgacatatgtaaatggactgtatcaaaacccacatctaaaagaacaaggttggaagaaaacatacatacagtataatgatgcatagctcatgccagatgaacatctatgattgttatattaccacataaagtggaatggtgattgaaacattagtatatccatggaaaggaggggtataagatatggatgaaaaaggaaaatgcctatgacttgacataacataaaagcttgaaatataacagaataacaacaggacaaatggaacatcacctgcaaagcattggtgatctcgtttgcaacagttttgtccctcgcactccttccaagggaaaggtttctaaatgatgaataaccaatcagaagcacgccaccttttattcgccacttttttagtaaatactgaatgtttgccctgcaaaaaccacaagtggaaggggagtcctttcaggccaaaaatagaacaccccatcataatcgtaatgaaaccttatttcgacagcatatagaagttttgacacaggcagacattccatcatcagcagaaaagggcttacaagaatattcaccctaactaatacatctagccacaggttggttatgcaggtaatcaattgaacctatcggtacaaggacatggtggaaccttcatcttccgttgcatttagaaagatgccttgaagctaaagcaattcacatgctgccaaaggttctgaagtgctgaacaatagctttcaagtgcaatacacatctaatgcaaggtcatgaaaagggaaataccaaataatgcaataaaaagaagctcgacagcaatgtcctaatgctgctgaggtgaaattgaagattttcaggagcatagctttcattagtggttatcaacatcataccatactgaatatgtcgtttcatatttctgttttcagcattaggaaaaatcaatcgcatctaaccaagtgagatttgtgacataaatctagagaagaaataaagggtaatgccagtaaccttccaaatgttgcaaaggagtctacacacatgaacagtttttttcttgagatttgggggaattgaacctagggtggctagctaacttatgtttttaggtttgagagtaacagattaacagatgcagagtttgagtttatccttatagctcacagggtataatttattttgaggctggcacgtgtcaattatctagtattgcagtagggaaaataagattatacaagatggtataacaaaggttctaggttacatgaattagggaacaaatttagtaccccctccatcccaaaatatagctacctttctagttcaaattatattttggggcagagggagtatcatgtatcgcataagacggcatttgatggatgatccaaagcaaggtctacaaagaatgattcaagcgattgagggtatcattagattttagaaataacttaggtctggatttcctaattgatataggcagatctaatagatctttccttgtccgttagctaagttttgtgctaagttgcttcaaacctatgtgcaagagtttcatagtctaattataaattccagagtgcatacttgcaaacataagacaagataagtaacaaaataattaacctgcaccttggaacatcctccaacatatacacacgaagtggcttaagttctgctggacaccatttgatgaactctttcttccagttatgcaaaacattaacgggggtaactataagcgccgtgcgcagtcccaactggatgcatctcataacagtatacaggaatgtaataacctgcaaagtcaaaatgcaaaaatataagaatacagtttccattattcttttgtgaaatggaaacaggaaagggaaaacaaaggccaccttgaatgatcgaaaaacaatcggcacatagttatagttaacaaatccagcaatacaagtacaacaattaaaggtaaactgacacccaaagaatagatcgatagatcctagaatatgatctaataaccatggaaaaaatatgataatatggctgaatcatgtaatgaagaaatcaagaatatatattacaggacaaaagtcagtacaaacctgaaaagttttcccaaggcccatgttgtgagccaaaatgcaaccaaaacctttatccccagatttgaccttcttgacagattggatcacattttcccacataaatcttattcctgatacctgaaatatcatgatatattttagcttcctgtaacagtataggtacaactgtacagaaatcatgaccagtgtgatggtgatgcgatactggcacatgaacgtcaaacaggtaattaaccagtttaaaagcaaaaataagaaagggaagttaagacgcatatcagactttctatttgatgtttcaacacacgaagacacattgcaatgttcagtgtagagtttcaaactaaatgtaatttttaaggtgaatgagcaatactgttgttcagtatatttgaaaaagcaaacctgatgaggtttcagtttagcagatatgctgcttggaattctaacaggtgcttcatcttcctcgcgggcaaggtttactatatgtccatccccaacatattcagaaacctcagatggtgcttccaaggaaattccgatattgttgctctttaacttgctggcagactgctcttgcatggacttcagatgttcttgcctagcctacaaaagaatgtttagattataacctcaatagcttcaaacaaacatagataaggtttatcaaatccaaaaatactacagaccttctccattgcaattttaagctttgtttcctctccaagttcttcgtcatccatgattcttcttatcctctttttcattttatgcttgctgattatttttgtgtaaacagttagcaaggaaaaaatttcaatatttaatccgcatcaacaaaagtaatagtaaaccaaatgcaaagaattgtgatgaaataaacaatacaatggtaaagggcatacctaaaaggaccattgctctctaatacagaaagctctgcaaagtcattctcaggatcagaagactcaacaccacctagggccttgtcacagtcagaaattaaatgttccagttgactgggtaggcagcagcaacattgccaaccagctactctagcttccgataagccttcttcaccaaaattctttgacaagcaatttctgcagaaaagcagtttacaagagctgcaactttgaagctgttcactttttacacaccaggtgcaataaccaccagacacaggatcctgtataaaacgagtacatctaagattatgattgcataatacatttccataaaaaaatcaatgttatttgaaattatcttgaaatctacagaagtggtatgtattcacctcgagacgattcttctctatcactagaaatctgcaagatccacaaattataacatccaatactgggtggcggtgcacttcagggacattcaacatttcagtgcaaatagtgcacttgaaaggtttaggccgaactttatcaccaagtttagggctttgtgatgggaagatatcaagatcaataatctcatccgcattttcacttggtgctgaatctggcttgctatcagtctgcatgtcatcatcactttcaataattacagtttttgacctcttattgtcaaactcaacatcatcttcacgtgtgcgcttcgctagctcaacagaaactccatttcatatgttttgagttttttgggaggcagctcacagcatccatttgatgatgacgccaaaccaatgttctcctgaaaagcaagacagagtagatgaaatgctaaacagtgcacccaataaaaaatcaacaatgatatagataacaaaatggataaataaacaaaacagactcaaactaaataaaactttgccagttaccttatgcaaatgtcttgtccttctttctttcaaatggcgctgcagacgttttgtcatctttgcatcatcctcttctggtacctacagagatgtacaacatttggggaaaaaatatgaagaaagtgaaatagaagtgcttaccagacaacataaaagcaaaacatcagctgttcaacaagaagtcaagaactgtgatacttgtattgcaatcacatcagagaatcattatggccatgtagaaataaaattatatcatccaccatgcaactgaaatagttataaatgcaaaaatgatagcataaaggagttatatcggccaacaaaccaacattagaattcaggtgtttacacaccgcaataaatcaaagtaataaaacagaaataagtataaacacagtaaaatgactataaacatgcacacaggagacatcaatgggtaagaacagcagcacaaacaaggcctaactatagctctgtagcacaacaaaactagtttcaacttacctttctgtattttcttctctgtacttcagaaagctctatttcatcgacaccttttatgtcactaacagcaccctcaacttcagctatctcctctacctgtaggacaatgagagttggagatttaatggaactgtattgatgtgaaagacagattaaaaacaagtgaaaagttgggtttacgtatagacagaagtttcagtataatgggaaatggtaggctgagccaattatttacaagtatataagaaatgactgaaaaacaacctaaaacaatatcatttttagtattgacaatgaaaaccaaaaaaatctaaatgttttctaattgatatgtacattagaacaaactaattgaaatattctaatctaaatgtatgtggccctgaattgacacaatacaacttacacagtaatgtacatgactcaaggatgtgttcaacatagaaagacctggcagctgacagtgttaaaccaagtcatttaaatcacatacaacccataccacaagcacaaaccatattggagctcttaactaagctcacatgtttctatgctcttcaatgtttaagccctgcttcaaggcctaaaatacaaactactttgatccttggtgcctctctttagaccctagtttcttttgtctcaagaatttcttgtggatctaataaaaatgtactccatccgtcccaaattatagggcaccccctttttaaggaaaatcaaacttggtagcttttgactaataatcatactaaccatatatatgttaagtattatgcatgttatattactagaatcatattttaaagtactttcatgtgatgctaatttcaaatttgttggaaacataacatggaataaaataatggtcaaagtatgtcactaaagaccgtgtaaaaaaatataggtcttataatttgggacagagggagtataacaatagtacagaattatagcagttgatcagtctaagtcacacctcatcaactcctggaaattggagacctaaagcagccgcttcttgtggggtactggccagataaactgatgcccagttactacttccgaaagaactttcagcatattccttagatttggtaagttcattgaatgcattccaacttttctcatggcattgtgcagatccatcatccccaacaggaatctttccagcaagaaagccactagcaccttcctccagcaacctcccatgttttctaattgaagtgtgtgaatcaaggtcagatttgagaaacaaaaacacaggaacacactaaatttggccccaacattacctccttacaggtctacaagattggaggtattcatcagcttttctgattgatttattagcttcctcaggcacttgataaccagcccagtgagccctgttcttccatgcttcagtttcacaaacatttggaacttggctttctatagacttgtagaggctgggaagttcgacaccagcagcatcaagttgctcctgcattcaaaatttcaaatgtatcgcctactacttttcttggatttcataaaggaaataactcatcgagattacaggtaactcaaaacacataacaaagaacttggaaatttaaaaaacgtaaaattggttacatagcactcgaacatacccatttcttgcacacacaaaatacaagtgaacttttctacataaattgcttctagtaaaaattgaagttttctgtgtaaaatatttctatctaaaatcatagaaattgggaaagagctaagatatgaaatggtgaaatttgtaacaggtgaaagttagagtgatatgaaatattcaatggtatgtttctaaagtggatatcattcgttgtatggaaccaatttttccaaataaacatatcttgatttatatagattcttaaattaatatgacaagcattacagtctgcagtgtttggtacaggcatgacaggtcaagctataagaataatcacttattgttctagtgttttttcaaggtcaagaactctaattaatctaaataagggactgtaaaatgtatacttaattcattgacactataaatgtgagtacaaccataaacaagataaagaaatattttggccttcattttgataaatcaatatggtttcatataaaagtgcttcaataatttacatggaacaagtacttaggacatgcatctaacacaccacataggaatggtggcaagcattgacttaacagataaatataattattattcactaatgggcaaaatgatcccctttgaggcaaaaacataccaagagaacagcaatgtgagtctccaaatcatcaagttcagattcccattccttcttgtattgcttcatctcagtagaaacggctgactctaactactcaaggtaagaaaaaatatacaatacacaaatagattaatcattgaagcattatgcattatagaataaattataagcatattgacagtgttacggacctcatttccttggagactctccgatagctccaaccttacttcagattcaatcttttccagtgactccttttcaagtgattcttgcgcttgagcagcctagtgtttccaaagaataaaaaggatgaaatggaaaacgttagggggaaaaaacaaaaaatgaataaaacaacaatggcaaataccttgctctcagcgtcaaggaattcggtaattaatgtttcaacttcttcatcagtgagaggtgcctataaggaatcaattttcagaaaaatggtaccaaattacacacaaaagagaaagcatgacaactcaagccacactaagatttccagcagttgaacagaacagaacacaatgcaaccgcagaacagataccagcaagttctatgtttcaatctgttcgaccaaaagaaaagtaatagcattgaaaacaatactgataaacatgtttatctaatacggtgacagtgatgtaacataaaggttgtgcaaatataatgagagcaactatagcaaagggcatatcaaaagagttatcctcgagtgggtatattgcttaatgtgtccaatgttgatcatactttttacattgattggaaaggattagatcccataaacatcaacagggcaagataaaacttaagttacccacccgcagatactgcaatagtacatacctcattgtctccctcaccagcatcagactctgaagtttgctcattatccgattcccgaagaaggtattcatatgagtcattctctgaatcatcatcggtggtggatgcttcctcatgcaaatcattttccattgttccatattcatgcgccttgtgcgcctcacagataccatgtcttgcgtcagtttccacttcaagtttatttgcatcactttcaggttcaataattatagttttatcttcccctgcctctccattagagtgaataggttccattttcttggacatgtcatcagataattttctattctcatccattgtgttcactatcaattgcagctacagacacataaactgtgccattcttgttaatgaactcttttctttttctgcacatagagaatacagatattgaaattgagggaaacaaaaatgcaagtttacacagtcaatcaggccaagaggcagtagtagtaaaaggagtacataatagtaggcttcgattgaaggattaatgaaccataaattactcaagaatgtgtgcagcggcagaggacataatcacataagcatgactaaaaagcacacagaggcaaccagaaaagaacagcttcaacccaccaagttacaacgaccccaacacaacccaaaactgagcttgcacatcactaaaccctaaataacagtccaaacgcggacacaagaatcaaaaatttaaaaaaaaatactttgctaaataaaatgttcctgtgattctctcaaacagagttagcattgcaggcactccaagccaggaacgaagcacgcggcgccaaattgggaacccagcactaccacggaacaccccaaaataaaaaaaaatacaacacgaaccagaggagaacaatctagcgatccgacgaatccccagcccccaccaaaacgaccacacatttatcctccaaaatacccccacacagcttcaccacaccagagctaacgcagacacgaacacacacacatccacggacgctgcagctaaaccgaccacgatcgcaacaccacgccatcacaccaagcaacaccaccagagcctatagccggagacaccgaagctgtgggccgattacctcgggaaaaaaccgcgccgcgccggggcgccccggccagccctcgcgcggcccgccccggaggagcacaccctccgctactctccggcgaccgacgacggcggcggcggcgacggcggcgatggggggtttttgcgggggaaagcggcggagggggtaaaaatgagatgcgtgagcgaatgggtgggaaaaaaaaaggcgaggagacgccgggaaaaaggtttcttcacccaaccgcgattgaaaaaaaaaaaaaaaaaaccacgaccactctcccggtccgcgctttttcaacttccctcctcctgtcctgtcctatacaggcttcccaccaagattttgatctctcgatttctgtggatcgaatttgaattttgaatctactgtggctattttcgctgggatttcactgttcgggtggagtatactagtagttcggtgggctgagaaaaaaagattgtaccggatgttgtttaggattgtgaatttgtgatctgggaaggcaggatggcagaaagttgtttcagatttggatttattttttttttatggatggggatagagctttcctttaaagatttctttttaaggattggtttggcccactcatgggtgaaaacttggttaggatatttagtccctctttgtttaaggcttaggcttattggcctagatttttaagtcagcttattggcttatatgatttataagccagtgaatttaatgtcctaagtttagtgctggagtcatacatctatctcatataagccaaaaaaagcttctccaacctagtttttggcttaatagtgttagagtggcttatgactttaaaaaaaaccaaataaaaaagctgcttgtttgttttggtttagacttttcgacttataagttggcttataagcctaaacaaagagggtcttaggtggttggactttgtttacaactgtgattcgattttggtgctggtgaatctcatcatatggtttgatagatccgtaaggttgagaggaaattatcgataattaaaaaagttgaatacgtaagtgatatagataattggaaacaataatactttgaccctaaatctaataatctaaaactggctcttttgctagcttttgattggtccacttggcgtctcttactttttaaagtaagaaaaatcataaatttataccagagaaaaaatacctaacaatcatacgtaaggaaaaatctagagaaaaatgcatatggatttttagaggctttcaaaactatattccctttccaatcacacaaacttatgctcttttacttctataaatataccatgcctactcagtactacttctataactctaaaatatatagtaaacccagaattattaataaaaaacaaatttaaaataacgaatttacatttatttttcttatttaagaaaaacatatatatatatatatattttaaattagtgagcacatcaattttattatgtagtatttttaagtgattagcaagcatgctaacaacacaccgattttctagtttatgtagaagacacaatgataccatacttttgtatgtgtttagatccctcaaaatcaagatattttttcctgtaaaaacttgggccctccgtaccaaaataatcaatttttgatgaagatgcatccttaatagatgatttttttggatgggtgagttttaggtatagatagatctatttctatacggcttcagatcttcttgggttaaagatccataattgatgttcccttaaaactattgtgtagatgagtagatcatctatatggtttcagaccttctcacggataaaacttatgtccctaaagaaaatctcatgcatgtagatctcctcacgcataaagtctatgttcccaaaaaaaacctaagtacgcagacaagtttatgccccaaaaaccctatgtatgcaaacaagtagagtaggtctattatattttagtttgggtgattacctctacagatcgggtgcccagaaattgaaggaatcaagtagcttcctcacttcaatccgcttgaattcgacttcaaccggcttgaattgaattcgacttcaaccggcttaaattcaacttgatttaagcaggttgaatatgagtagcctctccgttctgtctctccccctaattcttctccttttatatagccaagaacctagcataatatatcaactacttttatctccgatctgtccctccaaatcccctcccctcttccttttatagctaaggaaaggttgcacaaagtccaagtcggaattcaatacttatctattatggttggagtttctagaaagttccttcaaacttttaacttgtatgcatttccttccatttatctacaacatgaattttgcataaagcccctcttgatttctagttaattacttattggtttcttcgatctcatgccagggttgatccgaccatccacgcggaataacgtgcctgttattgcacatccgtataattaaagaaatggcaatgtgcccacatctcttaaacaagacgtcgtacccaaaccttggccctgcaccagtcatgccacaacccatgcctcgtactctcgctaccttgccacctgttgttccttgagcaaatggacgattgctacaccgaggcattacctgacaacgtgccattgtctcatcgactaacctctcctattcctggatggctctcacctactccatcgtctcaaaataaatcaacttctatgtttgaattttatcttaaaataaaccaacttttaccttcttacctaccatcgattcacaaatcaaataaattttatcctttaaataccctcacatacccatccatcaatacaacttacctagtattaatcagttacattttgatcctttggaaaataacagcaattgggtgcttgatcagcgccagaaaaatcgggcacccgtcgcttaccgcgcctcctgggcctccgcaccgtccccaccacacgccccaccacatgtgccgttgcaacaaatcatccacatactatgtaaacgctctattaaaggaatttgtttcaatttttgttccaccaataatgtttgagtaagtgtactcgtgatgtttcactatgcatagatcgaatgttgtagtgaattgaagcatcatttcgctattcgctgaaacatttattttatatagggtgaaacaacactcgattttttagaaaccgttttttcatatgttgtagcaaatgtttcatgagatgatttggttgtgtttcagctttttaaacgaccgaaaatttccgatctacttagtgaaatatgttccaatataattggaggaacaacgcccgatttttataaaaaaaaaaatttgggcgcccgatttgtggacgcctcgataaattttatcctttaaataccctcacctacccatccatcaatacaacttacctaatattaatcaggtacattttgatcctttgtcttcctccttaattttgccttgggaagctaggatttgaaattttataggagtttctcttttgtccctctcgagacaaaccgtatgaatacacgaaccaacttgacatatatggctgatgacggtctataaaacataatcaaatcatattatacggtttctatgttatcccgtctgatacaacgaaggttgtttagttgagtggcaaacttagaacattctgccaaactttaccacagatatgactaacaatgtggtagcagcgtacccctaagtccccaaaaaagtccaattctagttacgaacctggacatatgcgtgttgtggacccnnnnnnnnnnnnnnnnnnnnnaatcgtgtaaacagtaccatttccctggatcaagtagtctggtacacacgaattcatagctgaaataccaagtgcacatacatgagtgtctagtacgaattattacatcataagcccgcaggcatagtcttaaatcatcggaccgagcggtccggaatacattccaaaaacagaagtaggtaaggcagcggagtcaaggcaacggcatgccattgccacaggcaacgaccgtaactaagacctactaagcgccatcgtcttcatcaccctcctggtaataagcgtagggatcctccgaagcttaatcttcgacctctgattaagtttgtatattgcaagggtgagtaccaaccgtactcagcaagccaccacagcaacaatgcatatgacaggggtattcaaaggatggctatggttcttttgcgcaaagcaagttttgtaattcttttcacaagcctaagacctagcatagactgatcaaattttagtaccagtgttcatattaaacaatgacggttctgtccaccatccattgtgatcccaaggatagcttcccgccattgagtcgtcatggttttctgaggacgtccacattcccgcctctcaagaagtggctccatcagtatagaaatcatcatgcaatatcccatcccacacaagttaagaatttagagtctagccaagtgtaatacacgtcccggtgctcaataaccgcgagcacggctattcgaatagatttggtttactcacactgcagtggatgtacactttacccgcactccgcgactgcccaacacatgagcctcgtcccaacacatgagacgcgtcacggcaaagcttttcgataacctcgcattggcagtacccgctccatgaactttacatcctcatgcactctaggcgtacacggtttctagcagtgagaggagttctggcgcacccgggaagggaagactcacacatgcattaagttataattatgtttaaattctctcatggcagtcctaccgatggcgacaccactgtagacacccgcctcacggttctaccaatggctgccccaccgtagagcccctgcctcacacatcaagaaaccactatgcatggatactgcctccgctcagctatctattccgctaggtctatacccatacgagaagtgcggttgtacgggggtcgtttcatgcttaacttcatggctcggtccttaattgaccggggacggtgctagccttttccggataccacccaaatcctccgtccgccccagtcgaaaacagttgtttaattttatttctcctttcacaaatcatgtcatcaacatcatggcaatgcggcgctcatgtctccatatgcccaagcatatagcttttgataaatatgagtatgcataaatctagagtagcatttctaagcatttgtcatagttgactagggacttatacgtaaatcatggttacaaggatttaagggtaaacaataattaaggcatggcataatcacaagtaggatgtttatcattgcatgtaattttatttgtaaacaaaataattttgcaaatgggatcaacatgttcaaggaatagtgatgacttgccttgctcaaagtcttgcgggtcttggccttcacttggatccgcaactccctcgggctctatagttacgtgcgaaaattgatttgaattcggttagaattcaaataaaaatccaaataaatccaaatggaagtcgaatgcgaaagtcgatccttttttttattaactttactattcgcgaactagggcaaacccaattttgatttatacatcctaaactatttttgcgggtataaatattttgttaccataagtttttaatttaatctacccgagcattatatccatataataggttagaattttctatcgcgagctaaatatcggacaaaatcctaaaattatcttataatattgtacgatttaatttagtctatgactaaacgattaaatataatacacggctaaaattcctagtaattaaatccgaatttctaccgtgaatcgattacttatagagattacccaaaaataatctataataatctataagaattcatctatttgtttagttattaattacatctaaattactaccgcgaattgatttcttatagaaattaccaagaataatccataatttatattaatttttgcaattctacgactataattaatctataattaaattctaattattttaaattttctaaacttccctaatctccctctaatttctatttatttttttcttttctttttctctcctcttttctctcttttcttttctttttccttctctttctctcttttcttttctttttccttctctttttccttccttctttcttctttctctccctcggcttctcccttcctctctctctcggctctttctctacccggcggcacggcgacaaacagggggggcagaggcggcggcgacgacggcgcacggcgcggcacactggggcggcggcgcagaggcacgaaagcggcggcacgacagcacgagggcggtggcgtggcggcacgacggcggtggtgcatggagaaggggagagggagaggaggagggaatggagtggggtggagaagggggaaggggccggggtttttataggggagagagggggaaaagggagagaaggagggggaggggtgaaatgacagcggctcggctgcccggggc

SEQ ID NO: 8350 - DNA, 6586 bp, Oryza sativa
  unsure (1)..(6586): unsure at all n locations
tgtttgctattgggcatgtgttgtttgtttggtgctatggcttttgtaaacacaaggttaaaattaggccaaacaagtccctgcttttgcggaatagcactactccgcgtcctaattatagttatagtttttatctttggtggacttggtggtctccctgcatatggacgtcgtattgcgttcctaccgttcccccccccccaatctcttctcgtaactttgatctctcttattgatgaactcttgaagggaacggaaatcgaaaatccaagaggtattgtaactttatatgtggctattttctacaacttgttagccaatttctttgctagttgtagtatgtttttacgcctatcatgtatttgatttgcatagaagctgtttatgtctatctgtgtaggtatatcacaaacgaaaactacattttcttcaattaagtggagtcattttttatcttcatgagaagtacaaaagtgaccaaggatcacgtgaaattaattatcttaatatgaataggaagtgcaaggaagattgcgacatggtagaggcctattattcatgtgctaaccttagcatagttgcatgttatatacttttcctgataaaacatatctctcaaccaaataaagattcatggaatgcttttactctattcggtaactatcttcgtctatattacaatgtgttgtgttgttctgtaaagatttctatagatgctttatatttatccatgttattaattattatgtacatgcaaaaactacattgcacaaatttagaccataatcttcatatgttttactagcatgctaatttgtatgactccaatatttagaaaaaaatcatgacctacatttgttttatccatggagatgagaataggttatgtcatacttcgataatttgatcaatatggtgattaaatttcccttcctgctatattgtaagtcatttgaaaagggttaatcaatcttatgtgatatatgtgtgtcacgatttttccttcttactagcatataataaccttttcaggtgccccttactaattctatccatcataatcatttgaataattatttggtattctcctgcatcctaggagatggagggcttgaatattgaagggattcccccagtgcctattgatccaaactctgttgatgtattgtcaagctcaaatattgatccaaactctgnttggacatatttggtcaaagncttncaaatattttgatccaaactctattngatgtattgtcaagctcaaatgaatcaaagcctactatttcatttgatttgccatcaagtttctcggttggtcatactagacattcaagtgaagatttaagttcccttacaattaataatttacgcataaatcatagagaggacaattaccaaagccagtttgaagagaagcggatacatagccatggtcacacaagacgttttagtgaagatttaagttctttgaagattaatgatctatgtgcaaataaggaagaggagaattatgacaaccagcttgagaggaaggaaatatatcgccataactcagctggaaacattttcagggctgcagagattgctgaacgcttcattcaaaccattgataagagagtcctggtcgacacagcagcaccaattgaatccgttaaagatgctgttagcaaatttggagggatacttgattggaaagaggtagttttttaatccttctttatccatcttactgtcttgttttgatgaagggaatgcataaattcgattataactattctttcgtagagacggaaacatgtccaagttgagcttgacaagatgcaggaagatgctcctgagtacaagagaagagtggaagtcacagaagttgagaaaagcaaagttcttgaggagctatattgtactagacgaactatagaacgactaaaaatagacctagacaaatcccatactgagacaattcaagcacaacaagacttagagcttgctgagattcggtttgaagagatgcaacaaggcattgcccgcaaagagagatctataacaaaggcaaagattgaggttgccaatgaacgacgtgcaacggccttagaagacttgcagtcagtgaagatggagctagatcaacttcaaaaagaatacacatctctaatttctcaaagggataacactgaaacaaaagcacgtaaggccattgttgcatcacaagaaattgaaaaggttgttcaggatctcaccattaaggttatcacaatgaaagatttgataaccacctcacaagctaaccatgttatagctgaggggaaaaaaataaatgcagctttggcttatcaacaggacatggtgaattggcagaatgagctaaaacagattgatgacgaggttcaaaagctcaatgatgacctatcactcaataaagaccttgagtcaaagctacaaactgcttcaatgtggctgatgaatctaagggacgagtttaaggctcacgtggatggtacattgcctaaagtgccatctgaggctagagaggaagagcggccaatgataattgtttgtgcgaagctagcacgaactaggaaggagcttgaaaatatgaggatagacattgataaggccaaggatgatgtgaagtctttgtggaatgctgctgctacattacaagctaatgtagagatggagaaaacaaacattgcatcattaaggcaaaaagagaatcttgcatttgaatctgctttagctcttcaagaagaattgagcaagattgcttttgagctcagcatggtggaagagagaacaaaagcagcaaaaatgcctttagaactacagcaagcaactaaaaagttggaacatgcaaagttgaatgctgtatttgctaggaatgagatggaaaaagctagagaagaggcagatcaagcccaggcagaggtaaatgttgttcaattgagaatagaagcaacattgagggagatacttgcagttaatgcatcaagagaaattgcagtggcatcagcaaatgcactacaagactataaacaggaaatagaactagaaccactagctaatcgaaaaaacaacaatgtcacattgtcacttgaagagtacaatgtattgtgcaagaaagtgcaagatgccgaggactctgctaagaagcaagttattagagctatagagaagatcaagaaagcaaaggatgcagaggtgaggagtttggataggttagatcaactgatcaagcaaattgatgataggagggttgcactgagagaggctcatgagaaagccaatgtagcatgtgatggaaaattagcaatggagaatgaactaagaaaaaggagagcccatcatgagaaacaacgaaatactggtgaggtatctcttcctattgctcaaatctccaatgtaaagaacacatcaacctcttttgacgcagtaggatcatctaactccaatccttataagtatcgaatgttgctacctagagctgacactatagcaactacaatagctgagtcaaggccacggaagtctttcttcccacggtccttagtggcaatgttcatgtttaggagaaagacacatttgaagtgataactcttctccttgctagcttgcctatttatttttgtttgtttttgtacatgtaccttcaaagtgtcgacgtttagggtgggttgtaattacttatcgaaaatatataaaattaagccagaggtatttgttgttcttgtaccactttcaatctattatatactaaaagtttattaaacttcctataaacgctcctaaatcgaccgtgacactctaagaaaatcctaaaaaatctgataaaaacaaaaatatctagccattgatttacacttaaatcggtggaacaattattttaaccattagatttgatactaaaaataaataattcaacaaccggtggacccattatatctattaaaagaataactctgctcccctctttctgtaccgtgattacggcggtgtatggagtacaatgatcttgttcgccatatgaggaaccgatcgtgtagctctcgatagagtgttaatttggttgcctgcgattggtttcgatttgtcgtcttgacgattggatgctgatgacgctatgcatcgaaacgctcgagcagcaatcggagaagaattagccgctttgagaagaatggcaaatataatacaagatcaattagcaaaacaataacagataatgctgcctatgcttacggtctatgttgacaatattctaatcagcaacaaaattcacgactgcgcatcatcaacagattaatacactaccacaatcaaggactgcatgattgagagattattactagctcccacctttttatattacaagacgctttgatttattttttgaatggagatagagtagattatcacaccaacaaaattaaggattgtgcatgatccacagattaatacacagataaattaatgttggaatcaaaacaaaaatcttaaaaaggagtcaaacaccacatcacagatttatttaattcactcctctattttctaactaataacaatcttagaaattttgaggaaaaaacatctggccgtagatttatgcctaaatcagtgggtatattattttaaccattagggcaatgtctgacacagctctagattctaaatacaatgtttgaagtttatatgttaaattatagtggtttaaaattttaaatttcatctaaaatagaaacaaaatgaattatccaaatgttatcaatgtaaacacatagatctatggatctatggacctagaaatacaaaactttaataaatcttagatccggagctgtgtcaaaaacaaacaactcaattggtgatcccattggatctatgtaaagaaaacaaaccgtcttccactctccctccccctccagctgtacatttgtatgtctccctccgcactactcacccctcgtctcctcctcatctcctcccatttaattcacccctcttattttgaactaacgacataataataaagtaatttatagttacatagctaaaatataagttatggctgatttttaatttgtttgaactcttttacaattggatagctaaataactcaacatttaaattacttatagaaaaattcaaataagttggttgaacatagacccctattcttttgcatggtaaccaaacaacattctatttttaatttgtttgtagtattgttttatttataatcatataaataattgaaaatccatattatttcattttattatataaaaattaaaatgtcatttgaacatagcccctatcttttgcacgataaccaaataacaataaagcattgaaaataatgatagtaagtattatgacatcttaaattattctacttaataaagaaccattaaatgtcctctagagttcttttaagccttggcgtgtcaatgtttaaaaactagaaaaaatcttcgaaattcaatgaaaaaaaagtaaaatatttgatcattggtttgtgcaggcaatgcgagagattagtaattttacggaccgattgctcagcatgtgtggaaggactttctactccatgtatggatcagtcttgcagttatggccaagtcatgctaaagaccgtataagtcttgcatttacactattttaaaccactaaatctacttttaggaaaacctcaagcagtcgcatgccactttttaaaagttagcaacatcttagaaatcttggaaaaaaaacatccgatcatcatcagtttcaccgaaattgtttagaaaagaacaattttacggttcttgaggaggtaccatgaggtaccactttttctattataaatttggtacctcttggtacctaggtaccatgaggtaccaaattttacactaaatttttgatacctcatggtatctactcaagtaccgtagaattactctttagaaaaactagaaaatcaaaagattttccacggtctttcaataattttatgaaatacaacgtaattatgacaattgaattggcattgcaggctttaaataataaatatataatatacatgtacttaattcatgacaactgcaggctagcttaaaaaatgtaaagtgtttggttatgagtacataatttctagcattaaactataaaatgtatagaaagatattaaaattatggaagcaactataatacatcacataataaaaaaatgatgaagaaatcatactttttcagatgcaaccaataatgcatatgcccgcgtgaatgcgcgggctacctttctagttaatttaattgcattttgccaattctctaacttaaactctgagagtgagagccatgttgtggaacttcttgaggtgttgtgtcatcattaaattgacaaatttccatctttaagtgggcatacgttgtttcacttattgtttgccaaaagacagggctttggtaccttcttgaagacaaccaattgcatggagtggtctagtgctgacaggatgcaaatcatttgaaacattccccatctcaaatcacatgacatctttcaactggaaggccatattacatttgcctccatctaagtca

SEQ ID NO: 8351 - DNA, 37700 bp, Oryza sativa
  unsure (1)..(37700): unsure at all n locations
acggcgacgggaagccggcggccaaccaggacggccagcggcaggagctcgtgaactgggtgaagcaggttggcggcccggcgacggcgttcgacttcacgaccaagggcatcctgcagtcggcggtgcagggcgagctgtggcggatgcgggacaaggacggcaaggcgccgggcatgataggctggtatcccgagaaggccgtcaccttcgtcgacaaccacgacaccggctcgacgcagcggatgtggccattcccgtctgacaaggtcattctgggctacgcctacatcctcacccacccaggagtaccatgcatcgtacgcaattaacttctcaaagcttgttataacatccatggatcgatgcttcatcattcataggtgacaattttgttttgtgttgtttagttctacgaccacgtgttcgactggaacctcaagcaagagatcaacgcgctggcggcgacgaggaagcgcaacgggataaacgccgggagcaagctgcgcgtcctggcggcggagagcgacatgtacgtggcgatggtcgacgagagggtcatcaccaagatcgggccgagaatagacgtgggcaacataatcccgtcggacttccacatcgtggctcatggcaatgactactgcgtctgggagaagagcggccttagagtcccagaaccagaaggtcggcgctagaaacggctcgcaagctagctacacagttcttaataacttggtcgcaaaaaaaaagttcttaataatttgtacgagaaatgttcgtttctgtttgcatatatagcttatgaaatcttaccaatatatactgctctgttttctatagttcatcccggaaatttgaacttgcaagcccaaattttgaatatatcttttgctagaaaactttcttactccaaatttttaacatacaagtaaaaaatacaatagaatattctctatgattacttaaattggaccttattgatggtaagatacttaattagttgcgttcgtttgggcttatcggacgagctacttcatcgttcatcattagcactctttcaaatgttaaatagtatatttttgaaaaaatatacataattatttgaaatatataataaatccatttttaagtttacaatagctaatacttaattaattatatactaatgatatttcttattttacgtacggcttataagctcacttaagacttactccctccgtttcataatgttaagtcattctagcattgctagaatatatatgtctagattcatcaacatctatatgaatgtgggcaatactagaatgacttacattataaaacaaaggaagtagttcaaacgaatccttagtccatgttcttttcagctccttcactaagttatttctatgcattatttgttcctctaaaagtacgatttctcgttaaaaaaatctatctaccgtatatttattaagtttatttaccacaatattcaagttatatctataaccatgcagataatccaatacaataacttttttgaaactaggctatagtgaaggctgcatcactgcatgggctagcttctcataaaaaaggaaaagaaaaaggaagaaggctacatgagcccagtcaagagcaggaactatatggacttatcgtcagggataagggctgcataactaatgggccacggcccttccagaaggaataagttcattttgatttccctaactagtggttgaatttgattcgaattcctaaaccacaataccgaatatcttaacccacaattattaaaaccggtacaatttgattcccttagtggttttggtgggttgtttcgctgatgttgcgctgacgtgacagtgttgacgtggtgttgatatggcgcttatgtggcattagaattaaaaaaatggaatccatttatcattcacataaaaaaatattttggacccactaacataagggcccacatccacatgtcatcctctcacttttccttctttctccctttctctcactggcgtgccacatcaaatttttttagatggcaatgtatttaatgctatggacacctaatttttttttcttattctcattgccatttatctatttcttataatattccttaaaaaaatgtgaaatttgaaacctctaagttgaagcctgcatgaatttatgtagaaattagaacccgtgggttggctcatgaaaagccatatggacggaaatagagagagaaagtgacatggacaaggaagagaaagagtggggaagaaggatgctttgatattagagaatgcttcgatactataggataggtgcactttcgctctataatctagaagccatggtccctctaaatataagttcttcacgtggttggtactgcaaaataggctttggaaaaccgaccaagtacaacggtgaggataacccaaccaaagaatttgcccactatgttgaacttgcaacgagacagctatatacctcatagcacactgccaagtcacaaagagaatctcgggagccatagcaaggtgggcacagatcaacctacaaatggagcaatgaaacaccatagatatggtggaaaacttggtgggcaaccttagcccacactaccggaatattgaagaacacgctccggtcactcattctcctagtcagttgggaaatatggaaaaagaggaatgcttatgcatgtgttccaggcttccaacgcatcacattaacgcctactatcattatagcaaaaataaagtaggaggccagagacatacacccggacctactctcataacattgttatctctctaagtttttttttttgcccccaacagtcctaccaagcaaatcctgctaacacctataggtaaactcatttctcctcctttattaatgaaaagaggccatcctcatgtcctcttattcgaaaaaaaggttgataggtgctataatcacaggaagggtctaaggaggtgaaaatgctaacgggcgatcgaccatgcacgtgcaatccgtgtgatagggtcggtccgtacctttttttttttggctcacatggttttcagcttttcattttctaacaaatctttttatgggcttatgatcatctagttttccctttttaagctggcataggcaacttgttttttaatttgtttgaagtgtatatacaaaatcgtatatgtatacaattctattatatatatatatatatataaagtttatgtgtatataatgtttctatgcataatttttttataggggtagacaaacacactacttcaacttgtttgaaacttgtatatacaaaattttgtatgtttgaacaaagtctttatgtacaaagctttgtttgtcggtggcgtcgggtgtgggttggacttggcaatgctctcgagatccgagtgtgacgaggcggacgagtacattggcgtcggcaccaggatggtggtctccgtcgcagccaacgcgcctcggacaatcgggaatacagacaagcctagactgcttgctgcgcgcgccgacacggacatggaccaccctgacgtggattgcgaaagagaaagaggagatgatgacgtacgtggtcacctgacgtatggggcctacgtgggtcccacgctgagtcaactgccacgtcagacaaaactggagtcaaaaccgccgagggacgtagtttgcattggttttgtaagttgatggatgcattgtatctggctttgcggttgggggacgattttgtaactcgatgacaagttgagggaccttcggtgtactttttcctaatttttttcaatcgggctaacatgttactgggcctaaaaagctgctcgttgggccgttcaaagagaaatatatatgggccgacgctgcttggactcttgtggaaacggaaaaacggatgctaaagagcgcatgtgacatcttatcgtcattttcaagggttaattggatcataccactgctgcaaatgtggactattcacgatatcggccggatgtcactagaattttgagaaattaaatccataccaccccgtcatgttttccatccttcccgtcacactttccgtccttcccgtcgctctttccaggaggctgagggcacggaggctggcgttgtgggcggcagacggcggagccgccgggtcaaggaggcggagcggcggagttgccggcggacggagacgacgggtcgaggaggcggagcggtggagttgccggccggcgtcgtcctccgctcctcgctgccgacccgctcctcacccgctacggcgccgtcgtggtggacgacgcgcacgacgggatggctctcaccggcgtcattctcagttagtcggcccattcatcttgaagaaacagcaaccagtcatatccaatttccatcccagtccgtcgtcccctagctgccggcatgccagccacaagcaaccctcgtcatgctgcatcaaatagcaacctcgtcgtcgatctgcatcatcaagcaacaacagccgtttcggcatctagtggttgacattcacccagcagaagcccggccggatttggcgctggatgcggtgctcgttgaagccgcccgtcacgtacggcgcctcttcccgtccccatcgcatcgctcatcctcaccgtctcctcgtcctcatcgtcaattgcggtaacctcatccaagtcatcgcccgtcgtggcccatcgtctacaagcagcaacaagccagcttcattccggcggtggcggcgggctgaaccacggtggccgtggctttgtgctgctgatgctgcgccgcaagctgctctcaaccacgcgtcccctcccatggaactcgtcgacagactgcaggcacttggccgtgtcctcctcggcagacggcagaccaggcacttggtcgaggtcctcgagtccgcaaaaacgcgcgtgccggtcttgacggcggcgccgcggcggagtgggccggcgcgggacgagttgaggaggccgaagtcgaggccagagaccatcccccgagaggcgctggtcgtcgagttcggcggtgctttcaacggcgaagtagaaagacggcacgtagttaggaaattaacgggggaaggacggaacatgcgacggggtggtatggatccaatttaccaaaattttagtggcacctagccgatatcacgaatagtaatagcgttttattaatttgccacatttgcagtggcatggatgcaattaaccccattttcaatcgcgcgtccctcaagcggtaaaacaggactccgtaggtagtcaaacggcctggaaactaaccagtgcagaatcgcaggataccataacctgaataaatcatacacacaaaccggaaaaaagaataaagaaagaaagaggataaatggtagccaatttgtgttagggcgcagcagccagagccgaaagcttctgaagctgatgcgatcaaacctcaaaagaccatgggcagccagcacggaagttacaaaccgaagccgcgcggcgcgcatacgcatcagaaaggcgcgcaataacggaccacccatacggcggccgcgctctgttcgcggcgtccctgcgcctgcatcgcacgccatccaaggctgcatagcacgacgcatacatatctcacgcgccctttttatctgcttataaatgagatagcccacatagcagcgctgccgtttctcctcttctctcgttgggggcaaccgaacttatccaacaacgatccatccattggccaagtggctgccgtgctgcacctataaattcacatgcaccggcatgccactccacacaactcagctactcgaaagaagcagcaatggcaaagcgcatagcctcaatgagcagcctcctccttatcgccttgctctgtctgagctctcacttggcccaagcccaggtcctcttccaggtaagcatcctgtagtacaatgtcacattacataaaaaaaaatgacttgcgtttgacatgactgttcttggtgtaggggttcaactgggagtcgtggaagaagcagggcgggtggtacaacttcctccatggccacgtcgacgacatcgccgcgaccggtgtcacgcacgtctggctcccaccgccgtcgcactccgtcgccccgcagggatacatgccgggccggctctacgacctggacgcttccaagtacggcacgggggcagagctcaggtcgctgatcgccgccttccacagcaaaggcatcaagtgcgtcgccgacatcgtcatcaaccaccggtgcgcggattacaaggatagccgtggcatctactgcattttcgagggtggcacgccggacagccgcctcgactggggccccgacatgatctgcagcgacgacacgcagtactccaacggccgcggtcaccgcgacaccggcgcagacttcggcgcggcgcccgacatcgaccacctcaacacgcgtgtgcagacagagctgtccgactggctcaattggctcaagtccgacgtcggcttcgacggctggcgcctcgacttcgccaagggatactcggcggccgtcgccaagacgtacgtcgacaacaccgacccgtccttcgtcgtcgccgagatatggagcaacatgcgttacgacggcaacggtgagccgtcgtggaaccaggacggtgaccggcaggagctggtgaactgggcgcaggccgtcggtggccctgcgtcagcgttcgacttcacgaccaagggcgagctgcaggcggcggtgcaaggtgagctgtggcggatgaaggacggcaacggcaaggcgccggggatgattggctggctgccagagaaggccgtcaccttcatcgacaaccatgacactggctccacacagaactcatggccgttcccctccgacaaggtcatgcagggctacgcctacatcctcacacaccctggagtaccctgcattgtgagtcctcagctgcatgaatacgaatgccataaagaaaaatctaattttctcaaccagtttctccgactaaattctgtttattgactatgtgtgcagttctacgaccatgtatttgactggaacctgaagcaggagatcagcacattagctgcagtgagatcaagaaatgagattcatcccgggagcaagctgaaaatccttgctgctgagggagacgtctatgtcgccatgatcgatgataaggtcataacaaagattgggacacggtatgacgtgggcaacttaatcccgtcagacttccatgtcgttgctcacggcaacaattactgcatttgggaaaagagcggtctcagagttcctgcagggcggcaccactattaggcgaagaaaatttttcaggactatttggtgcctggaataagatttgaattatatcctaaataaccagattatgattgtatgagatttcttaatctgagcaaagcgttgagcattgctccgatatttctatgtattctacctgcctggggatatgatatttgtatcctctagaagtaaagatgattttaactcagaagtccattgactttactgctacattttaatcagttgcagcactgtgttgatcaaatgcaaacgttcctgacagcagactcatcactaaactttagggaaattaattaacctgcatactagtccagtgcattgtactccccccgtccaaaaaaaagacaaaccctgagtttccgtgtccaactttgactgtccgtcttatatgaaattttttttataattcgtattttcattgttattagatgataaaacatgataaatattttatacatgacttgttttttttaatttttttcataatttttttaaataagacgaacggttaaacattggacaaaaaacagggtttgtctttttttgacggagagagtataccttacgaagcacctgagcactactactgctgatgctgcttgcattgacctaggaccgacggcctgctgctgtgcgtgcactactacttgcttagctatattgggccacagcccaagccagccagaactctcttttcttctttttttttcccccatttttttcatcagacaattctttttgcgcgttacactaacttaattacctcgttgtgaatttaagaacttttcggacaatgcgcggtaacaatttctaagctttgaaccggtgatacggtagtatcatcagataacctcaatggttcaaaatgctacgacgtgtaaaagtacttaacgagttcttgcatactaatctcgaggccacctagcatttagagatcaagtttgatattgtcactgctatattgaactggaccacccatatataggcgttcgttgtacacgatgtcttgcttcgtgcaatggaacctgatatccggcaggttcttactcactccgtactaaaatataagagatttttaatagataatctttattcagatttatagtactagaaaatgttacattgatctatattttgaggagtatgatagaagaaccataataaccattggttccaccatttattttcaagtgggctagcaaaaataggaatcaataggcgagggcttgaccttgaagttaacagagaaaatattcacgcatgctattgtagcagggacatgcaagattgttagtatctgatattttaggtagtatatttatctaaagtagtaggattatgttatcgggatattatgatattttcttttaaaagtttaatttaatatttatattaattatatagagctgatctagattgataataataaataacataaggatagatttgtcaagaagtacctactaatgctaatagttttatttaacattgatttcgaagatatgaacacaaatgcattcatatagttttgatttttgaattcaaataatgtctagttggaaacagttagtatcttgttcctagagtgattctaatgatactacgctatatatcccgatactagtgtgataccagtcgaaaacgatcctagaatacgtattccgatactgacaaccttggaggcagacaacgcacctcctatccgaccaagacatgacctaagtcattggccgacatgtcccgacttaaagctaatacaagtttcctagtaggtgcccaggattaaaccaagttgcccttgttgggaacatttagagcttgcggtagagtggctagtggtacatgaaagatggagatgaagcttggtgcccacgctaactgaaaggaatattctcttagaatatgctaggagccattccaaccactcttacatcataggaaggtgatctgtgctattatactattagggtttacagtcccacaacggcatcaatctaacttcacatgtacttatcataaattaaagacaccagatactgtagcaatatagattacattttatcgaaaatagtgacaatgagagccatttggagcatatcagattcaccttacaactaggataggtaggaaaaccatctccttgtttatccctattttatttgtgacctcttggatcataacattcaccacgtcgcaccacttgacaatttctatttttcaatccgaacttcattatttttccacgtggatccatgttattatacaaatctaattgatggtttctttcattttaggggctgtttaggttgatgccattttcaaccatactatttttttagcatagttgtcaaaaatatgtctatatttagtttgttgtcaaatctattatataattaaaggaatagaaaaagaagcatccacgttcgctctcatggtctaaaaattctcacattaatcggagaaaaagaaaaggcagagtccatatcgaaatacaatttagaaatagctgaaattcggaattaaaaaataaggaatattagaagaggagactatagtccatatagaaatacaatttagaaatagttgaaattcagaattaaaaaataaggaatattagaagaggagactagagtccatatagaaatacaattagaaaataactgaaattcggaattaaaaataaggaatattagaagaggagaccagagtctatatagaaatacaattagtaaataactgaaattcggaattaaaaataaagaatattagaagtagagtatagagtaaatacaattaggaaataatagaaattcggaattaaaaattaaggaatattagaagtagagtatagagtccatatagaaatacaattaagaaaaaaatagaaattcggaattaaaaaataaggaatattagaagtagggtatagagtccatataggaatttaaaactaactaaaatttggcataaacataataaaattaaaagtatatatagtattaaaggaatagaaaaagtagcctccacgttcgctctcatggcctagaaattctcacattaatcggagaaaaataaaaaacaaagtccatattgcgtaaaatttttgaataagacgaatggtcaaacatgtgagaaaaaatcaacggcgtcatctatttaaaaaacagaggtagtacaatttagaaatagctgaaattcagaattaaaaaataaggaatattagaagaggaaactagagtccatatagaaatacaatttagaaatagctgaaattcggaatcaaaaaataaggaatattagaagaggagactagagtccatatagaaatataattaggaaataactgaaattcggaattaaaaataaggaatattacaagtaaagtatagagttcatatagaaatataattaggaaataatagaaatttagaattaaaataagaaatattagaagtagagtatagagtccatatagaaatacatttaagaaaaaaatagaaattctgaactaaaaaataaggaatattagatgtagaatatataatccatataggaatttaaaactaactaaaatttggaataaacataatacaattaaaagtatatatattattaaaggaatagaaaaaggagcctccacgttcgctctcatggcctagaaattctcacattaatcggagaaaaagaaaaaacagagtccatatagaaatataatttagaaatagctaaaattcggaattaaaaaataagaaataatagaagaggagactagagtccatagagaaatacaattaggaaataactgaaattcagaattaaaaataaggaatattagaagtagagtatagagtctatatagaaatacaattagaaaataatagaaattcgaaattaaaaataaggaatattagaagtagagtatagagtccatatagaaatacaattaggaaataatagaaaatcggaattaaaaaataagaaatattagaagtagagtatagagttcatataggaatttaaaactatctaaaatttgcaataaacataataaaattaaagtagagtttagagtccgtataaaaatacaattagcaaataactaaaattcgaaattaagaaaaacatgggaagaagtgtttaaagtcaatatagaaatacaatttagaagtaactgaaattcgaaattaaaaattaaaaaatattgaaagatgagtttagagttcacatagaaatacaattagaaataataaaaaattcagaaataaaaataaataatattggaagaagagcatagagtctatatagaaatacaatttacagaaaattcagaattaaaaaaaataaatattaaaatacgagtctagagtacatatagtaatatatataattacaaataactaaaatttggtattaaaaataattaataactaacacgtatataaaatataatatgaatattacatattagtagttttgtaaagttattgcaaaatttaaaattatgttgccattttaatatttttgaataatataatgagaaaacatatatgctattatatgagagaaaatataataatgctagccgcgcaatatgcgcggggcaccatgctagttttagtaaatacataagaaatcctgtcaaaattttggcaatattgtcatcttgccatattgccaaaatttaataaggtttattttggctacaatctgaacaagcccttaattttcagtgttagtaattttcattaactaattctagcgaggactcttgttttaatcagaattgccatccttgatttatttacttttttatttaattaacatggaatgtacgagccccatcaactggccaagagctgatttgatgccaaaacatggctcattagcgataaaaaataatttataaatgaaaattttatatatgtgtttttaattagtaacttaaaagctaatgctacaaaagaaatacattaaaaatattctaaaatcaactacagaattatgttttgaatcagattttagcagcggttgattttatataggacaaacaatgaggctctaattccaatcagtaaagctagccgaatggcattcccttgaaaaagaaaacaatgaggctctaattctaggaagtgtccggcaaaagtacgtgtacaacaaggataattaaattcatgatggatggatgaattgtataatgtaatttggataccaaagaagaaaactagcaaacataggaaataaagaaaaaacattaattgcgaaacaaaattcgaattggttttagctagctgcccttaggtggatgtgcgccaacagagacgatcgcatgaaggaaggctgcagcctggaacagcctcgcctcctccagggaacgggaacgggaagaacaaaaggaagctttacctggagcccacaacgctatccaaggctttatctaacttcctattggcctcctttttatcctcttttaaatgagcgcaactcgtcgccgccgtgccgttgcgtttctcgttaggagcaactgaacttatccaacgaattgaacaatcaattcacccggagaggtacgtctgcatgccgggctgcacctataaattcccatgcaccagcattccccatccacacaactcagcttgtatctgagacacgcaatggcaaagcattccaccacaatgagctgcctcctattcttcgtcttgctctgtttgggctctcacttagcccaggctcaggttctctttcaggtgagtctcattgatcatttgatctgctgtacttcccgttagtatgtcacatgacaataggaaatagttcctagctatgaacaaatttgacgtacctgcacgttgacatgatgttggtgcagggattcaactgggagtcatggaagaagcagggtgggtggtacaacttcctccatagccacgtcgacgacatcgccgcgaccggagtcacacacgtctggctcccgccgccgtcgcactccgtcgcgccacagggatacatgccgggacggctctacgacctggacgcgtccaagtacgggacgggggcagagctcaggtcgctgatcgccgccttccacagcaagagcatcaagtgcgtcgccgacatcgtcatcaaccaccggtgcgcggattacaaggatagccgtggcatctactgcatcttcgagggtggcacgccggacagccgcctcgactggggtcccgacatgatctgcagcgacgacacgcagtactccaacggccgcggtcaccgcgatactggcgcagacttcggcgcggcgcccgacatcgaccacctcaacacgcgtgtgcagacagagctctccgactggctcaactggctcaagtccgacgtcggcttcgacggctggcgcctcgacttcgccaagggatactcggcgaccgtcgccaagacgtacgtggacaacaccgacccgtccttcgtcgtcgccgagatatggagcaacatgcgttacgacggcaacggtgagccgtcgtggaaccaggacggtgaccggcaggagttggtgaactgggcgcaggccgtcggtggccctgcatcggcgttcgacttcacgaccaagggcgagctgcaggcagcggtgcaaggtgagctgtggcggatgaaggatggcaacggcaaggcgccggggatgattggctggctgccggagaaggctgtcaccttcatcgacaatcatgacactggctccacacagaactcatggccgttcccctccgacaaggtcatgcagggctacgcctacatcctcacacaccctggagtaccctgcattgtgagtgctcagcttgataatctccatcgctatcagaaatcgatatttgttaaccataatctcgaactaacattccgtctgtctgtacagttctacgaccatgtgtttgactggaacttgaagcaggagatcagcacattggccgcggtgaggtcaagaaatggaattcatcctgggagcaagctgaacatccttgctgctgacggagatgtctacgtcgccatgatcgatgacaaggtgatcacaaagattgggactcggtatgatgtgggcaacttgatcccgtcagacttccatgtcgttgctcacggcaacaattactgcgtctgggaaaagagtggtcttagagttccagcagggcggcgccactaggccaaatatttctttcaggactattttgtgcctgaaataagaagtttaaatgatgtcttaaataacaagaaagtgattgattgattgtatgacagacaaatatttttgtcaggactattttatgcttggaaaagaaatttaaatgatatcctaaatacctggaatatgatagtatgccatttcattcaaacaaattattaaaatttgctctgaccgtctgacgtgtcaagggttcaatgtggagtattattcttgcctcagccctcaggacttttgccccactagctgtgaagtgattttttttttgtttaaattcgcttggtgttagtagtttaccacaacaatctggaaattaccttacctcagcgcagtatgaaaatgtttgtcttctatctatactcttctaaatgaaggcaattgtggtggtggtggtgaaaactcaaaaatattagcagaaaacaacatgttcatcatactgcagatggagcaattgaataatgggtgcgttttctactctaattccatggatcacagtgaaaatagttgggattgactgcacatagcaaaaccgacaaaaatcgcttatcagatcgagagggaaatctgtccaagcgagttgcaaattccttaccgaaccgaaggaagaatcaccgaatcggcccggatggagatctccgctccgcgccgccgccgaaccagtagaggggagaggacggaggagaggagaggacttcgacgcggcgtgcttcggcgccgccggagaagatcgacggtatggcacctagcggcggcggcgccgcggaaaggggattcgtcgccgcggccgaggagagggcaatctggtaattagcgcgagttgacatctccaagagtccagaaacgccgcttcggccttcggataagccacgtcatcaaacaacctgacccggtttgaccttttccggtagactattctacccttggtttgctgccgctgcctctgctggctgctggcgcctccccgctgacctcacgccttaagtcagcatccacacgtcacctcggccccacggcacagcacacactgcccaaatcccctcgacaccacacgttttccacagggctaagcctgaaagaggaaagatcaacgacgacgtggagcatgtcctggcgccgttctgtcgccgtgttactttcgatgttggtctccccctatataagtgcacccgctctcccggcttcagctaacgacctcaagcacactactagctccggctcacttagctccctactgatcactggaacactcatgaccaagaaggtgataccggccatggcggcggcgaggcaggattcttgcaagaccaagcttgatgagcgtgggggtagtcatcaggctccgagctccgcgcggtggatctcgtccgagcaggagcacagcatcatcgtcgcggctctgcggtacgtggtgtccgggtgcaccacgccgccgccggagatcgtcacggtggcgtgcggggaggcgtgtgctctgtgcggcatcgacggctgtctcgggtgcgacttctttggggccgaggcggcggggaacgaggaggcggtaatggcgacggattatgctgctgctgctgctgcggccgcggtggcaggaggatcaggcgggaagagggttaggcggaggaggaagaagaacgtgtaccgcggcgtgcggcatcggccgtgggggaagtgggcagcggagatacgcgacccgcgccgcgcggtgcgcaagtggctcgggacgttcgacaccgccgaggaggccgccagggcgtacgaccgcgccgccctcgagttccgcggcgcgcgcgcgaagctcaacttcccgtgctccgagcctttgcccatgcccagccaaagaaacggcaatggcggcgatgctgtcacggcggcgacgacaacggcagagcagatgactccgactctgtcgccgtgcagcgcggatgccgaggagacgacgacgccggtggattggcagatgggcgcggacgaagccggcagcaaccagctctgggatggcttgcaggacctgatgaagctggatgaagcggacacctggttcccgccattttccggtgcagcgtctagtttttgagctagtgttattagatctcaaccgttggattagattactggaaggccattcatttattcgtttcattgtatagctaattagctatacttcattgtttgtgcagagcacgttttttaggagtaccgtcttatacatatttttttgtacagagtagaaagtaacaagaattttgtatattgatggaatagattatttccaattaatatttgcgcaaaatgtctgcgatgacttgaagctgagttaatttgcaaacgatgcaacggtggaagcagttacacatgcgttccagtgagtctccacgcgagttaataacttaggcgtgtacgtattttgacaagtcgtgactcgggagggtgaatccgcttttcacctgactagtcaacgtcacatcgagaggtggtggaactcagctagttttcgctcgtggaacagcaccgtacgagggaaatcacccgtggcgacggcgatgtggaaaacagcaggcgagcaagcacccagcacactgcacacgggtacacgacggtcaactcgtttccgaggaccaagcgagagcgggagaagagaagcagcttgatagtttacagaagcagcttgattagtttactcgccacggccaagtggcccaactgcctttcccactgtgatcgcaacgtgccaccagccgcccaccacgcagcgtcgcgagccgtctagggatggcaaaccggccgcggtcaccgtcgcggctaagccgtagcgcgcgagacgggtgggtttccgcgacgccgcgcggtggattctggagagaagcgcccgcgatgccgtgatagccacggaggcgcggacggtgaaccgcggctccagctgagtgttttgatgggactcgtttcgtaagccaaaactgggagcggggcgctgctttctcgctcgctgcgcgccgcctggtggcctggggaccaccagccccatccgtatccgtgggcaaaagacgtttttgtctcattgtgtgccctaaaattgatcttttatcacaatccgtctttaggccactggagtttcattcgggctcattcggaatgaagcaaatgtgaaggaaaacaatggaggattgatgatttctttgaattagctaccgtagttgcattcgttttaaaagattggctacccgattgtcacaggaatactattcgctacctatgcacgaagaataagaaattcttatgttattcaatcatgtgtttcacacatacaatcctatcatatttctgtgatttctatttctacatttttttctatcctgcattccaaataagcattaaataaggtgtcatgtcagtgtttctgataatgttgcaacaaattaataaagtgagagatgaaatgggttttaactagacgaaatcttgtctacactgtttttaatatactccagtttgtatcttgcatatactacccatgaaacaacaaacatgaaactatgcattatgtgagctatttcaatcatcaattaaataccttattacttatgtggtatcttggaaacataaaaatgatatctctaattaggaatagccttagatccgatcttatttgcttccattccatcttgattccttaatgaccacccctatatgcccatagtttcatgtcatctagattccctaaggcataggctaggaaaagggatcgaatgcaatgttctttgactcaggaacgtcgtccccatcccagcaacaaggagacattttcatccgtaaaatcttgcaatacgttcatcattcttgttctcttgaccccatctacccgagaactttgtgactatgacgactattaattgaaacaatgatacctccataccaccaaatcaagcaacaaatattgtattagtaatcgctcttgtttgctattgggcatgtgttgtttgtttggtgctatggcttttgtaaacacaaggttaaaattaggccaaacaagtccctgcttttgcggaatagcactactccgcgtcctaattatagttatagtttttatctttggtggacttggtggtctccctgcatatggacgtcgtattgcgttcctaccgttcccccccccccaatctcttctcgtaactttgatctctcttattgatgaactcttgaagggaacggaaatcgaaaatccaagaggtattgtaactttatatgtggctattttctacaacttgttagccaatttctttgctagttgtagtatgtttttacgcctatcatgtatttgatttgcatagaagctgtttatgtctatctgtgtaggtatatcacaaacgaaaactacattttcttcaattaagtggagtcattttttatcttcatgagaagtacaaaagtgaccaaggatcacgtgaaattaattatcttaatatgaataggaagtgcaaggaagattgcgacatggtagaggcctattattcatgtgctaaccttagcatagttgcatgttatatacttttcctgataaaacatatctctcaaccaaataaagattcatggaatgcttttactctattcggtaactatcttcgtctatattacaatgtgttgtgttgttctgtaaagatttctatagatgctttatatttatccatgttattaattattatgtacatgcaaaaactacattgcacaaatttagaccataatcttcatatgttttactagcatgctaatttgtatgactccaatatttagaaaaaaatcatgacctacatttgttttatccatggagatgagaataggttatgtcatacttcgataatttgatcaatatggtgattaaatttcccttcctgctatattgtaagtcatttgaaaagggttaatcaatcttatgtgatatatgtgtgtcacgatttttccttcttactagcatataataaccttttcaggtgccccttactaattctatccatcataatcatttgaataattatttggtattctcctgcatcctaggagatggagggcttgaatattgaagggattccccaagtgcctattgatccaaactctgttgatgtattgtcaagctcaaatattgatccaaactctgttgatatattgtcaagctcaaatattgatccaaactctgttgacatattgtcaagctcaaatattgatccaaactccgttaatgtattgtcaagctcaaatattgatccaaactctgttgacatattgtcaagctcaaatattgatccaaactctattgatgtattgtcaagctcaaatgaatcaaagcctactatttcatttgatttgccatcaagtttctcggttggtcatactagacattcaagtgaagatttaagttcccttacaattaataatttacgcataaatcatagagaggacaattaccaaagccagtttgaagagaagcggatacatagccatggtcacacaagacgttttagtgaagatttaagttctttgaagattaatgatctatgtgcaaataaggaagaggagaattatgacaaccagcttgagaggaaggaaatatatcgccataactcagctggaaacattttcagggctgcagagattgctgaacgcttcattcaaaccattgataagagagtcctggtcgacacagcagcaccaattgaatccgttaaagatgctgttagcaaatttggagggatacttgattggaaagaggtagttttttaatccttctttatccatcttactgtcttgttttgatgaagggaatgcataaattcgattataactattctttcgtagagacggaaacatgtccaagttgagcttgacaagatgcaggaagatgctcctgagtacaagagaagagtggaagtcacagaagttgagaaaagcaaagttcttgaggagctatattgtactagacgaactatagaacgactaaaaatagacctagacaaatcccatactgagacaattcaagcacaacaagacttagagcttgctgagattcggtttgaagagatgcaacaaggcattgcccgcaaagagagatctataacaaaggcaaagattgaggttgccaatgaacgacgtgcaacggccttagaagacttgcagtcagtgaagatggagctagatcaacttcaaaaagaatacacatctctaatttctcaaagggataacactgaaacaaaagcacgtaaggccattgttgcatcacaagaaattgaaaaggttgttcaggatctcaccattaaggttatcacaatgaaagatttgataaccacctcacaagctaaccatgttatagctgaggggaaaaaaataaatgcagctttggcttatcaacaggacatggtgaattggcagaatgagctaaaacagattgatgacgaggttcaaaagctcaatgatgacctatcactcaataaagaccttgagtcaaagctacaaactgcttcaatgtggctgatgaatctaagggacgagtttaaggctcacgtggatggtacattgcctaaagtgccatctgaggctagagaggaagagcggccaatgataattgtttgtgcgaagctagcacgaactaggaaggagcttgaaaatatgaggatagacattgataaggccaaggatgatgtgaagtctttgtggaatgctgctgctacattacaagctaatgtagagatggagaaaacaaacattgcatcattaaggcaaaaagagaatcttgcattgaatctgctttagctcttcaagaagaattgagcaagattgcttttgagctcagcatggtggaagagagaacaaaagcagcaaaaatgcctttagaactacagcaagcaactaaaaagttggaacatgcaaagttgaatgctgtatttgctaggaatgagatggaaaaagctagagaagaggcagatcaagcccaggcagaggtaaatgttgttcaattgagaatagaagcaacattgagggagatacttgcagttaatgcatcaagagaaattgcagtggcatcagcaaatgcactacaagactataaacaggaaatagaactagaaccactagctaatcgaaaaaacaacaatgtcacattgtcacttgaagagtacaatgtattgtgcaagaaagtgcaagatgccgaggactctgctaagaagcaagttattagagctatagagaagatcaagaaagcaaaggatgcagaggtgaggagtttggataggttagatcaactgatcaagcaaattgatgataggagggttgcactgagagaggctcatgagaaagccaatgtagcatgtgatggaaaattagcaatggagaatgaactaagaaaaaggagagcccatcatgagaaacaacgaaatactggtgaggtatctcttcctattgctcaaatctccaatgtaaagaacacatcaacctcttttgacgcagtaggatcatctaactccaatccttataagtatcgaatgttgctacctagagctgacactatagcaactacaatagctgagtcaaggccacggaagtctttcttcccacggtccttagtggcaatgttcatgtttaggagaaagacacatttgaagtgataactcttctccttgctagcttgcctatttatttttgtttgtttttgtacatgtaccttcaaagtgtcgacgtttagggtgggttgtaattacttatcgaaaatatataaaattaagccagaggtatttgttgttcttgtaccactttcaatctattatatactaaaagtttattaaacttcctataaacgctcctaaatcgaccgtgacactctaagaaaatcctaaaaaatctgataaaaacaaaaatatctagccattgatttacacttaaatcggtggaacaattattttaaccattagatttgatactaaaaataaataattcaacaaccggtggacccattatatctattaaaagaataactctgctcccctctttctgtaccgtgattacggcggtgtatggagtacaatgatcttgttcgccatatgaggaccgatcgtgtagctctcgatagagtgttaatttggttgcctgcgattggtttcgatttgtcgtcttgacgattggatgctgatgacgctatgcatcgaaacgctcgagcagcaatcggagaagaattagccgctttgagaagaatggcaaatataatacaagatcaattagcaaaacaataacagataatgctgcctatgcttacggtctatgttgacaatattctaatcagcaacaaaattcacgactgcgcatcatcaacagattaatacactaccacaatcaaggactgcatgattgagagattattactagctcccacctttttatattacaagacgctttgatttattttttgaatggagatagagtagattatcacaccaacaaaattaaggattgtgcatgatccacagattaatacacagataaattaatgttggaatcaaaacaaaaatcttaaaaaggagtcaaacaccacatcacagatttatttaattcactcctctattttctaactaataacaatcttagaaattttgaggaaaaaacatctggccgtagatttatgcctaaatcagtgggtatattattttaaccattagggcaatgtctgacacagctctagattctaaatacaatgtttgaagtttatatgttaaattatagtggtttaaaattttaaatttcatctaaaatagaaacaaaatgaattatccaaatgttatcaatgtaaacacatagatctatggatctatggacctagaaatacaaaactttaataaatcttagatccggagctgtgtcaaaaacaaacaactcaaattggtgatcccattggatctatgtaaagaaaacaaaccgtcttccactctccctccccctccagctgtacatttgtatgtctccctccgcactactcacccctcgtctcctcctcatctcctcccatttaattcacccctcttattttgaactaacgacataataataaagtaatttatagttacatagctaaaatataagttatggctgatttttaatttgtttgaactcttttacaattggatagctaaataactcaacatttaaattacttatagaaaaattcaaataagttggttgaacatagacccctattcttttgcatggtaaccaaacaacattctatttttaatttgtttgtagtattgttttatttataatcatataaataattgaaaatccatattatttcattttattatataaaaattaaaatgtcatttgaacatagcccctatctttgcacgataaccaaataacaataaagcattgaaaataatgatagtaagtattatgacatcttaaattattctacttaataaagaaccattaaatgtcctctagagttcttttaagccttggcgtgtcaatgtttaaaaactagaaaaaatcttcgaaattcaatgaaaaaaaagtaaaatatttgatcattggtttgtgcaggcaatgcgagagattagtaattttacggaccgattgctcagcatgtgtggaaggactttctactccatgtatggatcagtcttgcagttatggccaagtcatgctaaagaccgtataagtcttgcatttacactattttaaaccactaaatctacttttaggaaaacctcaagcagtcgcatgccactttttaaaagttagcaacatcttagaaatcttggaaaaaaaacatccgatcatcatcagtttcaccgaaattgtttagaaaagaacaattttacggttcttgaggaggtaccatgaggtaccactttttctattataaatttggtacctcttggtacctaggtaccatgaggtaccaaattttacactaaatttttgatacctcatggtatctactcaagtaccgtagaattactctttagaaaaactagaaaatcaaaagattttccacggtctttcaataattttatgaaatacaacgtaattatgacaattgaattggcattgcaggctttaaataataaatatataatatacatgtacttaattcatgacaactgcaggctagcttaaaaaatgtaaagtgtttggttatgagtacataatttctagcattaaactataaaatgtatagaaagatattaaaattatggaagcaactataatacatcacataataaaaaaatgatgaagaaatcatactttttcagatgcaaccaataatgcatatgcccgcgtgaatgcgcgggctacctttctagttaatttaattgcattttgccaattctctaacttaaactctgagagtgagagccatgttgtggaacttcttgaggtgttgtgtcatcattaaattgacaaatttccatctttaagtgggcatacgttgtttcacttattgtttgccaaaagacagggctttggtaccttcttgaagacaaccaattgcatggagtggtctagtgctgacaggatgcaaatcatttgaaacattccccatctcaaatcacatgacatctttcaactggaaggccatattacatttgcctccatctaagtcaatacatcttgtaattattctacagttttttcttctttcaactgatcaattgatcattgaagcttgtcttttccacccatctgattaagtacatcaaaattaactagtcatacaattttagaccatcaccgacatcctcgcaatgcctgacatgccttagaacggcaccaaggtccccatccttcttggccctgcagtcatagctcggtggagcatggaagcacggctccatcgacgttgtctggatgcagggcgggttagccgacgctgtccgattcgtgggcgttagcaacagccagggctttaccccggcgaggccatggccgacgtacccaaccgtcgaccgcccgctgaccaccgacacgtcgcagtagctctggaggaacatctccaccagcgccttctggttgggtgcctgcttaccggcgccggccggctgcagcacgctgacaggctcgccggtcaccgtcgcgtgctcgtagtacatcgccttcagcttctcggcgtactccgacggctgcgccgagctgacgagcacggccttcgacgccgtggtggctagcgccgcctcgttagcgctcgacgtcgcgtttgggtcgatctccggcagaatcttctcctgactcgtgcaagcgacgatctgcttgaagtactcctccgacgacaccttgctcccggcgaaggtcgtgatctgaatgccaatattttcttcaaacttggccatgtacgacgtgtggtacctcgtgatgagctcccacaccttgttggaagggtggaacaggtacctcccgatatggtggaacaccgtgtccctcgccgggaacatccaccggagctcgtcctcgaactgcggcaccaggaacagccccggcgtgaagtagagattggagcgcagtatcagccagttcaccttcgccagcacggtctggtcgtcgtcgcagaagaagagctggtccgactgctggtagtcgtgctccagatggacgtacgcgtacgacggcagcgactcggaccgcacgccggcggggtcgtcggtcttgatcttcttagcaccgagcaggttcgcgtagctgtgctcgctgccgcggccgagctgcgtcaggttgtggacgaggaaacccgcggggagctcccacgatgcggccgggaagggctcgcagaagagtccggccatgtcgtcggtgacgtgcaccacgaacacgcggtgggtgaggagcgcgtagaggaaggcggacgccatggagagcatgcggtcgccgaggtggctgccgccgcacggcgtccagacgaggtaggtgcactcgacgaggcccatgctgtaggcggaggtgagctgcatcagggacttcttgtagaagagcgtgccgggcccgcacttgcggtggagcgcctcgtacttgcgcagccgggagacgaggtacggcgacggcgagtgcggcgacggcttgcggtggagcgacgacttgtaccggctcaggcacgcgctctcgccgatgtccggcgagagcagcccgccgaggagcctgtcccggttcgccggggaggattccggcggcgtccctgctggatcctctgcattgaccaagaaaccagtgaactaatcgcgtagtgacgtcacaggaagatcaacgttgagtgctgctgctcaccgtcgtggacggtcaccgtgacgcccatctgcgacacgtcggacaaggtcggccgcgctcgtgacagcgcgaggaagagcgggagagcggcgaagcagaggacgacgagcagcgcgacgggccacacgccgctcgtcttggacggcaaaggcggcggccggcggtgcggccgcgtcggcttactgtccattttaatcaaccctccacttcgtctccgccgtgaaagattttgcagcttcggtgcacgagctgggcagagatcagattgactccaatgcagatgcagccgatctgctactgctggggtttgcacttggcgagttgaccacttgggctctcacctttttgccgctcgaagtaatggccttgcgtaagatgcaaacttccattgttgactcgcctaattgatctcggtccaaagacggtgaataatctaacccaactaagcaacaagaacagcccaggtaagttcacttacggcccataactcaaattcgtttgacttaggtgactcgcttaatggatctcggcccaacgcatttcagcctttctgttcaggactgcatagcctgaaggaaatccaggcccttcatagtaggtacaagtacaactcggcctcttaatttcaggcctaatatcgcaaattcgcaatatttatgttctaccagcaaaaatgtctttgcattctaacaggtaaaaataatttttacgattggcataaaccatgtcaatttaaaccacaaatcgaaacaagacaaacaaaacaatagcaaaacaaaatcagaaatcatatagcatgaaacccgattacgcgcgcttcaaaatatataaactaggattgaatcagatacaagaatctgactaggattatatataagggaggaattttaagatgcacttggttttaactccaaggttttatgttaaatttttaacacatttataatttcttcttgaaaaagagttttgaggaatgtccctctgggcattaaaaaaaaaagggatgtccctccctccaaatcttttttttatatataagggaggaattttcaggcagatcatgtcaaatgcgccgttcagctggggaccgctgattacgacgggatcaggtccggtaccaatcattgccatgttgaacaaaatttccgtgtacagcgtggcagagacacggatcaaactccagctagtttttttttttccccgagagaaaagagagctaagtctgccacgaactgactaatggcagcaaacgttgatccaagcacgtcccacgaccgtgaacatatatatcatatactcctctgtcccataatataagtgattttgagtttttacttataacgtttgaccactcgtcttattcaaaaaattttaaaattattatttattttatttgtgacttattttattatctacagtacttcaagtacaacttttcgttttttatatttagaaaaaaaattgaataagacgaatggtcaaatgttacataaaaaaactcaaaatagggagtgagtatacaccaaccatctagaacaataaaaaaactctgcaaagattcagctagatcagggcatgcaagcaaggcacaaacatccaccacgtccacgcccctacggagagcacgagacgcaacgaatagatcccagcctgactcggtcactcccgtatccaaacgctttccacccaagcagcgcaaaatggcacctcaacctgcattggtactgagtagtaccaccgactaaaagaacgttattataaggcaaaatttgctacagacatccaaaaaaacatgtaattagctggaggacatcgtaaaaacgtgaatttactatagggcatcataaaaaactggtaattgactgctggacactcgcagcattattttattatttttggaggaaaaggagagagagacaatgattaaagacaagtttacccttggctcaaatgactccaatgcagttcccacagagaagtctcctctccctctccttcttcccagacgggccgagtggcggttatgcgagctcacagagacggcatcaaggaaagaagcacggcaggccaggttcctccccgatttttcgatgcgaattgagttgatctgactccgtgcggcatggccattcgcgacatcacccgctgcaggagcgcgccggagaggagggagagcgtgtggagggctgcgatggagttggaagttgcagttggaggtagggcggcgtcggagtggtgatgtgaggcctcgctgatccggcgccggtgcggtgtaccagacgtcggcttgcagctgccgccacgctaggctaacccatgcccgacgcctgtgctactgcgcccggctgtcgtgccgcaccgccccgcgccagtcgcctcccgctcaaaagaaaaaaattcaaagggtagaaccgtatttacacaactgttctctctccttttcctctaaaaaataataaaataatattgtgggtgtccagcagccaattaccagttttttacgatgccctatagcaaattcacgtttttacggtgtcctccaactaattatacgttttttgatgtcctgtagcaaattttgtcttattataaagaggttttttactgtccttgaggttgtgcagtaccaaatcctgactgttgatctggcatcatccaacggtggtacagcacctcctcattgaagcggtaccgtgggtgaaagggtacttctgtactttcgcgtgggcatctctttctttcgcgttcggcttccttccctgtttcacgagagaaaaaaatcgttggggaagagcagcgagagatggcggcaagaggcaggggcagcgagagattgcggcgacggcgagggcctcgatgtgcaacggcagcggcgcggcggcctcgatgcgcctcgatatgcgacggcagcggcatggcggcctcgatgcgcgatggcggcggcagcggcggcctctcttttcctcctttctgctgtgaattttgttgacggcggcggcaacgacggcctgtctcttcctcctttctgctgtgaattttgttgttggatttgctgaaccaaatgtaaatggctaaatggttgattaccagcttactcttgaattgcaagtttcgtattgatgaactaaaataacaaggttcagaaattggatctgctgtaaatagtatcgattcatgagaaagtctcgtgtactttgagttacgcattgtttttttcctcctgaatccttcctctattcatattaaagttacaaactcaaattgggaatctcctcctggtatttctctgttcagattaaagcagcaaactcaaattgggtgcctccgagcaaggcaggctcgatgcacgatggcagcggcacggcggcctcgatgcgcgacggcatcagcaggctcgatgcacgacggcggcaacagcctcgatgcgtgacggcagcgtggcggcctcgatgcgcgacggtggcggcggcgcggcggcctcgatgcacgacggcggcaacaacctcgatgcgagacggcggcgcgatggcctcgatgggcgacggcggcagatggaagagaggagacctcatttttgttagcccgatcatacccctgttaaaccaacggttagattagattggtacctcgtgatacctctttaaggatgggaaaaatgctctattataaaagatgcttgtttcatctcaaatcataggttaatcattgtgtcatgtactgcaagcctccaaatttgcaatgcagctcccttgtcttagaagaggtcatgcatatgtaatctatacatgtgtgccaccaagagctgatgagtagtagaaaattcatagagaaaaataatgaacttctgaagaaactgccacccaaacaaaacaaagcagaagtctcaactctcaagccggcaacgagccaacgaccatctcattgcggttgcaccttcctcctcctccaatgatccccctctccctcctcgccgtcgtcctcgtcttcggcatcgccggcgccgccgatggcctttcaggtgatgaacgcttttgccctcggtgagttcacaacgtgcaatgtgcttgggcagttgatgaacattgtccgcgtttgtacacagggtaccagataagttgcggtgcgacgtcggagaaggtggtcggcgacgtgacatgggttcccgacggccggttcgtcagcgtcggcaacgtctccgacgtgcggtcgccgggggtgctgccggtgctctcctcgctccggtacttccccgacacgtcggcgaggaagtactgctacgtggtgcccgcggagaggaagaggaagtacctcgtccgtacgacgtacttctacggcgggttcgacggcggcagcgcgccgccggtgttcgaccagatcatcgagggcacgcggtggagcgaggtggacacggcgggggactacgccaggggcctcgccacgtactatgaggccgtcgtgctcgccaccgagaaggaggtcagcgtgtgcctcgccaggaacgccgccaccaagtccagccccttcatctccgcgcttgaggtgtcgccattggaggactcggtgtacaactccaccgacttcgagtcctacgctctcagcaccattgcgcgccacagcttcggccacgacggctcagcggccgtcaggtaagaacaatcacgcaccaccgcccatttccttgctacgaattcatggcgtgcttgccgcttgatgctcgtcgaatctgtgattttttttttctagctatccaggcgatcgtttcaaccggttctgggaggcgcacagcgacgggatgccggtggtggagagccaggcgagcgtgtcgcaggcggcgttctggaacaagccaccggaggacgtgttccgccgaggcgtcacgacggccggcggccgcggcgagagcctggagctccagtggccgccggcgccgctccccgccgcgagctactacctggcgctctacttccaggacaaccgcgcgccgggcccgctcagctggagagtgttcgacgtcgccgtcaacggcgagacgttcttcgccggcctgaacgtgtcgacggccgggtcgatgctctacggcgacaagtggccgctctccgggcggacaaagatcacgctgacgcctgcgccaggctcgccggtcgggccggtgatcaacgccgccgagctgatgatggttgtgccactcggagggaggacacatcccagagatggtaacttgacaaaatctcatggatcatgccgaattcgtggtttgctcatcgaaatttattcatgtctcattgtctcgtgttgctgcagtgatcggcatgcaggcgctagccagaggtttcgacaacccaccggctgactgggccggcgatccatgtttgcctcaggggaactcatggactggtgtcacctgcacccaagaaccacttgctcgagtggtttctctgtaagttactgattgccatatgtactatatgcatcaatgcctgcaaaaggggcagtatgttctcttgttgatctctgaaaccgaaatggtggcaatcacacggcaggaatctcacgaattttaaagttgggggatcaatatctgacggcattgccaacctgacagcgatctcaagcatgtaagcctccttaaacaagctaatgccagactcccattctttaattgtcctgctgacagattggaaaaagattgcagtggtaaagtaaatattgattgcctaatttgggtacggtgattgcagttggcttgtgggaaacaatctgaccggaccaattccagatatgagcctcctacatcatttggtttctctgtaagcacagtagctacatactgctcaataattgttttggagaatgcttcagtaaactgaagatcacctggctaaatttcttaactgaaggcatctggagaacaaccgactgacagggcagattcctccatctctagggagcatgccaaggcttcgtgaattgtaagtggcttcaacaagtagtttatactagtcaagtatttgagttcatcgacttgttatgaccgcttgagttttttgcttgacaggtttgtgcagaacaatgcactgcaaggggcgattccgatcagcttcaagaacaaaacgggcttcatgttccagtgagtgatcacgagtgctgtatttaagcttgtgattccttatttttctttagtgactgatgaaatgaaaataatcttgctctgacagatatgcacctgggaataaccttagctaacacaaattcaacgagtataagcttgttcaggttgagatcatccggtgttcatgagatgaagaaaagagacattaaccgttgacgacacgctggaacacattaattaaacaccattttttcccttttattttgtttctttttgccgttcgattctatccgtatttttgttcctcctttcctttctttttggcaaacatgaggtgatcctgaatgtatttaaccctgcaactgtgtggtacctgattcaatttatttgtatgtatatttttaattactactaccttcattgtcaaatagatgccgtcccagtcagacagaaaatttgcatgattaattaacgaagaaatgtcagaattttccatcagaatgatattggtaaattttttcatgaaaatcatttcatataattattcttttaatagcaaaacatgtagttagaaaaaaaagatgaaacatgtgtaacgaaaatgatgtcgatgtctaaacgacaagtactttgaaaatgagagttgtctttctatcctcttctttacacgtcaatgcctgctactgcaccaacaataccagagaggatctgcatttatttacgtgcacaaccaccaacccgataaaattatagaaactaagtaatagaaaaaatttatgctcgaccccatgctccaaacccaatcacatggacccattaaaaagtccacattctattccattttcagtcgcataggtctataaataaaatttaatctctatacactttaatcttcgttgcaatgtatgggtatctctatctggaaaaacagtgagttcgaaaactgaatattttagttcctcactagcctttgtagcaaaaaaatgcattaaattgcggatcctacaaaccggcccagaacagttgggcagcccacgaagtcaccaactgacagcccagcccattaacgcctccaatatcaagatatctcccaatttccttttttttttctttattattatctgtagattccggcacatccttcgtcgcgctcgtcgccacatcgcttgcttccccgtcactcccactatttcccactcgtcgccggcggcgagcgagcgagcgatgatctccgcgtcccggacgcaaaccccgctcccatctccatgactcccgcgaaccccaccccgctcctctcctccccacgccccaacccttccctccccctcccccgccgcgcccggcgcccccacccgccgccggcggccaacaccaccggcgcggcctccacgccggactggttccggcctagggcgccgcccgacgcggacccgtcgacatccggcggccgcgtcgccgcccgggatcccggggtgcgcgtcagggccagggagggcgcggaggaggagaagaaggggaggggaagggggaggaggagatggtgggactggtggtccggggacagggagagctacctcgtcgacgacgtggagccgctgccgctgccgttgaccgttccggacaccgagccgatgtcccgcgaggagctcgaccgccgcctcagctgcgacgtggagatcgaggtgggtgcggttgcggtgggatcctaagagtttttcacttctttggtgattcggagggaaaatttggtgacgatttcggagtatgtgtttgtgtggatttgggtttgaaggattgcaagactgtctcctacgagtggacgggcaagtgccggagttgccaggggacagggctggtgagctatttcaggaagaaggggagggagaccatctgcaaatgcgtgccatgcgctggcattggtgagatcccttgctcgcattcccagtatcgatcgaattgctctcatttgtaggtgatcggaaatagggaatggggatattacatgtatccagatcttcttgctaggaattgctattgtgaactggaaagggtgtaggttgccttcagtttaggggtggcacttggttatcattagatacagtgtagttttgatgagttctttagtttagacagataatttaccattcagccttggtctgcagttaggatgttataaaatgatttgcattagtatgtactgaacatttcatgtcaaacctgtaagtgcagcttttgcccccttttattcaaagaaggctgcaaataccactgatagtactaaatatccagtaaatattgtgcacataacccttggtgctaaaaccttgcacagaaaaggagattttgctcagagatgccatttctctttattgctcttcctattgttgttaagttgagcaattagtctcgattagtcggtgattgtcagcccacacgaccagaagcccacaactcaaacaaatataaagtcgcatgactagctcgacttatcagcgactttcagtgattagttggtgctcagatcgatgtgaaagcatgaacatgatagcactcctgctccacctcatgtagtgcctataataattaatagcctgccatgtaggatcaaacctaatgtggcaagagagttaacgaagtgtgtgagagagaatccatgtcttgcatgagacactacccaaggcaaataaaccaacacatcaagaaacaaacaaaatagcattaggggttgaggtagtgtctgtggcacaaaacgagaggcaaatcaacaaataagagggagagacgatgagagtaatttactatttgcattgatctcacacatagaaactatgcattggacaaatagtattttatagcagtgtccatatggcatgaagtggcatagatgtctagcattaggaatgccttgacagctgaatccaaattaagcatgctaattgcagatgctagcaacaatgatgaaagtttattttaacaatcaaggatagtaaatcaaatatcttgtgtggaatgaactactgataaaattgtatacagtgcctcagttatgtagctcctgaaatgctgcagatgaataatgggataacggaacctagaattcaatgctttagaaatgttcaggaatagctgaaaaagagtgttgtttactgttggaatgttttcctctatgctactgagttcagttacctgagcttttctaagtacattggaactgatctaatatgactaaaattgccatgatatgctaccgaagtcaacagtaaagatatgatactatcatcgaacaaaataatccctgaaaaaatctaataacaagcaacgctagttcttcaatctgacctgatagataatacccctgatagaaattggcatagcatgtgcaggtacgtgtgtgttgggcacttaacgttattcctttgtccaacagatgagaactagatatttagatagttagctgctgccaaaatttccaggacttttgacatggaaaagtaaatagatttagatnnnnnnnnnnnnnnnnnnnnnnnnggatttctgccatagtaaagtaagtagcttgagacaattagatattccaatcgagctcgtgagattaacttttgttgataactgagatctttctaaataccatgctaatttattttgattcctttctactgccttaactcttcattactcctggcaaacttttacctgttgatttgctgttatgacacttggatgggtgttctacttattctgtaggttatgttcggaaaatcacatttcgccaggacattgaaaacatggatgagttagacaatgggaaaccaccatagtttgatggccctgttcgcttggcagctgtcatttattaactgctgctggatagattgtgttcacaacttggacgatttaaccagtgattctttctgttacagtcaggcacggtacatgatgaggtgccatttttaagtgttgtaaaccattatctgctaataattgtactcctttgttcttatcattatagttgataaagaaaaggaaagaaattatttcaagtcagctttggttctgttctacacttctacatctctttctctttccttatcccaagcggctatactagattcttactttgcatgttgtctggcccatcttttgcccttctttctggtttgaggtagcctattctgcaagttctggaggaatcacatattctgaaactttctgcagctgtcaggcatatattctatatatgcaccttagccatgtttaggacaaggaacctatgaacttccatgacgggcaatcaggagctcatttaggcgtatcaatcatccgtagctgcagcaaatcaaatccaaaatgtctcatctgagccttttgaccttcaagtacaatcttgagaagctcaagtccaaggccgcaggccggccaaccggccggctgctgtccggcggggaccggcagttctccgacttgacgaggatctacaagcctgacgacgacgagatgaagaaagtgttcaacaagatcgccggcgagcacgaccggatcaccaggaaggatctgaaggggctcctggagaagttcgggaaagccgacgccgcggccgaggcgaggcggatgatctgcgtcgccgacttcaagaagaacggctacatggacttcgaagagttcatggaggtgcacaagagcggcgtgccgctgggggacatgcgccgggcgttcttcgtgttcgaccaggacggcgacggaaggatcagcgccgaggaggtgatgcaggtgctgca

SEQ ID NO: 8352 - DNA, 67656 bp, Oryza sativa
aattaattagctagtgaataattagttgaatgaaacatctggagctagccaaccaattaagctagctgagctaatttgttaggcaaattaatcttgattcgcttctggactgccggaagaggaagaagaagctagctaggcagactccaatcggtctgtacactgtagtcgacctaaagcgtagaaaaggaggtttcttgtcgtgttacacgatcataaactgaatatctgaactgacctttgaggcaaaaatggacaacagggttagatacgtgtgtcagggagtgtgcgccattcggaagtcaattgatctctccacttcgttttagttttccacgcaaagcatgcttatcggttttaaacgacggattcaacctgccttaagaaagataattgggggcagaaagagacaatagaatgatagaaacgattgaaaagagagatgcacctactgctagctgacgtgttcatcatctttttttttccatttctcccttttgacaaaaacctcacgtctgttgtgtagtcaattcgtcagaagttaattccactttactgatgatcttgcatcagaaaacaagaagatcacatagctataaaccacaactctgaaattataaatagcaggtggaaccacaaatctgaaacggcagaggtcatcttcttccattgaaaaaaaaaaggaaaaaaaaagatgaagtgcgatgaagacaaccatgtacgtaagcaagtgtactccattgctgaatgcttcaaagaggaaactctagcatcatgcatatgcatctgagcatctcgaagatgaccatttccaattactattagctagctcgttgtgaaagggcatatagtctagtggttgcggtgacctaaatagcaccctaaggtattgagttcaaatctctataggagtgaatttcagattgggttatttgagggctagcaccccaaagttctgagttcaaatctcgatagtagcgaatttcagattgggttatttgagggctagcacaccaaggttctgagttcaaatctccatagaagcgaatttcagattagattatttgaggactaggtttctatatttgataggctaagttcctaattaaaaatatatttgataggctaagtttctaattaaaaagaggctgtatatatctggttgaatatagagggctggtaaaaaaatacctcgtctactagaagggtgttcatatctgaactggcaaaaggaaaggacacgtcgcgactagcaaattgcgacgggagcaaagtagcaaacagttccatgaaagcaaagttaattaggtaactgatatatagtagcttgcagatcaggcataattcaggccggccgtcgattgacacgccaagtgtactagtggcgacaaagcatgatttctggtgcatctctatgattatatacgggacaggaatcttggtggaaatttctgggatggattgacttttccgggctcttcgtctatgatcgtctagaaatgttggcacttgttgtaccgtactcaacctgcacatgcaaagcatccagcgcagctaatctttgtttgcctttactcgtgttcgtgcttaatttgtggggtagaaagtttcttcagcgaacatgtcgtgtgtggtttctcctgtgcttgatcacaacatcacaggatcttggacctttggtgcatgaatactgacatgcatgttcatcagtactatagttatagttgtcaaagcgtcacgctaataacaacaagctatttatatcttcaaaagaaaaaaaaaacaagatcagctatctagctcagttctcagtactggttcttcaattgctgcaactggagtagatgagaatactccaaagtgtgaacgtctaatagtattgattagcagcgacgtctgacagagatgtataacaagtatcctgacgtctggtatattgaattcaatggaacagttgagttactctttccgttgtgattgattctgcacatcttgtggtgttgttcgaatttgacttctagtagaaatttgatcttaggatctgtcagtgagacagtgatatatccatcatgttttttttagatgacatccttcttgttttagcacccaacattcatgatatttgcttccctttgatatactgttcttcaagcgttaatccttgaatatactccctccgtttcatattataaatcgtttaacttttttctaatcaaactttattaagtttgacctagtttatagaaaaatttgatagtattatcagcacaaaacaaatatattatcaaaatatattcaagatttaatgagtattaagatggttttttgttccgatcaaacatttaatttagtttagtaagtcagatgcatggaaactacaaatataactaattggaaaaaacaaaaatataaaataagtctaacgcttttggatggagagagtagataatataaatgctgcagaatgactgcagagagtggaagttgtcacctatggcctcgtttagacgggccttaaatctgtccatctacgtatatggccgagtgtttgaactaaactagttgggtggcccgcgcaattgcgcagctagtatccatacaaaattatcttcttttatatatgattttacttaaaatttgttaaataactatctcgttgtcttaggactttaaaagaccgaaccttaaaatctccatgtttctaattttgtagttttaaaaagtcacaccactcactacctcttacctctttgtcaccccctttatttgtttgcttatctactacagcttctatttatcctccttggaactttaaaattgaaccttataaattttagagttaattaaatcgttggttttcattttttaattctcgtcaaatgccgctactctactcctctacggcccgtccaccgcttcctctctttattgttattgagattttaacaatcgaacacaattatcgccagtgttcatttttaactttctaaaagtcccgccaaactgtcagcagcattgccattatactcttgtacggcccgtcctatgcctttccttttaattatcattgagattttaaaaattgaacgtgattatcattgtggtttatttttttactttctagaagtcccgccgatcactctgattgtgcttcttaacgggttgcccgccatctctcctcttaatcgccattggaattttatttggggttttgtttatactttttacgcccattgccttccctcttttttattattgagattttacaaatcaaatatgattttcattggagtttattttttactttctagaagtcccaccaacccccgtgatcatgctattacaatggcctgtccattgtccctcgtcttaattgtcattggattctattttaggttttgtttatagtttttagatgtcccatcaaccactgccaccctactcctttacagtctcgttgcttctccgctctttattttcatttgccatcgttgtgtttttagatggattgtgttttatttccatattttttattcagatattatgttgtttataaattttattcctacttgaacgcctttaattgtttttaaatttttagaatttaatttattttttattccaaaatttaattaaactcgtgctctagatgatctcttctttcagtattgcttattttttattccgaattttagttattttaaattgtatgcccatatgaactcttatttttattttctaactttagaatttagtttggtgatgggttgctctttcaatattcctttttgttaatttcgaatttgagttatttctaaattgtaatcctacttataatatctttttttgtaatttcagaatttattttattttatttttcattccaacatttaattaatcttgtgttgtgttttgaatggcctattctttcaatatcctaacttattattccaaattgataattctaggcttatagagttctgaactgcatgttttcaaagtatggttcatggatggattgttgatttggttaggacatggtatttcttagtactctcagttttttttaactaaccaatatcatataaaaaaatataggagtatttttttataaaaatattgacatatataggctttctagcatttatgattagaaacttgagaggaaagagaacccatctatatatgtgtatttgaaaattagcatgtggtagtcaataaaaacttattgtaattatattagagaataggattactgctaaaagttttagcttttcatttgaatccgatggaggacttgtcctgtcctgtttttcctgtcctgttgctagaccttcatagctatgattccaaaaaaaacgtgtcatgttgttgtgtggctttgctcggttgggagtccgactgcaaacatgactatgagaaggacatgtatactgcgtagtattttttttctttatttatatacctatacaatcaatcttaaccgttataatatagatccactatgagaatatatttttctttttatttcaaattttaattaatctcgtattggatttatagatggactcttattttaattttacttatttttaattccgaatttcaattattcttagattgtacttctatttggactcttcttttctttttcttcgattaacgtggtaatttctaggcctctacggtgaacgtggtgcctctttttcgaactgttttaataatataatagataggtagatagatagattcttggcccacagatatagatgggccggattaaactgttttgcacgtagttgtctatgaacaaagaatatcccaaatctaagcatttatgccaaattttcattgttgattgtacatttgtacttgtgcattcaccgaattaacgatgtgtgataacaaacacgttcttagtgtctttctgccaaaaacatgtccttattgtcttgtgttgattaggacagaaacatgttacgattgcccctcaatacgttcacacgatctgaccggggctaacgagagatggcgactattcatgcagggtttccggaaggtggtgcccgatcggtgggagttcgccaacggcaacttccggcgaggagagcaaggcctcctctccggcatccgccgccgcaaggcgacgacgcctcagtcctccaaatcctgcggcagcggcgtcaacgtcgcgttccctccgccgctgccccctctgcccccggagccgtcggcgaccacgtccagcggcaacgaccgcagctcctcctccgcgtcctcgccgccgcgggcggacatcaccagcgagaacgagcagctcaggaaggacaaccaaacgctgacgatggagctggcgcgggctcggcggcactgcgaggagcttctgggcttcctgtcgcgcttcctcgacgtccggcagctcgatctccggctgctcatgcaggaagacatgcgagcggcggccggcggcgtcggcggcgagcagcgcgtgcaagagcacgcccgggaggagaagtgcgtgaagctgttcggcgtgctcctcgacgacacccatggcgccgccacgaggaagagggcgcggtgcgaggaggcggctgccagcgagcggccgatcaagatgatcaggatcggcgagccgtgggtcagcgttccatcgtcggggccggcgcggtgtggcggcgacaactgaagtccaaacttgtgcatgccacggccatgacctgatcgaccaggcgaacggcaagcagaaggcatgcatggtgaggttggtggcaagaatggtccgatcaaccaagtcattaggtaaaacgagacgaattaagcacgccaaatacgtgcggccctgtgttaatcacgggttgctaccatgctagtagtaaggtaggaacagtacgaggagtcaaggctgaccgaagcgaagcagccggctcttgtgtctggacgttgtttcagttaacactgaaagcttcaccttactatggattatacattttttagataatggaatataatatcccggtctttacttaaaagagctacaaccaattattacatagtagtttttatgaacatagtataaatctaaatgaatagaacacaccgaagagaaaaacaaagaaaccaacataacgtaaggagatcacaattattaaagtctatttgtaaatctccaaccataattggcaaatagttgcataaccgtggtctccaactttcggcatgcaactttcagaaactcttcatcttcatcacacctttgtagttgtgcccaaaaccggagccaatgagttgccctgaaaatgacctgcatataggaaaatgatggtgatttgtcaaaaaccatatcattcctactcagccatattgcccaacaaatggtagaagctccaacaagtatcagtttacccattttcttatcaactcccaaaagccacccattaaaaatatgagatatgctaactggaagattaaaaccaaaagagaactgaactgctctccatagaaacttcgcaaaatggcaatccataaagagatgttgaatagactcattcttcaaacaaaaagaacgtctcaagctgccattccagttacgccttgccaaattatccttagttaacacaacccctttaagcaggtaccacatgaaaattttaattttaagtggcaacttaagcttccaaatacacttgtttatctcgatatagccattattaattaaagctaggtacatagacctcaccgagaacaagccattctgatggaaattccatctaaatctatcagacgaatcattcaactgaatatgtactatagaggcacacaactcatgccaacaaacaagattctgaccaactaaagctttcctgaaagaaacattaagcggaaccgatcccataacagtggcaatagaagatgttttcctccgaacaattgcgtacaaagatggatatttatccttaaaagccaagttaccaatccatctatcttccccaaatctaatttgttccccattattgacaatccaagaacccatatttaagaaagtacttttgacattcataagaccagaccaaaaataggaatcaccttgtttcctgtcaacttgggttatagatttattataaagatattttctcttcaataaatcatgccaaaccccttcctcattaattaacttaaacaaccatttacttaaaatacatttattttgtatctccaaattatgaatcccaagaccccctggtccttgggttgacaaacaacatcccacctagtgagcctgtattttttcttatggtcatccccttgccaaaaaaaccgcgatctataataatcaattttatgaaaaacccctttcggcacctaaaaaaagatatcataaacatggctaaacttaaaagaacagaattaatcaacaccagtctaccaccaacagataaatgcttgcctttccaactactaagctttttctcaattctctcttcaataagtttccaatctttattagaaagcttcctaaaatgcatcggaattccaaggtatttaaaaggaaaggtacctaacttacaaccaaaaatatcaaaatattgttcataacattcctttgcctgaccaaagcaaaataatttactcttgtgaaaatttatttttaggccagataacttttcaaataccgataaaatcagtttcaaattatttgcctgttgcaagtcatgctccaaaaagatgatagtatcatctgcgtattgcaagatagacaaaccatcatcaacaagatgaggaataaccccattcaagagtcccgcctctttagccctcttaatgaatagagtaagcatgacatctactatattaaaaagaataggagataaaggatccccttgcctaagacctttgtaagtttgaaaacaattaccaatttgatcgttaacttttataccaacatgaccaccttgaacaaaagaagctatccattcacaccatctaggagaaaagcctttcattctcaaagtttgttgtacaaaacgccatttaactttatcataagctttctcaaaatcaatcttaaaaattacaccacttttatctttgcgatgtaattcatgtaaagtctcatgtaaaataaccaccccttccataatatttctcccaggaatgaacgctgtttgagtaggactaattaccttttgagcgacatccattattctatttgtagcaactttggtaaaaaaaacttaaagctaacattaagtaggcatataggtatatactgttgaatctttaaagcctcggcacacttaggcaaaagaatgatagtaccaaagttaagcaaatataaaggcaaactcccagaatgaaagtccttaaatagttctaaaaggtcaaatttaatgacattccagaaaacttgtaaaactcagcaggaaatccatctggacccggagctttgttatgttccatttggaaaatagcatccttaacctcattttcagaaaattccttagttaaggcttcattctctaaatatgaaacttgaggaatgtcagcaacataattctcatcaaactgaaggtcagactcatcaggagggccaaaaagacctttataataagtggtaatatgcgactttaaattggcatcaccacttattaaatgatcaccctcctgtagttgataaattctagttttcctatgttttccatttgccactaaatgaaaatactttgtattagagtcaccctccgaaatatccttagtcttagcccgctgataccatttaatttcttcttcccttagaatgacagataacctactcctgaaaaaccatctaatatcaacttcctcttgagaccggagaacagtctctgcctttttatccagcgcctctaacttatctaatatctgctttttctcttttttgtataaaccgctggtatgtttagcccatcccctaagatgttgtcttaggcggtgaattttcgcttgccaacgctccataggagtattgccctcatcaaccccagaccaaacttcttttaccatatcaacaaatccatcacgtaacagccaactaagttcaactatgttgatcgttactaaaagaggaagattttgtatttaggagcaaaggagtatggtctgaaatatctctattgagagcaacaacagaggataaagggtatttttgctcccattccgtcgacactaaaactctatccagtttctcataggttgggtgtgccagattatttgcccaagtaaaattcctaccagtcatttgtatctccctaaggcacaacccatcaataatagcattaaacaagaagggccatctatcatcataattattattatttttttcattaggactacgaataatgttaaaatcaccaccaataagaattggtaaggtctcatgactgcacatgttaactaattctgcaaggaattgttccttaaactcattttgtgcaggtccatacaccaacactaaggcccacttaaaattatcagctttatttcgcaaatgaaacttaatataaatatccccctcatcaatcaaaccaatgtcagaatttaataaattaatacccaatagaagaccaccagatctgcctctaggaggtttacaatgccacaaaaaatctttaccagcacaaagattattaagagcagctatagaaaattctttgttaacagtctcagataaagcaataaaatcaagttgatgttctttggttaaatcagaaacaaacttatgttttttcgggtccttgaacccatcacaattccaaaagattcctttcatttaaaattaatttttttattattcttcttttttttacccttcttaccattagaaatactattagtagaaggtaccatggaatccaaagtggactgaatattatcactactaggacttggggcgcgcgttgcggtgcctcaccgtctgaagaggagtgtgaactttgcataatttgaaccgaacatccagtagcacttaaaagcgaaagagattgtactgataaaatagacgaaaaggtagcctatatggtccacctgattgaattacatattaggaataacaaaaccacactgttctttgatattgctgcaaaatatagtcgcgcaggagcaggagaagcagctagttagataagtagtcattttttctggttcctatcaggatatataaaaggaaccttgttgttatgcaggttgattagattagtggtgcctaccaagctcagtaggcagacgacgtggtggcattgctggcgatccaccctcaagaggtccagtatcagtgtctatctggcgagatacccactggaatgtctttacaattggcaagcgagggttgtttctctcatattgttttagaatctctccatcggtctcactttcactgtcttcatcagtgtagtcaaagtgtttctcaatgtgaattaatatggttgataaatctgcattgtgtttccaagcatactccgatgattgctgatccttctcaactgcctcaatattccaatccattagcttggggataagattgcaatctgttgtccatgcagccaatttgaaaacagaaagatcttctatatggtgctctgcatatagctcctcaaccatacaactgccatcgagtaattctttcatagctgatttgttccatgattctggtggtactccttccaatgcaagtatgactctttgacgcagtgggtttggaacactatgtagattcatcttgaaaggttcaaatgctagccgagttgtttggaatgtgaagcttttctggctaaatgccttttgagatctttcgtactgtttatcagagtccatgaatatgacgatgtacattctatgtctgaatggcagtaacgcaaaatcatcgacttggcagtcacagacgaagcctaccatagctgataccttggttgtgttcggattgccagccccaagcaccttgacaactacagcatcttggtaaatgacatcggcaagcagctgtgaaatctcttcacggcttgagaactttgtcgctaacaacagacgtttagttccataggatgatggctctggctgtgttctgttagggcgtctaccttgctgggcttccattcttttctaaaaaacaaataagatagatggaagtgaatatctacagatttccagatgtaataggtgtgttgtttttttgttctagtaagttcatagttgccctgttcagtaatgtgggatctcgtctatttctatctatgaagagtagcgagacaacagatagaaggaaatcggtgaagaaaatatgccgtggttgttacctggagagggagacgaagaaggctgtagaacttgttcttgctcacaggaagaggaggaggggaatatgagttggggagaaatagaagtaaggcgttgttctccacgacgtctaagccaaagcctgtcttgtctcttcaaaggcagcaggtaaggctatgggttgatgtcagtatatggagtaaaacaacgtgtacgatgtggttccagtatggagtagttaggtgtgtgaattttgttggtctttaattcaatagcatattttggtgatggatagtataaaaccctggactatcgtgtacatacatgctgtgctattgtggttaagcgccggtgttgactaaatacagaagctgctgaagaggtagtagtaacgttcagtttttttttttaggattcgtgacgcctggtaagcaaaacagataacgtatatgcgttctaccttgagggacggtgattaaactggatgtatgaatgcgactgataattcggaggtaaattaatcgccgtgaaataacaaccagtattcaggattatcatagtataactatgataatgcagaatcctagttacatgatcagtgccagttcacattaagtctttttgcaaaagaataagtctagtggaaacggtgtcaaacacaggacaccagtataataataggacagtttgcaaaggcactacagaacggctgattttcttctcctctcactgaagagctgtctggtgtaggcagcaactgtggcatccaaaagtaagcttgtttggtccataacatatcaggcttggttgatggcactgcaacgatgtaaagaggataagcgaagttgcataaaagacatagactgtaaacctatagctcctgatcagtatataacaaaaacatcaaaactcataatacctgccaccagcatcgttgccaggattgtctttgaatagcttcttcgcagcacctgtgccaggagatggcctaggcctttttgtgggtaggttgtaaaaagaacagttagcatttgtgtactgcggaatattaatacttgggaaaaaagcatttacctttttttgtagctcttagaagtgctttgtttagtgctagaagaaggagctttctgtgtgaggctgaggtgatcgacatcctactccatagtaaaaaacctcagtttttagaaattcgaatatgtgtgtttaaaaggaatttatggaaaagcctaacctcatcttctatttcctcttcatcctgaacctctgtagtggtctttgaagcagactctatttccaggtctttgtgttttgatatagcagtggatgggctagctggtccagtctgtgcatcactaagcccaactgatggagttggtgatagagccatggaagctgggagagaagatgcttgagatgcagatggggattgtaacagggcaagggtgtgattgttagcacctccaagaatcctattcatctggaatgcaacagtaccagtagaagcagtgttctcagtgatgctgacattctaggtaaattctttctcaagtaggtcagtgatctcctttggtatgcaaccagtgttacttggattctgctgcaacagtgtctcaactgaacgaccaatgaggcgttgtgccaaacgcccaaagataatgaatgaagaatcagctgtgtcatcgcctgctatcacattgagcttgaatctggaaaatgcattataatggtaattttagtatagctacatgtattcattagcttgaacagtggagtttatgtcaactgacctaggcgaagccaaaacaactggtgggcatgttggatctgcacacctgtatccatttccaaaacgttttgctgttttgttgcatgtgtcacaagcagtgtaccaccaggagctatccacgttaaccttttttatgacgacagtaactaagaactgatgcttctgttcataaaaataggatcctaattagcactgtgtataacataaattgaaatgttagaatgagcatttatagtaccgaggatttaccttgaacttaaaagggtgtaggtctttaatctcaatgaccgtcttctgttctgcattgtttgcagcctgagatggggcgggtagatcagtatattttattggctcatagtttccttggatgctgcatagaacaaaaaagttcatgtctcaattggaaatagaaaagaaagatcagaggatatgatttgctaagacagtatatgtaacaaacctgtttttcaaggcagtcacctatggtttgtcaaggtttatgtaccatttgcaggcagagttacctgacaaagaaacattccctgcatccagagcatatgtaagcaccctagaacattttccaagagccattatagaacacatgtatggtgtttaatggacttactaccaaagcccctcacaagcgtgccaacaaagatcactatctgtggatttttttttgccagcttcaatcacctcatctgcagggaatgttgtggctcgatctccccatagcgcaacatttattgtcacattgctatgcagcagacatagtatcattacataaagagtttatggcatcgtgagcggttgttgggtgatgttagcaaaaaaataaatgtggaaagcatgtatattgaaagggggagtaatatttggtggtagttagttggtgttgctgatacactgttaatagaaatgttagagaactgaagtaaatatctttttgcatattaaaaaacagagaagaagggctaactcggcatcgcgaatgtagatgctcctcttcagactttcaccatccttggtgcgcgtttggataggtgtcactgatgttatctcagtaatgattccaatggcatctattatttaagagatcataataaaacacacattaagaatgcaataaaaagaatggtaatctatgaggatatgactgaatcacagtacctgtgaaagagtccttcctgttcactcgtccccttagctggtcatatggcgttagagagtaaacatagttagggaaattctctggcacatcagtacactcttccagtgtagaccactttgtgagggcaatcgactgcatattgccaactggcctatactggctggtacactgccttacacgatagaacgtgaggtcatacactttgccttcagtgattgcaggggcaaagagctcatccaatggaggcataatctgagctgcaatgctggccccctgtttagaaaatggtactgagtaagaaagcgaaatgtgatgacagattacaaagcaaggattctaaagaactaaccgtgccatcaaccagaaccaggccaagatgatacagaatattttcatcattttggtcgcggaattcccagaaccttgatacacgaagacgaatagttgggttgccaagaccaggctcaagcttactgattagcgtggttaccatctgccaataccgtaagcaattgttagcttgccatacagttatttaggatgttataaaaattggaagcagtgaacagacagacaaaaataaatgcaagaaaaggcagcactacatacacaaaagctgcatagtacagcaaacgggaaaaaggatagtatacaacagcacggcaaaaaatagtgctatagttggtacttaggtgccaaggtcctgcaattagaacagagaacatattagggtttgtcctaatatatctttcggtctgtagtatgatgcacataaagccaaattgtttaataataccatcaatctagctgcatccaacacttcttgataaaccatattcctagtctttgaactacagacctcatcctcatcctctataaggattctaaggcctgctcttgaagttgatctagaagcagcaacatatagttgcccatgtgtggagacaggttttttcaaataaaccccaacacgcgaaagagtttgtccctggcttttgttaattgtcattgcatagcatatacggacaggaaattgtcttctctgaagtgtaaaaggccacttagaactcgtggttgtaagcgcaatccgaggtatgaaagctgtctcaccaatattagatccagttaatatcacacattgtaacaatcgatggccaagagaaacaatcaatagccgtgtgccattgcaaagacccatagattgattcaaatttcgcaacaacataacggtgacaccttttttcaaaataagtttatgtgacgggaaattgttgacattaatagagtttaagaattcagttgggtatagtatatcaaagtcaggcatatggtcacatgatcttgaaattgtatcacaactaagatattcttttggcttagtgggtatcatacgaatgacagaatcatttatttcatcaaccgttcagttgttggggcaaacaatagcacggcatgctagataggaatggtctgtgtacttgttggggaaatctaggaaaacctcatctattattgcctttattttgtcgccggatgtttttattagtaaatcttcaggaatatcgacccatgttgcttcagtttcatcaattttttttgttgcaggtaccttaccatcaccaagacataggatccaattagcaaaagtttcaaggtcttgtcggttctgttcacaaaggtcactttgaaggagtctcatattaatgttcagcttcagaagagtaacatggtgccagagaggcaaatttgttatggacgcatcaactatggaagcacgcgagccttttcttatcactggtagtatttggcgaaaatcacctccaagtacaaccaccttaccaccgaatggtagtctgctgttagaaggtgtgtgctcggaaagcagatcacgcaaacttcgatctaaagcctcaaaacattttctatgagtcattggagcctcgtcccatataataagtgatgtcttttgaatgagctcagcaagcatggtacctcttttaatagtgcaaatactgttctcatcaatgtcaattggtattttaaacctcgaatgagcagtgcgtccccgaggaaggagaagggaagcaacccccgaggaggcaatagcaagaacaatctttttttcagaccttatttttgaaatcaatgcattccacaaaaatgttttccctgtgccaccatgcccatagacaaagaaaaaaccaggttttgagctattcacatgcttcataactgtatcgaaaatagttctctgatcagcgttcaattttggaattattgaattagcttcagtggccagtatggcgctgtcaagagcaagctcttcctcaatcattctattccgtactatgtcatctgagtaaatcgctgggcgcggtaaatcatagtcatctatgttaccgccgctatttgaaaaagtggtttgcatttctttcatcaatagcgacagtagcctatcatgaggaaccaaataagaagggtttgacaaagctgttctaagacgtcgctggatatcattagtgaaatacacccaatatttgtcaaagagggatcgaacgtttccaacagagcaaaacattacaacagtaacaaatagttgtcttagctaggtggatgatgcggatattatggcctcatcaaagagcaaataccactcgttatcactctcgagtaaacctcttaattcacacgcttctctaaatgtcgcataaacaatgccttcgtatgtcctaacatcaacatatgactgagcacctttcacaatcatcaacagcattcgtaaatagtaaagctctccactgattgggctcacatagtacattctacctatcttttcacatggtgttctaggacgccaactacgtgagctggtgtcccatgtccattcctttgggaaatcacagtatgtcagtgttcgtgcgttgctatgttttttattagcttcaaactattccgttaacattgttttttgggccgcagggcttgttaggagtgaattgagttcagcaccctttttgtatcgaacaaagttttgatttggaagatgcacagttagtcgctctactgaaggaactctatagtggatatcgaattcaaaagcacgccaaagagactcgcaggtagatagaaaccgtgcatcaatgtactcctgtatttcatttcgaggtgtgtgattagaattagttgttttgtttaacgtatcatctttggctgcaccattactatcagataattgaccagttggcttattattgacctcaaagtatgctttagatctatcagctccttttgtgacatacttgaaaaggtatttaatcatgttagacttgttgcaccatttgacattaatatgggcttggtattttttaaggagttccatattataaggcacaacccatcgattatcaagtttcactccatttttaagaacatatcgaccattgtttctgcgtttgtagatagtaaaaccaaaatcatccattattgtctcatcctgaaaagacttagggaaatgtttagaacactcccctttcttcatgcacgggcatgatttgttctggttgccacaagggccatggatcataaactcatcgaccaaagcataacccaatggatcagtaaaaacatcaggtatttcagcggatataaagccatcaacaataggagcgctaaattcagtgctgcctgcagcaagccagataaggcaatgtatatgagggagtccacgcttctgaaattctactgtgtagagcactacatggcaagtataaaatgttagaactaactaactgaatgtacaacaaactaaacacaggaagaaagtatcccaccagcaaggactgggccaaatgtttttccttccctaatgtctgagataaactcatttactttcatgttaaaaaccctcacaatcatatcagagcggtcacttggtacttggcctagttcaaacagcaaagcatcgtatatttcttgccactttgaattgcaagtgaaagtcacaaacaaatcaggcactccaaacacacgacatattgccatcgcatcttggtaattttgtaccatgtatcgcctgcctccagtaaaactggtaggcaagacatacttcttccctacagaatcccagtttcaagaccatgatcaatggcatcagatatcgcttggacagactctgagcgaagttcaggctggttgtcagcaatatacttcaaccttgacccttcaacagtcgagtatgagtcaacacatatggaatcactaagacgtccacaacaggtaaagggatttggtttattcaatcgataatggagacggtaacggtagtattcgagcattgtaacatagcgtcgtgaattaccagaaatgctagggaagtcagtgtacttgatacctaaatggaatccggcctccccatatgggaaaagcagcggatactgaagagccatataggatggatgtagagctgagacacgtcgtaacctggcatcagaagattagaccattacatcgtacgtatactcaccgtttgaatagtcacctacaactattcctgcgatctcaccactcgttggaagattgtactgaatttcatcccttgcatcacaccccagcaatctaagggaaattttctcatcaccatggtcttttaaccgatctctagcaaagcgaaatgctttgaccagatcattatggctgtcaagcatagaagtcagctcgataacaatttctgggtctggatcatccacggcattagaatctctctcaaatatattcattctatttgatgtctcattttcagggtcatatatatacaactgagcaaatttaggtgcagcaccatgtcgtggcaagaggctgccaatacggtggtgtacaaccccattgattttaaacacacaaggtgcagacctattatttatcgtcttatcaacattagctcctagcgaagtaaaagcaaacatagagttgtatgatcggatctgccttataaatcgcttcgatcgtgcatcaccatcaaattttaatagtctggctaggaaatcaggtggttttttcagctctggaaggctaatcttaccacttctacaacacaggttgtaaatgatctttcgctgtgacagcacggtcccttttttgaccctctcttggaacgaaaatacagctccacagtatgggcattcatgggatggcccgccatagtaggatcgttcagggtatagcgctgtagaattaaagcataagggaagactggaatatagattaaaggaacgctggctaaaggatgaacaaaaacaaaccttttaaggatgcaatataatccttaggcaaaggtaagatgtcctcaagagtaggttttgggcctatacaacgaatagaaatgaggctataagcagtaggaaacaaattttttctttgtattttttttggatctgaaaataccatcaagaacattcatcagagagtagtctgttcggtgggcagatctcttcatatgtcgtctctccctattgctcgtagcagcacttcgcggtatgtctagtaatgtcctcttccctaagggaaagtagttatactaagaaatgaatcgaaacaatggttcgttcttttctcgaatgaagcaaccaagtcagcttataggctatattagtgatgtacttacttttcacattgcctattgggtttccactgattgtgttgatttcaatgggcagttgcctattggcattagaacgatgggatgtggcttgctgggaaggacctgatggaacgcttccttgcgcgacatctgcatgtatgctacttggtccagtgtgcacagcatctgagctgaggcgcaaaggaacagaacctactgaaccaaataccggagcttgcagaaatcctaaggaagccaatttgctgtcttagttagctgagctaaataataaaaacaacatgtacaaatgtgtggcgcgaataacacaccctggcctaatgaagcatgacgccttaatcgactctcacgcgcccgttggacacacgattttgctttaccagacattgcaaagaaaatggggacacatacagggagccactctgcacagcgcatcacaaaatagaacacaattgaacatgcacagtgagtaacatagataatagcaggttttaaaaaaggcgaaaacagtaagcagctgcaaagatgggaacaaaagctgaacaaaaccaaatcaatagatcaagttggcagtttacatataggaccagaaacagagggcaataattaaagtacgaaaaaacaacgatcaccattaagaatactctttaactaccccgatactacagaggaacaatcctacgacctatgcgcaccgcagaaaaaatggtcctccctaacaaaggtgaaccatagagagttacactgctttagtacattctcacaaggcagatctgtaggaccatagcgcgcctctaacctagcaaggtgtgcagccgctgttatagctacgtcaaccgcagacgcggctatctttctgtatgaaagcaacatgtggaagttataattgtgcacagcgaaaccatacttgacttggagaaacctaacagcctgctgtgcaaccatttcatgggaaacggccgacggctgtactgcagcaacccaaaagaacttgcttactgtaccgcagcctaactgctcgtcaggaagactaagttcaacacctgctaacagcactccgtcaccatctacctcccaaaggtatgacacccaaggtaaacggcaatgggaagcaacagcgttcaacaaagaaacgtaggatacgccaaccgccaccatcccgccgagagcactgcgaatcgtagagacagctttcaaatagggggaaaagagggcttaaaatgttgaggagacaggggctgagggaaggtaagatatatactaagatagcaagaacaggaagatgctataaagtagctacactgtcgcgtggggccaaacacagatatatattctggaaccaacgttcacatgtcctgtacagagcacctcacactcgagaatcctctatgaaaaagggaaaaaaaacaaaggttgacatataaaacattgaccagacagcaacggtcccctcccaaacaaaccaaacgcaataaaggtggcaataaaagcacaaagaacaacacacagcaatctaggcgatataaagagaagaacactaccttggtggtaccggagacccaacaccgaaagaagctacgcatccgtcaagaaccagggaccaagcacgaagagagagagcagcagaccaacgtgcggtggccgttctcctacagaatggaacaaaattagagccggcatgaaacctcaccgatgaacagaagcagccaacggggctgtacctcctccgcaacagccgatccggagctggcgtcaaactctactatccctagatggagatgcccctggatcctgaaagggatttgctggaaagaacacaccgaatatgaggaacaccgccaatcctagaaaaacaatgcaacaccatgctgagcaagggcaatcaccttgccatcgccatcagagcggaaggtcgcaaccagccactgggcagactgaaggaaagggaagaaccgaggagaggggaaaacgggatggaaggtaaaaaggaggacatcacggggaaacttgtgagccgctgtcgatttcctattggccatgcagaacacacatggtaaacccacccaccagccaaaggcacgcaccaactgatatgtgggaccataaaggcgtcgacgcccacgcctgaacagcaacgacccctacgtcaacaaaagggccctcgatcagatccatcagaggagcaagcagcagcatggaccaagcccataggcaacacgtggcaacaagtatgtatgttctctccttccctacccatagaccatagaccaagcccatccaaacaattcaaacaaagcaacaatccctcggttagatcgatcagtgcaccaagcagcaccatgaacctagcccacgcgcaacatacatgtacgttctctgcttctccaaaggcagaccaaggaccaagcccattggaacaaaccaacactgcacgcactacctttttgactttttggacaagagatgacggggcggcataacagccattcttcacacgccgtcgcctctgtctatcggacccaccggtcagctacagcggtaaaaccgcagcacggcacagtaaaaaaaagcccgcttccgtgctctcccgtgccccaccgagacaggctaaacccacgatacaaaaaccgacgacgtggatagtggcgggagcgaacacatcacccctaaagccgcgtaaaacgctctggtgcgagcacattgcccctctctttaactaccctgattcccacttaaatccatcacctcctccataatttcaccacataaatgttgtagtagagtattatcatcgaactgatcgtctagctcaccttcaacaattacatcaggaaacaattacatggtaacttgaaaatttatcgtgaaaaatacaaactggattttcccaattttttttagttaagtgcacccccttccccaaagaaaatcatgacaccttttcttttcacattctctgttccacatgttacatgtcaaatgaaatcagtcggccaggttagtaagggcaagtactataatatctcatatgttgcctctaagaatgccacattggattgggtgatgaggtggaggagagaaatggagagagaagatgaaccacccctaaatcaagaggcaacctccacataaatttcaagaaatgtgtgggagtattagagatattggtatttgtgtgttagaggtaatacattgtatggattgcctcttagttcatgagtgaataaaatagataaatttggaggtggtagtcacatctaccatagcacttgccctaagttctaatcttgagatctgcgtggagattgatgattttagaatttatggacaaattaagtcgcaatcacttgttctcattcaaacatgagttcattcaaaggtatgacgtggtgtattggcgttggtgtggaatgtaacagtcacaaaaagtcagctccatcgtcagcgtagtgttcaaacaggtgttggtggcgttggtctagagtcatgtttggttggctgctaaagtttatgacgtcaaatattagatatgacatactccctccgtttcaaaatgtttgataccgttaactttttagtacgtatatgaccattcgtcttattcaaaaaatttaagtaattatttattatttttatatcatttgattcattgttaaatataatttcatgtacacatatagttttacatatttcataaattttttttgaataagacgaacggtcaaacgtatgctaaaaagtcaacggtgtcaaacattttgaaatggagggagtaatttgttagccaagctctatagttaacgctagatcgctagccacagtttcttactttattactccctttgaattaataatacttgttgttttgaaaaaaaaataaacaactttaaccattgtcttctgtcttctgctagaggtgtgaaagcatagttggttagggtgtggtctcaactctcaacaatcaattgttgccggtttgattcccatggatctttcgctttgtctttcctttttcttccaatatttttattttcgaaacacatccattatctttagcaaatatgataattatatgcaagcggcattccctaaaggcgttttagttctctgacaacattatttccaaaaagtcttgaatactcatactgaaaatcttgcgtccaccagccactgcctgtctgagttggcactctagttggtactaggtgacttaaggcctgttaggcatacctccagctctagctccacctcttctaaagctggagcccaacaaaaaaatttcagctctatctagaatgaaagcgaaattcggtggagcgctctcacaaaatgaacttcagttagatggccagtggtcttcgtgaggggcggcgccatgccctgttagaaacccgtttggcactgtgaccgatcacccacatgcatatctctactaaggtaaaagcacacagtcgttctccttccatctccatctctcacgcatgtacactctacgcgattaaacaccagattctattgctttatccttaatcacctttttagtccatgtttaattatataggcttggtccgttataacgtacgagcatgttattagtatgcaacaaatgcggaagtgctaatgggcgatcgatcgcccggcgacaagggtagcgatcgatcccccttccccctccctccctccacctggtttctttttttggcaccgcattactttcctattttagtaaatttatacacctaaagtttatacaccttaagtttacacatctaaagtttatacacctcaaatttacacatctaaagtttagagactaaaagtttataagtcaaaagtttatatatccgattcaaatttgaatttgaattcaaatattttatatatatatagtatttctataaatctaaagttcataaacctgaagtttatagacccaaagtttataagtcaaaagtttacatacccgattcaaatttgaatttgaattcaaatattttcaatatatagtatttttatgcatctaaagtctatacacctaaagtttatagacccaaagtttataagtcagaagtttacatatccgattcaaatttgaatttgaattatatccgttcaaatttgaatttgaattcaaatattttctatatatagtatttctatacatctaaagtgtttatacacctaaagtttatagacacaaagtttataagtcaaaagtttatatactcgattcaaatttgaatttaaattcaaatttgtatggtgtagtagtaagagaagaaggggaggtaaggtagtaaggggaggggcgggcgatcgaccgcccgttaggagtatcccaacaaatgcaccaacaaagaaaaaaccgtgtccttgccagtcgcatcttacccggcatcagagccttaaaggccagctaattctcaatgggccatgcacccatgccacgcaggcccgtcgatggctatgtgccaagtaggcgaccgcacagggcctctgtttttttggcccccatataaacaatgaaggttcacttccaattgcccagctatagcatgcaacaaccaaatagactaataggcaaatcaatcaataagaccaagccaggatggggcgctgcaagtctgcaaggctctgctattacctaccttttgcatggctgtcgtgcgatcctaattctgtgctgcgccaactgccgggatgtcgtaacgtgatctcaattccacgcgcaacgactaacgaggcggcgacacaacttgatgctttcaacttcgaggctccaagcagcatcgacgatcgcgacgaccttgcagctctgccttcggctgggctcctgggtccagccttcttcctccttgtttgctcgtcgtcctcgactcaaccctcgatggttcgactcggactggtaaggttagcctggatgatagatcgtaaatatgtaatatgcatcaaattgtcgtgagttcatgactgtaatctatctatctatctattaagacagctcgaaacgaaggcaccacgttcgtcgtgggggctagaaattcccacattaatcggagaaaaagaaaagaatagtcaaagtaaaaatacaattaaaaatagctaaaattcggaattaaaaatgtgcaatatggaaagaggagtccatataggaacctagtacgtgattaatcaaaattcaaaataaaaataaaataaaatccaaaattagaaaaggaaaggagaatagaaatacaatttaaaaatagctgaaattcggaattaaaaataagaaatattgaaagaagtttccatataagtacccaatacgagattaatcaaaattcaaaataaaaataaaataaaattcaaaattagaaaaggaaataagagtccaagtaggaatacaatttaaaaatagctgaaattcggaattaaaaataaggaatattaaaagaagagtccatataagaacccaatacgagattaagtaaaattcggaataaaaataaataaatctaaaattagaaaaagaaaataaaagaaaagtttaagtaggaatacaatttaaaattagctgaaattcggaattaaaaataagcacactgaaaaaagaatccatataagaacccaatacgagattaattaaaatttagaataaaaaataaaataatatccaaagttagaaaacaataaaagagagttcaagtaggaatacaatttcgaaacaactgaaattgaaaataaaaaataaaaacattaaaataacacaatacggtattaaataattttttaaaaaaattctaaaattagaacaagaaaaataagatttcaattaggaatacaatttataaataacaaaaaattttgataaaaataaatattattaaaataaaagaccatctaaaacacatgacgagatatattaagtaacatgcctataaagagtggtggtggttgatatgacatataaaaattgttaataaaacaccaaatagaatcctaatgacgattaaaaggagagacgtcagggaggccgtgaagcaaacaagtaaggcagttgccgggacttctagaaagtaaaaaaaaaacaatttttagaatcacaatgacaataaagagtaggtggcggacgggctgtagatcagggacatagtgacatcgtttgatggcacttctaaaaattattaaaaataaaactacaagtccaatttttaaaggttcggaacttctgaaaagtaaaaaaaccaatgataatcatgttcgattttaaaatcaaaatgaaataaagaagggaggcagcgggcgagccgtagagaattacaatggcaaagccgctaatggtttggcgggacttctaaaaagtaaaaatgaacttaaacgataattatgttcgatttttaaattctcaatgacaataaagagataagatagtggacgtgttgtagagaagtataatagcaacatttgacgggacatctagaaattataaaaatgaaacccaacatgacaataaactctaaaaactataaaatccaatttttaaaggttccaataagaatgaatagaaatagtggtaaatcgagcaagcaaataaagaaggagatgagacataaggggtagcaactggtgtgacttttaaagcctatataattagaaacacgatgatgataagatttagtctttcaaagtcttaagacaatgagatagctatttaataaatttgaagtaaaatcatacttaaaaaaatatatgattttgtttgggtgctagccgcgtaattgcgcgggccacccagctagtttataattgaaatgatcgattatatcaaattatcgttttgattaaaattactgctcctatttgtttgtgaaacataaaggcatatatttcgaaatatcatacattataacacatattacatatatataattgagtgaaaatatattttatttattttatatatgatttttttaaaaaattatatgatctcaatttgcattttaccctgggcccaaatttaattcctggagacggccctgatgccacgaaaccgatgccctctctaagccaggcacacgtgagcaaacgaagccgcccgtgcatgcgcaacgaaacaacgaaacatcatatcatgccaccaccgtctctacgtgtcggcctccgcgcgcggcgtgcccccacactcggacgtgacgaggcacggttcgcccggcgcccccatgtgcgtgggagagagctagctcagccggccggttatgcacgcggaccaccatggcaccatcgcgcggcgaggagtaaggagacagccagctcgatcgatctccgcgagtacgcctactacgtactactgtactagctagcgtggtactagtagtaggccaacgagcgacgtcgcgtcgtacggggtcgtctgccggtgcgacgacgtgcgcgggacggggacggacgggggaatgtggctgaaagggggaagccgaaccacctcgcgctcgctgcctgccgtgccgggcccgtgcgggcgtccgacgtgtgcggccgatggtatgatacttcgatcggaacaggtagtgcgtacagagccgtacaatctcggtcggtcacgcgctcacgcgtcgtgagctggactccaacggccggcttgtgtggccttgtgccgggcgccaactcactcgacagcagtggcaagcagcgtcgtaataaacgtacgtgtacgtaccgtccgaactggggccgggcctgtggggatcggtgatcttttggttggtggcggatcgcgcgttccgcggggcgcgtggcgcgtgggcgctgatcgatcgagcgcgagccaggctgccaccgtcagcgtcttgggctcgatcgtggcgttggtgggggacgcgacgcgagggagttgggaaccagccaacggacggacgggctcgttcgatccccttcgcctgttaatccgttgcatctcgtgcgctgcgcgtctctgcgccttgcgcgcggtgcgtgcgacggtgcgagctgctttgtctgaccgatcgggaggattatggcaagaactcattgtgtgagcctactatatatgagttcaggccggctctcgcatcagttttttttttaagcccggcctgaaaccggggccaacccgggggtctgcacccaggtgtaccgtgtacggggaaaacgcatatggcaacacgcgttggtgccttggtgtaatgaaagggagccgaaatgcagcagcattaactgctgaagccatttaatttgggtcaatgtcaatgatattacacattatcatttgtttttcctccgagaacccattctcatcatcattaccttcttatgatcaagttaaaaaagaagaaaactccattttttctccccggacttcccttgaggaaatagaagggcaatgaaagaaagaaaaatatctccctagctagcttatctacattaaacgcctaatcaaaccattgctacgccattgtcgtcattatcaccgttctggcaaccatctgtttccacactgacactatcatccctccataatttcgcgagaaggccatgcttgggcacagggaatgggctgtactcaacctcgtcgctggaaccaacaatctcccacctgcaaatcaagaacgcagacgtcaatcagcacaccgttccacaacgaaatttgaggaaccaactcgtctccaatgacatgcatgtgactgctcatatgtggtactaggatgctgagtaggcgctgtgcgatctgagcagtgaatgaccccacaggttggagcatgcgtgtactagcagctgtggtatgtgtatgcggaatctggcagctgggaggaaggggccaatggagtggcagcagccatggcacggtgtggtccacaacgacaaggggagaatatatggcgaatctgtgtggaggggcacgcacctgtagccagtgaccaggtggtggatgaggacgagcatctcgagcttggccagctcgttcccggggcacgcgtgcacgccgttcccaaatggcatgaaggtgttcggcctcggcgacacctgcatagacattgttccacacacaaccagaaaaaaagagaaggttcagaaaaaagaagtttcactcgtggtacttcagttttgaggctctatctatctgcagattggtagcaccactagtatttgctgcggctgctatgcaaagataaattaagtcatttacaaatgttctagataagggtttgactcagcagcaagttgattaatggttggttggatttccatggtatacatctgatccgagtgtgaattctggcctatttgtgggcttgtcgaatggccgaaaaccctgacatattctgacgagaaaaggtacaaattatttctgaaactgaatatacctattcgcacctgacgtattacaactatgtcttattataatttcattccacgaacagtatcacaaagagctgccgttgactagagaagagggaatttaatgctatcgaaaggaacagtgttcagtttgttcagagatgcatgcatcgacatcaaaagcactgcggcgaggatcgatcgatcgatcgaggcccataccttgaatctagaagggtcgaacttctgtggatcctggaagtagtctgggttgtgatggatgttcctgaagagcggcatcaccttccatcccttggggataaggaaccctacacgccaaggaaaaatacacggtcccgtcagcaaaactaaaaaaaaaaaatctacactgtttttttcacacgatgcatggagtaacggacgtggctcccctacggccacgttgtagcgtagggctgcgcacgtgcgtacctttgtactccacgtcagccacggcctccctgaacgtgaacgagatgatgctggccatccttaagctctccaaaatcacctgaaccgaaggatgggagggagatggcaacaaaggaattagcagatggcgccgtcagtaatttaaccgcaaaaatacacgggaatcgaatgaaaactcgggaaatgggtgtatttttcgcgcatacgtaccttgtgggttagggccatgctccgcgtctgcgcccacgtcagcggcagccggccgccgtcgttggcggcgcggatcgccgcctgctccgccctgacggcctcgagcagcttgggatggtcgtggaggtacttgacgatccaggtgagcacgctggccgtcgtgtcctgcgccgcgaacagcacgccgatgatgttgtcggcgacctgctcgtcggtgaggagcgcgccgtcgtcgcccgcccgcgactgcatgaggcagccgaggaggtcgctgccgggctccccccgcgcccgccgctcccgcatgatgtcgctcagcacgccgtgcagccgccgcctcgcctgcagatttagtaagatgcagaaaggaactcgatcggttatcacctactgttgctgcaaacaggacgtacaagaacgacgtgaggaaggcactagaatatgctacagctcgtgccatctagtgcctggcttctgctgcgtacctggatcgccttgtagtacagcgtcccggggaagctgttggggaaggagttgtagcccttctccacgatggcgtagttctgcctcagctccgctttccgccgctcgtccagccgcccgccgaagatggtcacgatgccgacatcgaacgagagctgaaaggaacaaaaaaacaaacacgttacatgcatcctcgtggcgagcagcactgcttttccggcacattcctcttcatgctctggctggcaattcttaccctcttcatggcgtggaaggtgctggagacgttgccgtcccaggaggcgagcgtggagcggacggcggcctcgacgtccggcacgagcgcgcgcagggcgtcggggccgagagggccctggacgagcttgcgaaggcggaggtggtagtcgccctggtggaagaagagcgccgacgggccgatcatccgctccttgctccgcgggtacgtcggcttgaacaggtgcgcctgcgtcaccagcacgaaccgcgccgcctccgggctcgccagcatcacgcacgggcaacccagaatgtgcgtcttgaagatctcgccgtacctgcacgcacacacaagccatacatcagcaataacgccgaaagctacaagcccacaactatggcatgcagtatttgtgttggcagcttggcattatcttgccatccatgtccttcaaaagcatgcgtccatgctttcaggttgcagagattagcagcatgtttgggtttttaattaattggcaactaacctcttctgtttggaggcgaagaagacgttggggtcttgggagtagagctgaagggtctcgccgatgtaaggccaacccatggagcccggcggcagcctgacggctttctcatggccgtagccatggagtttcctcctctgccggctcgtgtagtggacatagcacataaaagcaagagaaatgaagaaggagatgacgatgacgatgacgaaggaggctgccatccaaatgaccctggagaattaaggatcacttggacaccacagctgttttgagagttctgaaccagctgtcttcttcttgctagctagtcgtgtgttattgtctttgcgctatatatgctgttgctaggagagagggagagagctgtgaggagagggagagagggaggagaaaaatcttcgagggatctttcgaatggtggtgggcgtgggaaggccttgcgtggtatttatagaggcagagcgcgagagagaaagtgagaggccagtttggaagctcatatggtgtccgcgagctagggaggggagggagtaaggcctgtttttcccagcttaggattattataatctagattattgagtcagattaccataagctagattgttataatctgtagtagaataaacggttagttgtttctttcctagattattacatcctaaattattgggtttacaagtctaaagagaaagtggtgtggtatgacgggtaattttttacccaataatctggaaaaagctcacctaaatgagcttatcatattataataagccctctttgtttaggcttataagccaacttataagtcgaaaagtctgagcctaaacaagcaagcagcttttccgtttggtttttttgaagccataagccactctaacactattaagccaaaagctaggttggagaagcttttttggcttatgtgagttagatgtatgactcaactactaaacttaggacattaaatccaccggcttataaatcatataagctgacttaaaagtctaggctaataaacctaagcctaaataaagagggcctaagctaggctccagattataataagctacttcaataagttgtttgtttctttcagtttactcctaataatttggattataataatcctaagctgaaagaagcagcgcctaaatgtacatacatcaaggaagtttcaacttatcctgtggatttctaatgatagcatatatatatcgtggtatttatttcttatcaagattttcttaagagggtgaaacgtacatgcagcaagataagttcagtataccactataccctgttgatttgctaccctgtgctgattagtttcaatcgtgtattggccaatctggtcgtaagaatagcattgcattgcatttattatgttcttatcatgtgttttttggggatgaaacgtacatgcagcaagataagttcaacttatccagttttatcgtcgttctgtacatattaaaatgtagtttaatacagtatagtttactcctacttatactttaagtatgtgccacatcatctaaaagtatacatagagataggacatactaggactactagaatacagtggcggagccaggataaaaatatagcggggctaaaccaaaatgaccaacagcaactaagagagatttaggattaggttaggaatttttgggccttcttaacgttttgggccttctaacaacctcaaacaaagtttatattagcccctcatttataaatatatggattagaattttagggggggtattatgagggctctaatggtctattagagggtacgggggtctaaaaacacctccacccccacgctgtctccgcctctgctagaatacaataatacaatagtagttacattcttccattccctcagccatggacgaagctacaagtatccagggatgcctagggaaccgatacataatttttttttagttatagtttacctattttcatcatatatacgtctcctcaattcaaacttagacatccgtatcaagctaaaatcgattcaaagtagagtaaaatatgtgagtggaacccctctattttgttttagctttgtcaccgttttcagtgtacgtaggtaaccaccgtatctaatgctttgtcccataatcacatttatgtagcacatccctacttatataggtccgacacgttacaaataaggctccgttattggtactttgaaaggggagtcttccgtccaccccctcccagtccttcacatcatgcacagtgtgcaaccatcacactcgcaagaaaacaaaccaataatgttcctaacccgttcccaatcacacctcatttccaattacatggtccaaaaaaaattaatctccattgaaagagacaagtatattattatccattgcaacacacagacgtgttactactattaaaacaaataaattggtagtaaagatatgcacacgtgtgtatcccaccaagtaaaatagaattgtccatcgaatgtagataaaaggatgcacacactctttcttatgcataatttgttaactcactacaagaaaacagaatgtccttggcggccatataatttctttagcggtatttacttagcgatcggccgatggaataattaagaccgccaagtacattccgttttcttgtagtgacttgggaataatgtttacaatatacccaagtgtcatgccccgaactagtcccgaccgagactagcccgtgacgctccaatttaacctgttaatcgataccagtcccaggaaacagtgctggtatcacagggagacagaatatcacagcaacagaggtctctttattatagagtaggagtacagtcatgttgagctgcggacagatcccgagctcacaactgcattacaaaaggaaaacggaagccaggacttggaccattcatcacaggcgcgacttgggaactaggccgaaaccctaaaactcatcgtagccggcttgctcctggaagaactcctcatcagcaggatccgcttcatcttcttcagcaactggggggggatatttatatagagcaagggtgagtacgggagtactcagcaagccaggggaaataagtgtttaatgcaggcttcaagggaaggctgttgtttttgcaattggttttatttgaactatttttctaaaacaactaggtgagtgcttctcaaacgacacggatgggacagtgcgtctcgtccggtcggagtatgtgcaatgtatcagtctttgggattgcaacaaggttggcacccggccaacagcttttcaaacggccacccgggccaacaacttttcaaacggccacccgggcctagctgatcccatcagctacagatttttcaaacatcgaaccccttttcacaacagcaatttcacaagcagtagtcaaacaaaactacgctaggaatcacctcacatccgcccttgaccgtgggcacggctgttcgaacagttcaatgacctctgcagagggggtacactttacccacacgacattactaacccgggtcacccagcccgtggggatcagccacgtcgggagacctccaagctttcatgacaaggcatttcgaaagccgacacaggtttaccatatgccgacgagaggggtcccagaccaacaacaggttaggtcccagaccatactgtgccaggaagcccaggggtcctccccgacaccaccccggcgaatccacatgtctctcggcatcaaggctcccctgataagctagttactcagccaggggtgtcccattccacccgtgtggtcgtacttgtcttatgttcggatgaaattccaaggaaacggtccttaggtgcaagagcgggaaaccgtacacccggtacgttccccggtccgcggttttggaaattcatttagttcgcaagcaccgacccaggtgtcgggtttttccaagtcttttgtaaaactccagttttacccaagttgttactcagattttaaatttgaaggcgaccgtcgatactcgcacagagtgcgcgagtatcgaggcgcaactgggtggttacaaggggacatggtatagcaattaacaaaggaaggatcaaatgcgacaaattaggtaggtccgccaatctgccttgcagacgggacaaacagattaagtgtgatcctatcaatgcataatattttgcaagcaacataattaaatttcaaatataggctcaagatgttcaaaggtggcttgccttgctcgagatctggagcttgatcctcgaaatcctcgcactgcgggtcttcgggctctgaaactacacgcgaaacgggacaactcaacaaacggcaaaaataaagccctattaacgacctctaagcgtgccataagatagatctcgagatttggggaattttggaagttgaacggagtcaaacggatttacggttgggaagatattgaatttctaagattattgaatttttgatctaaaggaaaaggatttaattaaatcctttttggaaaaaaaaagaaaagaagggagggaggaaatatagacttttctcggacagctagggcgcggcccaagagaaatggagcggtccggccgagctaaatgggccggccggcccaaggcggcccaaactcgcgcgcgcgcgggagggaggagagagagagccggtggaccgggctcaccacgcgcggtcccgggtgggacccgcttgtcagcggctcggctcaccgtgcggagggggcatgcgacgcacgcgcgcgggcggggacggaacgcggtgcatgcgcgcggtccgcggtggacgcaggtgcggcgggcccacgcgcagcctcacggctcgcggtggatcgcgcgcacgcggagggaccgaccggggtcggcccgaccaggtctggctgagctggcgccgacgtggcgcctacgtggctgccacgcgggccggcgggaggtagacgacgacccggcctcgaatggacggcgggcggcggcggcaagcggcggagcgaaccacggcgatacgggcaacagcgagcacaccgggcggttgcacgtgacaagggaaggcgagccatcggctcggattcgccggaggttgctcgacggcggcggattgcggcggcggcaaccggcggcgggagaagagggaaacggcgacgaggtcgcgagaggtcgattcccggcggtgagaacatctacgcggcttcgggaactcgacgctagcgtcggattgggaggaactacgccgagcgaggccggcgacgagcgggtgctacggagctcgggcggcgacggcggcgagcacacggcgagcgatggcaacggtcggggcggcgccggctaactacggggagtctactcaagctactaccgaaagctagggggaggagatggagcgaggaggaagaacggagagagactaccgtgtgggacggggcgcagtgacgagaggccgacggcgcgggagtgatctctccggcctcgggccgaggaagaggaagaagagggcgcgcccggagtccccttccgcgtccacgaacgcaccggctctcccggcgcttggcgatggacggcggaggcgaggcagagcacgggagcggcggcaacggtgaggaggcgaatgggagaggaaaggaaaggagggggaagacgggtttaaatgggcggcaatgtcggtttgagagaggggaaccgacatgggcggtcaagccggcgagctggcgctccggctagcgtccaaagcggcgacaggaggtgacgccggcgagaggggaaaaaggggagaaaaataggaaaaggagggagagaaagggggctcgcccctttgccgattcgggaaaaggaggagggagtggggcaactcggcagagggagaggggctctctgcctccgtcccttggaggctagcgcgcggagtggcgggggccgggcgatgacgacggcgatgacggtgggatggtttggagcggcgcgacgacactagtgacaggcgcggctggcgcggcagagggtgacggcggcggcgaccaggcggtcggccactcggcacgcgcgcgcgggaagcaacgggcggcgcggctgggcagcgggaccgggcgacgcggacggcgcagacgacgcggctcgggcgggaaaccacgcgggcgcgcggggccggctttgcgagcggggagctcgcgcaagagatgggggcgctcggcgcggctctcgcacgcgcgagcagcgaacggggggggggaacgcgccggggtggggagggagcgagagagagagagagagagagagagagagagagagagggggggagacgcccgggagagagggggccggggaagagatgggccgagcggaattcggcccatcgaacctggggaggcaaactagacttttgcggagggattcgatttggaaggaattggattcggagttgaactcgacgatagatcggggattgagatcttgagatggcacggacactagacaacaatcaaagaaacaaatttcgcaattagggtttttcggagataattttcccgctaggcgccacgacggaacgggcgctacaccaagttaacaggtctttattttgcgaatatagaaaagaaaaggataggagaaattgtgttaaagtatctcttagggggaaattgcttaatacttgaagaattgagacgtacagttcgctctccattaatatgtaaaaatttaatgattttcagtgatgtttgacgtaatagtaaggctttgtttaaggaagtttaagattataagaaacatttgatgactatttagtctttgagaatttggaaaaccgaagttccgaaccttttgtttctaattcattttctatattttatagctacatatttatagaatttagatgaaaacctgaattgtttggtactaggagattttagaataaacagcgtgtgtcatatcagagagtggttggtttcactgtcatatatatccgtcgttacatgcactggttgaagctattgtcagcgcgtagaccctatcgttttcacagtggcaaaagtaaaacattcaagaaactacgagcgggttcgtttcaacagttggagagtagaatttggaggccatcctactgcttcgagaaaattataggtttggaacatctgatgtttattgatagttcactactcctaatacacatgttgctctataccagtctactaggagaagacaagcaatgcttttccgatcgtgatacttgcttctcgacatgcctgctttcctgactatgaagatagcaatatctagagttctgttaagaaaaaagatcagtaatatctagagccaatacgtagttacgtactctgctccatatctgatcatggattatgtctcagatctgtatgtttcttcttattattattatcgatgtgttctggtattctccggcatcacaattcagaagctagtctgtactcatttactagtcatctctatagtctgtagaattcgctgttatattccttagcagaattctttgattattaattatctaccaattcgtagttttcttcgcgttgtgaagcatagagaatacagagtaaaacatgttctacacttctacatgatctgtattcctgcatgtttcttcagtataacgtgtctacatgcatcaccacatgataaaaaacgggatcatttatgatcggtttctatctcaaataatttctgaaagaacggcattcattcaggatcgattggaacctcacaatatctacctcacttatttacatcctcattattcaagcttgattcgtctaaataatgttttgcttcacgtgaatgaagctttaattctgaaaagcgaaatatgtggggaagggtgatgagaacaacagagcaaatcggagcatttaatcctccaaatccagccacttccaaattaacctggactgagctgagttctagaccatatatatatcgcgctctcgtcattagtcacgaaactactgttcgtggagtcatcttagaccaactgaacgtttcttgcaaactcgaccaactgaacaagctagtttaatcaagaagcctaccatggaaagagtaaaatatagatagatcaagatcaatctcgggacccaattaagcttggctaatagtgctcccttttctccggaaagctcagtgcacagcacctgcgatttcgacgtgtcatggccgtgagatctgccgtgccggccgcctcacgctgacgacaccagctctagagctcgatgtggctctttcgtgccattacgcaagtactgatcgtccctgtagcgagataattaccatggcgccttgatttgtctcccgcttcgtcctgggccagtggttccacggccggtcgctgtcgcgtagatccgctcgccgctcggtcggacagtttgaggttgctctagaaccggccgtgcctgctcgatcgcgagctccgtgcgtcacggtgttaattgcggattgcgcggggcctctgcattggcgggctcccgaccacacgtcgcgggaccgcgcgcgcgcgcgcggtggtgaacgcgaagacgccctggtcgtcatgccatggcactatggcaggcagacgttgcgggtgatcgggcaaccgcgatcgaaccaggtgaggcggcgagcgcgcgtatcacatggacgcgatcgcgaccacacgggaagccgtcgccatcagccgctgcatggagcgcgcgcgcgcagcgttatccccagcgcaacttgcagctagcgtacgtggcggccggggcgagccgggaacaagtggtggccgcgggcgaagcggtgcaccgaccgagccgcgcgggttcgcgtcgtgcgcgtcacgtacgctgcgcgcgacactacgggatggacccacgggagagcggcgccaatatgatgtcggtggctggacagccggatgatgggcatcttccccggccccgtcgccgtccgcgtgtttccctctgagcgccggccgtcgctgtcaaggaggagcagagctaggcgtcgtacaagatggctccgaaatttctcttttcgcgcacgcgggcttgtggctccgcaggtgatgcccgatgcaagttgccaatggcgatcgagcgtgatggggattgatcggtttaggatcaggggctccgcatcaatcatccgcaccgacttttgtgcaagttggtacgatcgaactacttccgcctgtcgtgtttagggagagaaggtccaggtgaaaatagttggaactgtttcgtgcaggtagcctcttgtgcgtgtacgtacttgcttattagcttgccaatcgtatggactacggatcaagttaagttgtgtgacgtacagctcattcaaactttgcccacattttatacacatggatgaaaaattatattcatggtttagttcaactcttcttagaacactttgacctggtcaggcaataagctacggtctgtgttggagacatgtcatgagtgccttcgcccgaacccgccgaaaccattgggaacctgaaaaaacgaccggaagccaagtcgatggaaggcgaagcccatggtgaagcttgaaggcaaggcgcatggtgaagcttggaggcaaagcccgtggcatagcatgaaggcaaagcccacggcgaagcataagggtgaagcctgctggcagagggggatgtagcctcccttggattcggcccaagaaggctgttcatcacctttgtgggccgggccgaggaggctgttagaaggcccacgacttaatagacatcggttacccctgtagttgtcaccatcataagggcatctatctatctatctatctatctatctatctatctatctatctatctatctatctatctatctatctatctatctatctatctattatattattaagatagctcgaaaaggagacaccacgttcgctgtggaggctagaaattcccacattaatcggagaaaaagaaaaaaaaagaaaaggagagtccaagtagaaatacaatctaaaatagctgaaatttggaattaaaaatcagcaatattgaaagaaatttccatataagaacccaatacgagattaatcaaaattcaaaataaaaatgaaataaaatccaaaattagaaaaggaaagaagagtccaagtaggaatacaatttaaaaatagctgaaattcgaaattaaaaataagcaatattgaaagaagtttccatataagagcccaatacgagattaatcaaaattcgaaataaaaataaaaaaaatccaaaattagaaaaggaaatgagagtccaagtaggaatacaatttaaaaataactgaaattcggaattaaaaataagcaatattgaaagaagtttccatataagaagcgccaatacgagattaattaaaatttgaaataaaaataaaataaaatccaaaattagaaaaggaaaagagagtccatataggaatacaatttaaaaatagcctaaattcggaattaaaaataaagaatattaaaagaagagttgaacccaatacgagattaattaaaatttgaaataaaaataaaaataaattcgaaattagcaaaagaaaataaaagaagagttaagtaggaatacaatttaattaaaaataagcaatattgaaagaacaatccatataagaacccaatacgagattaattaaaatttcgaataaaaaataaaataatatccaaaattagaaaaattaaaagagagttcagataggaatacaattttgaaacgactgaaattgaaaataaaaaatacaaatattaaaagaaatacggtattaactaaatttttttaaatagagtaaatttcacaaaactgcagatactataaccaaattattacaaaactacagatttaactcggtgtatcacaaaactacacatttaataccaaatttatcagaaaactacacatttaagatgaagtgtcacaaaactacatatttagtaactaaattatcacaaaactacaggtttagaatcaatttaatcacaaagtattgatgtttatagctccaccataaaaatggtgctagggatttaaactccaaaagttatagttttgtgataagttcaatattaaatatgcatttttatgatacttaatctaaaatctgtagtttttgtgataaatttggtgctaaatatgtagttttgtgatacaactccttaaatctgtagttttgtgataacttggtcaaaatacctatagttttgtgaaattcactcaaaaaataaattctgaaattagaaaaagaaaaataatacttcaattaggaatacaatttataaataactaaaatttgtggtaaaaataaagactattagaagaaaagaccatctaaaacattatgacgagataaattaagtaacaggtctataaaggagtagagtggtggcggttgatatgacatataaaaaatattaataaaacaccaaatagaatcctaacgacgattaaaaggagggacgtcaggcaggccgtgaagcaaacaagtaaggcagttgctgggacttctagaaagtaaaaaaaataaccccattgataatcatattcgatttttaaaatcttaatgacaataaaaaggagaagcagagccgccgacggctgacgggacttctagaaaataaaaaatgaattccaacgatagttatgttagatttttagaatcacaatgacaataaagagtatgcgacggacgggtcgtagaggggtatagtggcatcgtttgatgggacttctaaaaattataaaaaatgaaactgcaagtccaatttttaaaggttcggaacttccaaaaagtaaaaaacccaatgataatcatgttcgatttcaaaatctcaatgacaataaaaaagggaggcagcgggcgagccgtagagaagtataatggcaaagccgctgatggtttagccggacttctagaaagtaaaaatgaacccaaacgataattatgttcgatttttaaaatctaaatgacaataaagagaagaaacagtggacgagccgtagaggagtataatggcaacgtttgacgggacatctagaaattataaaaacgaaacccatcgtgacaataaactctaaaaactataaaatccaatttttaaaggttccaagaagaatgaatagaaatagtggtagatcgagcaagcaaataaaaaaaagatgatgtaaggagtagcaactggtgtgaatttttaaaactatatagttagaaacacgaggatgataaggtttggtcttttaaagtcttaagacaatgagatagctatttaataaattttaagtaaaatcgtacttaaaaaaatatatgattttgtttgggtgctagccgcgcaattgcgcggaccatctagccggttcatgtaaaattccctgcaaacaataaactctagagagtaacatgttgtataaatagccccctagagccatataatggggatgtcgaaaactttattaagtcaatactactttattgttcaaacacacccaactcaatctctcgtcctgcgtgatatgacgcagttgtcctttgacaacagtctgcatgcgtgcagacttggtaatctgccacatcacacccaacacgccggtcgggtcaaggaaaaacgtggtgaggatcctctgcactgcagtattgcccttatcagtgacgatccatgccaagtaagaacggtcatcggtattaaacatgatgtgactacggtgaaatcgaaactgctggcacgcacatgactacaggccccgatgatgcaccaggagtgagaaacgctcaggggtctttcggctagctccacaagatggtgggctagacgatctgggttcgaagcctcatcctttctaattatttgatattaggtcattctctaatttttgcgtcttttatggtgcaccacgagtgatcccatagcgcactggtggagataagaatcttctacttttaaagtcacattattttatcactgatatgtaagcttgatgaatcctatacccacatgtaaataggcacgatgattttgataatagatcatcgtaatcctcagtgaagtgtcaatgtgtcattggcatcgtacgatgtgtttgtggtagtattgttggtgcttggctcaattttgcttgagggacttggtagttcactttagtgagttgagagagctgatataagttaaagtccataagttgaacactcataatttcctgagagatgggatgtttgtgaaataagtaaatactagtattgacaagataccatacacatgtttataagcttagtccactagtattgacaagataccatacacatgtttataagcttagtccctgtcacatcagatttttgacactaatttagagtattaacatagactacttacaaaactaattgcataaatgagagctaatctgcgagacaaattttttaagcctaattaatctgtaattagagaatgtttactgtagcatcacataggctaatcgtggattagttaggctcaatagattcatctcatgaattaatccagggttatgaaatgggttttgtctttagtctacgtttaatacttctaatagtgtccaaacatccgatgtgacatgtactaaaattttttagccccatctaaactccccttaggatggtctgtttgattgtccgacctagccaatagtccaggagatttttgttgatcgactgaacttgctaattgaaaaaaaaaaggatcggttaagacatttacaatatcatgtcatggcgaccgacctcgcgtgttcacatcagagccaaagccgccaccttgactgggagagatgtcttgcgggggcacgtgtgctcggtaaaaggcatttgagtctcaatgtaggagatgctctgtagttgtatagccattgcccgagaaaactttctctggacatattcaacctactgtgcattgagaaagggtgtcctcgatggcggttccaacctatgtgacattttctctttatatcacacaataatatttttatagtgtaaatatccttataggcacggacaatcttactcatgatcttgtccaaaaccaaacaagaaaagcttcacatcttctctttttccattaacctttatattccactatgccaagtgagcaagtcatataacatgccctgaagaggaggaatcaaaggtaccagtttaggaactggcataggctcgattcaagcgatgcaccgagcacatccacctcgagtcgtccacaaaatcaatccacaacaatcacagaatcgacatctcatatactcaacatataagatgtggatatcatacagaatcgtcatcgtccaaaaacatccatgaacaaaaccgacaaaaaaaaacatatacaggttaaaaataaaagggtatagaggaggacgcagaaggagagaaggttgacgccgctgcagctcaccatcgccgtctacccgcccgcctaccaccgtcgaggccggatttggctgcccttaagctcgtggcaaatagatccggtagcttccgaactcatggcgtcctactagcccatggagatgtcgaggaggggtgtccggtcaggaattccatgcgacgagtagggtggtggcacccagccgtccaccaacgtcgaggcctggtctaggccgtcgctcgccagctaggaagagagaagaggcgagggctgcactgctcgctggttggggagagagtagacaacaaccgcaggtgataggggagagaggagacagcggcgaggatgctcgatggggaggagaagaaaggagaagagatcgaggacgtggagattgaattaatgaataagatcgaggggtgggaataaaaaccaaaggtgctccatgcggttcgtctctgctcggctcataataagtggtgttgggttatttaaaaaaccagcacatataaccttttataggtaccggtttattataaaatccggtacaaatatttaatgtgccggatttttaaataaattgacaactatgaaatgttataagtgttagattttaattttagacttatgtgagagaggttaggaggatgggaaaatgcatataaccgggtttagagtttttggcatctataaagcctagtcgttccgtattatgttttacagtactgtaagaaagatggttcaagataacctaggatatattacattattaaaacaactttgaaaggaggcaccatgttcgctgtgggggctagaaattcccacattaatcgggaaaaaagaaaaaaaaagaagagtccaagtagaaatacaatttaaaaatagcggaaattcggaatttaaaataagcaatattgaaaagaagtttccatataagaacctgacacgagattaatgaaattcaaaataaaaataaaatacaatccaaaattagaaaaaaaggagagtccaagtagaaatacaatttaaaaattgctgaaatttggaattaaaaataagcgatattgaaagaagtttccattaagaacccaatacgagattaatcaaaattcaaaataaaaataaaataaaatccaaaattacaaaagaaaaggatagtccaagtaggaatacaatttaaaaatagctgaaattcggaattaaaaataaagaatattaaaaaaagagtccatataagaatccaatgcaagattaattaaaactcgaaataaaaataaaaattaaatctgaaattagcaaaaacgaaataaaagaagagttcaggtaggaatacaatttaaaattagctgaaattcggaattaaaaataatcaatattgaagaagaatccatataagaacccaatacgagagtaattaaaattcagaataaaaaaataatatccaaaattataaaaattaaaagagagttcaagtaggaatacaattttgaaacaactaaaatttaaaataaaaaataaaatatattaaaagaacacaatacgatattaattaaattttgaaaaaaaaattctgaaattagaaaaagaaaaataagatttcaattaggaatacaatttataaataattaaaatttttgataaaaataaagactagtgaaagaaaagaccatctaaaacacttgaggagataaattaagtaatatgctgtcacaccccgaagttctttcccaagcctaaattgaatttataattcacctgagaaaataccggtgtaaaagcaagagaaaaccctaataaattaatgcaaataataatcggatttggcatgtggaatttttcttgagttctacatgtcgaaatacactaacaagatttttagtggaattttcaaagctctcgaaataattttaatcaattaaaattgagcacaggcaatatttaaatcctggaaattcctttcttcctttttcttttttctttttccttttcccttagtgggccgccggcccattccccctcatctctccccgcgccttgctgggccggccggaggccacggcctggctcagcctgcgccccttcctctctctcggggtcaccgacaggtggggcccacctgtcgggtcctcccccaacctccagccgctcgccgccgcgcccgcaaccgccgccgcgcccacgtccccgcctcctccgggccacgtcggccacgcccgcgcatgcgccgcgtctcccgcacccacttccccctctctcccgctcgcgcccgcgcccgagatggccgggattcgaatttcgaatcccgcctctctttccacctccacctcccccatgtcggccggcgaatcccgcccctaccggccacgtccgagttccccctcctctatttaagctctgccgccaccccctctctctttttccccatctcgccgaactctcccgagctctccatcgctcccgtgccgtgcacccatccgccgccgccgctcccgctactccggccgccgctaggcgccgctagactcgccgccgcaccgcgccgtcgctgccgttgggttcgtgtgatcgaggtccatcccgtccgcacctcctccatcgaggtccgtcgccggaacccgcatcccctcgcactccagtgagcaccacctacaccgccgccttcggccatggtttccgatcgccgtggtccacccctctccctctaatctctctcttttcctctcttatggcatctcggagctcgtccgtccgtcgccaccgttgtcctcccgtggctcgtcgtcgctgttcgccgtcgtcctcctccgcgccggccactctcggtgaggcatccctcctcctctattcccctccctctccttcctagccgcgccgggtcgagccgccgccccggtcatgcgccgccgcctttgcgccaccgtctcccgccgccggttgccgtcaccggcaacgcgcgcgcgccgccgcccttgccatggccggccggccggctttgtgccgagccgagccgagccaggacgccgccgcaccgtccgatcggccccgggccgatccgggtcgtcgatcccgtggaccacccgcgtggtcccagtccatggtagactgaccacccgtgcgccgctgccatgtggggcccgcttgtcggcgccaccccctctctctctccgggatttatttattgcgcaataaatcaattaaggatttttccgtttatagtaaaaacatagtgaatcttctaaaattcataactaattcatctgtgctccgtttaagcccattcaagtctgagtaaatcaagaaaaatgtgtagaatccattaaaaatggttttgttatctgtttcagtagtcttatagcctgtttgtattgtttgccttgtatgtcgcttagattttggttcttccgacactccggtgtacttcgagatagtcgccgaggttcctccagcagcagagcaaggcaagtcatgcctgtcacttgaacatgttgatcctatattgcaaatgctctattgtttttcttcaaatactgcattgttttataatgttactatgggatgtttacctatcgttacagccatgctatttcgtaccatgttcctttgttagcttgggatataacatgactagagattggacttggaattgcttagccatgcttagttcaactagcacacaatgagggagatcctattaatgtttagactgtaggttctaatggtaatgttggattagtgccaccgttctggtgctgtttaattaaaatatattaaatggtgggctgtgggtgcatggtgttgctagtcgcgcccatggcacttaaggaccggttcgcgggaaaccctagaagaattcctcgtacttaccacaagccagcgtggtcaacggctgggcttgtagtgtagctttcctctagctgacgcatccaggcaagggtgggcgtgatggagcggggcgggccttgcgacggcctctgtcgcttccagattcacctaggcacgagaggggactgcccgtcgaccgctggggacgggggtgaaacctgaggtgtggtgtgcttggttagagggggtcatgcgaagggtcctgtcacggcctctttccggtatgtcgtggtggcatgtcggcgcacggaaacgtgtcgtggggctgtgtcttgtgggtacagttgtacgcctctgatcagagtaaaactattcgaatagccgtgcccgcggttatgggcggtcaaccagattcaccgtgattagtctcaccctagtgtagtctaatgaaattggatagtttaggtggatggttgggcctgttgcaacgtgggatagcgttggacagtggatgattaatattaattaattactacaactgtttacttctttcaacttctgtttataaatgctcgctttatgcaaatgaaccactctagttctcctttgataattctctgcatcatatccctattccggtatgacttgctgagtacagtgggtagtactcagtcttgctctattttccccaaccctagagtacgagtatgtgtcagatggtggtttctctgaggagtaggcttcatccgtgccgtcgaggatgcctgtggagtggtgttcccgctgcagatcgagtcaaggcttagctccagttatcttttgttttccgctgcatttatgtatgactctttatgatgtttgtaagacgtggatctgaatgtcaacattgtcgtttgtgtaccccggctggtcctggacggggattttaatgcacattctgcttgggattccattcgggaatttctgggcgtgacatatgcctataaagtagtaaagtggtggcgattgatacgacttataaaaactgttaataaaacaccatatagaatcctaatgacgattaaaaggagggatgacaggccgcccgtgaagcaaacgggtaaggtgattgccgggacttctagaaagtaaaaaaaataaaccccatcgataatcatattcgatttttaaaatctcaatgacaataaacaggagaagcagcgggcgggtgtataggactatagttgcagagccgccgccggttgacgggacttctagaaaataaaaaatgaattccaacgacagttatgttcgatttttagaatcacaatgacaataaaaagtaggcggcggacaggccgtagaggagcatagtggcatcatttgacggaacttctaaaaattataaaaaataaaacccaacaagacaataaactctaaaactacaaggtccaatttttaaaggttcggaacttctaaaaagtaaaaaaacaatgataatcatattcgattttaaaatcttaatgacaataaagaagagaggcagcgggcaagctgtagagaagtacaatggcaaagccgctgacgatttggtgggacttccagaaagtaaaaatgaacccaatcgataattatgttcaatttttaaaatctcaatgacaatagagaaaagagacagtggacgggccgtagaagtgtataatggcaacatttgacgagacatctggaaattataaaaacgaaacccaacatgacaataaactctaaaaactataagatccaatttttaaaggtcccaagaagaatgaatagaaatagtggtagatcgagcaagcaaataaagaataaagaaggagatgacataagggataacaactggtgtgacttttaaaaacatataattagaaacacagggaggataaggtttggtatttcatcaaagtcttaagacaatgagatagctatttaataatttttaagtaaaatcatactaaaaaatatatgattttgttggggtgctagccgcgtaattgcgcgggccacccagctagttaaacatatatatccatgatgatcgttgctgcggcagtgctaatttagctgtctcttgcaaacgccattcattttttttctgttttgtccatgttgatgcatcttaagcacgatatcaaaagatcgtactagctgcttagttattttggtaggttcattccgattacacgttggacatcaaaaggtagcaccgtcatcatcccatacgtacgcgcaccaggttgtccggttcatgccatttgttcatgtccgttgctaagaatgtgcaatcttcagaaatagcaccaaacgcgctcagtttgaacgcatatcttggtagatatacatgcatacagctagcacacgaatggcctaagttcgtacacgacgcaccgtgccgctcgtgtggagacggcgccgcgaccaaatccccatccacccatcgaatccacgtacgacttccattcgcatcgcccgtcaagaaaggaggatgcgtgtatctcccgcttccacagtgcacacacgaccgaaagccgtgcatatccatctcgatcgatctccctttcaccgcggcgcggccggccggcgcggtagctagccgccgaatcaagaggagcccgttcgtcgcgtccggcgagctaagcacgccatcgcagtgccgccacgtacgcgctcacggagagagaaaaaaaacggctgcaatgccgatggcaacgctgatatttccgctctcgattcggtcaagccaaattgccaaatacagacatggccaacctccccacaactctaaaaacatcaccgtaaaaggaggagcatagacaccggcccgatggataggcctgcccctaagtgacagggaataaactaaaaatccagagacttttcgacagcttcgtgacttgtctgtgtggtctagctgagctgggagatgtgatctggttttgggcctaattaacgacgatatgtgctatggctgcctaggcatatgctacgtcgaccacgtcccagtcggtcggcgctcggtggccggctcccattggcgccctcccgagattgccggagcttgtgccccggccggccgtggatgttaccggccgttcggcgcacgacgcgacgtgtggaactgaatcttgcgtgcctgcgaggacccggctcgcccggccagaccggcggcgagggcgccaccacataggtggtcgctgaatgctggtaagaactaaaagtgatcgagagcgacgtcggtcgcgtgcagaatcacggcgatcagggttcgtcttggcttcgtctacgtacagctgccgtaaatcctagatgcaaggatatcatccgatcgatcaacgaaactgcggccgatcaattgaaagccatgcatacatttaatttcgttgtttgcgtgcataggaacatgcagcgttgtatggatggagtagttgcatggctagctctctctgacatcctacatgattgggcagattcgatcgatcgagatgatctatgtcactgttacacagtgcagtaccaaagatcacgtaaatatcaccgcacgcgatcgatcgatggcgccaaatgaacagttaattaattgcagatgagatgatataatgtggccaccaaaccttggcggatttaatattcatcgtatcacgccgcctggataacgatatcctcattggcatggtctgaaaattctgaatttgacagccaaaatgcatatagccaagaacgcaaaagctgtgaggtatgggggaggagaagaaaagcagtgatggacagcacgtcagataagtagataaccactccgaccgaagaatccaacaaaacaaaaaccgggtcgaatccggaaaaggacactgttctgatcgatcgaatccttgttgccggcggcgttgcgcagcacaggatcaggcgatcagcggcgttttctagaaatccatctgcgtggctacactatacagctcagtttagctattgctccctttctcaccaaagttcaatttcttcttcttttctgtttacggtccacagtgccccagaatttttccacggtccagaaaattgctgcacgtacaggagtagagtagtaggtgagttgttgctctgtcgcgaccacatttccatggcattgctactttgctatagctgcatcgtaagcttgcactagaacattactgccaatctgccatgtgccaagaggccaagacgaataggcactggccggggtggtaggcttccccacgtatagcaaaagccaggccacattgcgggttggaacttgtgctcgttttgatccggacgtggagtcgccatcgcagaggatcccgaggaggatgccgcgaagatccgcgtgcgtctgacacagattgtcccggcctcgccgtggcgccccgtgttcgttcaatcattctgacgctcttggtggccgacgcaccactgcttcaacctgctccgttgctgcaggcagtgccctgtgaaggaggccagaataccggttgctgatgcgtgaaatgatttgcgaggtttttgtgtgtttgcattttgcagggaaaaggattagggcatttggtggtgactggtgtgatccaatgagtacgttggggggaatcagatgacggatcggttgtgtgttcctgcttttgacggccaaagtggttggtatagaaaggacgggggtgatagggaatcagggatccagcacttaccaagtagctagcgatggcatgcagtaagaacatgccatttggttatctacggtcaggagcgaggtatggcttgcgccaccctcgccctacgagtcctccatcactgacatatttggactgaaattaactgagtgaaatgcaattttcattcattgatactgctcgtctaaaccgatatgacgctagataagcaaggataaaacaactaatatgtttagactgtaaggagtgaaaagtaattttcattctttacctctagtctaaactgatatgtgccgtctactcttatgagaaaacgttgaataactaaggaaacttgatatctttttttatgctggacaaacaaagagaggtttggattgaaaggactgaaaatgcttttttttttacctctttacctctagagtaaattgatgtgccctcttcctttctaagaaaatgttgggcaataaagaaaaaaacttgatattattttcttcatgctggacaaccaaggagaaacttggtatcatcctaatgacaaaattggtgtcatgcactctcaagtaattaagaaaaaaaatgagtgtcgaaagccaaacattgcaccatgaagttataaggtcacacaaccctactaggggtggataatgatatcatctagtttggatcgttatctttgcaagatatcttggcttgtttcgttaaccttaacaagctaaatgtctagctcggcttaaatcacaggctgactcattaaactcgttaggctagcttgtttacgagctttatctaatttaataaatccatgccaccctgctagtataggtgtttagcctcggtccagttatgatataagaccattcattcacacattcatattgttttgagcacctgcactattgcatcgaacaaggagtagttgaatcgtcagccctattaagcgcctatcgagcgaatggatatcctctattgtaatgcacatgcagtatatgtcattgacatgtgggcccgaagcatgtgagacccacatgtcagtgacatctactggaggtgcactacagcagatgatttgcgctgctaccgagccgctagtaagttcatctcaattatagtttaaaaaacttaaccagaccgatggttcaatcgtgaaatttaaaccaaaatcagtgcttgccttggtccagttgtgctctactaccgttcatgcattcattgagcgcctatacggctataccattgtgtcgtacctaatacaattgaaccatctgcactatttatcatagtatgagcgtctgtactattggcgttgtacctagagcgattgaaccatttgcactattgaatgggccagtaggaaagcacaacatgcatccaacatatttttaaggctagttgtgtccatgctagaaggttgtaatagttagtgaaccccagtccaaccaattagttcaccgattgaaccactagaacaatgaaccaatatatcgactggatcactcatcagtcggtttaaacttttattttccagaggcaatccggtttgaacttatcctcttcttggttgtgttcttctctcaactttcccaaactactaaatggtgtgttttcaaaaaatttctatataaaagttgtatttaaaaattatattaatcaatttttaaatctttttagtaatacttaaattaattatacgctaattcttagtttgatttttcgtgtcagaggtaaggttgggaactcagccttagccttattctagatgcggattctctttattgaggcggacgggaaaggaagcccactaccgaaacaacgcaacttttgatctgggcctaattccagaacatatctgggcctaactcccgtcagaagcggtgatcaaattaggatctgcggctcattttttagctcaatacaactagcacaatttcccatgagtaacgaattctacagataaggtacatttcatgggcctgcgggcctagctacgtacgtctaagttgcaccctcagggctgtcgagaaatacagtgccacacgtcgagcaataacttaatttgtttttttgtttgttttttttccccggagagcaataactttgtgtaaatccggttatatcgaattcaagtcctcgatcagaaacatgacgccacttatattcggataagagccaacgagtctgttggtaattttttgtgacaagtcgacaagcacgatcgcaacacctaaacgccttgcggtgatatgtagtcgccaaccacctcgatctagccaaagggccaatgaaccggccttgtcccttaaataggggttggtcttgccctctacagacccttctccacgtccaattcaggatagaaaccaaaggagacacgaaacatgtcttcccgagcaaggaaacccgtcactttccaaactttggcaattttccactattttgttcataggtgtcaaatttgggtgtaaacagagtcatcacaaacgggtagacgccagccgtgtagaaacgaaacagctgggtatacgtaacatagagctaattctgagctcgatcgacccatgcatcgccgtttgatctacccgcgtacgattcacggccgttcgattggatgcacccacccccatatagccgaccctatcatagtttctgtagccggtcagagcaaggaagcatgcagaagctcgaccatgcatccgcgaactaggacaagcattacgtgtcggctggatctgtacatggatcagatgctattgaatggcaacggtatatatgatgtgcatcacattggaacgaagggagaaacctgcattgtttttttatcaagcacggctgcacatatattgacaacgaaggagtagataaacctgacgacggtcaatggatcggatggacttgcgcagcaggcccaaggccgatataagagacggcttaatttgctttcgttttggatgagaccaagcagtttcatgctggagaagcccagctccaatggggcaatccggaactctttatccagtccgctcttcgtcatctccaacatacgagctaggtacaatgcaaactgcctaatgttctattcattttctgatctgagcgatctatatatatgacaagtctgaaaatccacatacgtacgtacgcgcgcgtggacgatcgatggacttatccacgcaaaaatgagattgaggtttgcaattttgcatgcatgcatgcacgcgtcgttacgtcggtactactactacatattgcccagatctttccaacgtacgtgcggcagccttcgttgactcctattatttgtttcattgtttggtgtacgtgtctgtgttgcaatgcattatatacggatttgcatgcagttgatcgccggcgggcggcggcgagatcaggctgaatggtgaacccaaccgccccaacgacaggccgccaccgtagtatatatgtccgtattgtttgattactccctccatactcaataaagaaagtcatttaggagaacgatacggtctccaaaacataactttacttcttatttctataaaaatatttattaaaaagtgatatatgtatatttttataaaagtatttttcaagacaaatctatacatatactttttatatttttaaactcaataatttgagatttatttatgatttatatttttaaggtttaatttaaatattgttttaaacgattttctttacgagtatggagggagtatacgatacgtaggtgcgggcgaaacattgagggagagggcaagctgtgcctgtgcgtacgtcctcagcatgtaggcagactactgtgtacgtgttctcgttgtccgcgtggctagctagacgtccgccattcaccgcttctcgacctcgatccccacctgcatttactccgaatgattcagggatcggtacacgcagctagctagtctagtacacaagcctggaaagaacacagtagctagctagccgcttgggtaccatggtgtaaatcagaatgaattattagcatataattaattaagtattagtttaaaaaatttaaaaatatatgttaatacgatttttcgaagtagcttttctataaaaactttttgcaaaaaatacaccgtttaatagtttccaaacatgcgtacggaaaacgagcaggtaaagttggaaaagtgtttcaaagaacacacaaacttaaggccttgtttagttcccacacaaagaaatttactgtcacgccatgaactagccccgagcggaactagcccgtgacgctccaaattaacctgttaatcgataccagtcccaggaaacagtgctggtatcacaggaagacagtatatcacagcaacagaggtctctttattatagagtaggagtacagtcatgttgggctgcggacagatcccgagctcacaactacattacaaaagggaaagcggaagccaagacttggaccaaacatcacaggcgcgacttgggaactaggcagaaaccctaaaactcatcgtagccgacttgctcctggaagaactcctcgtcagcgggatccgcttcatcttcttcagcaactgggggggggaattatttatatagagcaagggtgagtacgggagtactcagcaagccatggggattaagtgtttaatgcaggcttcaaggaaaggctgttgtttttgcaattgattttatttaaactcttttctgaaacaactaagtgagtgcttctcaaacgacacggataagacagtgcgtctcgtccgatcggagtatgtgcaaggtatcagtcttttgaattgatcaaggttggcatccggccaacagctttcaaacggccacccgggcctggctgatcccatcagccgcagattttccaaacatcgaacccaatccacaacagcaaatttcacaaagcagtagtcaaacaaaactacgctaggaatcacctcacatccgcccatgaccgtgggcacgactgttcgaacagtttaataacctctgcagagggggtacactttacccacacaacattactgacccgaatcacccagcccgtgcagaacggccacgtctggtgacctaaaggttttcatgacaaggcatttcgaaagccgacacagggttgccatatgccgacgagaggggttccagaccaacaacaggttaggtcccagaccatactgtgccaggaagcccgggggttctccccgacaccaccctgttgaatccacatgtctctcggcatcaaggctcccccgcttagcaatttactcagccaggggtgtcccattccatccatgtggtcgcacttgtcttatgttcggatgaaattccaaggaaacggtccttaagtgcaagagcgggaaaccgtacacccggtacgttccccggtccgcgattttagaaattcatttagttcgcgagcaccgacctagatgtcgggttttccaagtcttttgtaaaacccaagttttacccaagatgtttctcagattttaagtttgaaggcgaccgtcgatactcgtgcagagtgcacgattaccgaggcgcaactaggtggttacaagggaacatggtataacaattaacaaaggaataatcagatgcaataagttaggtaggcccaccggtctgccttgcagacggagcaaacagattaagtgcaatcctatcaatgcataatattttgcaagcaatataattaagttcaaatataggctcaatattttcaaaggtggcttgccttgctcgagatcttgagcttgatcctcgaaatcctcgcactgcgagtcttcgggctccgaaactacacgtgaaacgggacaactcaacaaacggcgaaaataaagccctattattgacctctaagtgggccattagatagatctcgagatttgaggaattttggaagttgaatggagtcaaacggtcttacggttgggaagatattgaatttctaagatttttggatttttggtctaaaggaaaagggatttatttaaatcctttttgaaaagaaaagaaaagaaaagaaggagggaggggaattagacttccctcgggaggctatggcgcggcccgagggaaaggggcggctcgggcgagcttaatgggccggccagcccagcaaggcggcccaaggcgcgcgcgggcggggaggagagagagagagagccggtgggccaggtccatcccgcgtggtcccaagtgggacccgcttgtcaacgactcggctcaccgtgagcgaggtgcacgcggggcgtgctagggtttggggaggggggcgtggcgcacgcacgcggctcgcgggggacgcgggtgcggcgggcccacgcgcagcctcgcggctcaccgtggaccacgcacacggggagggcagaggggagcggcggaccggggtcggctcgacccggtcgcggccgaggtggcaccgaaatggcgtgttcgtggcagccacgtgggccggcgagaggaagacgaaggcgccagccgcgaatggacggtgggcggcggcggtttctccgggacgccgtgcgacgacgaggggcgacggggtgtacaccggaatgacaaggggggacgagagggagcgggccaacggcttggattcgtcggaggatgctcaacggcggcgaattgcggtggcggcaaccggcggcgtgaaaagggggaaacggcgacgaggtcacgaggggctgattcccggcggtgagagcatctacacggctacagaaatccatcccttgagccggattaggggggaaacgcaccgagggaggctggcgacgagaggcgcttcagagctcgggcggcgacggtggcgagcacacggcgagcgacggcagcagtcggggcggcgcgagctagctactggggtactacacacactactaactgagtctaatgggaggagatggatcgaggagggagaacgggggaatgcactaccgagacgaggcggggcgctgtgacgagaggccgacggcacgggagtgatctctccggcctcgggccggggaagaggaagaagagggcgcgcccgaagtccccttccgcgtcctcgttcgtgccggctcctctgacacgcgcgacgacaaacggcgacggcgaacagagcacgggaggcggcgacaatggagtggaggcgatgggacaacgagaggagaagagagggagggcgcctgggctttataggatggcaatgtcagtttgggaaccgacctagggcggtcaaaggagagggctagcgctcggcggtcgcggccaaaacgccgacagggagggatgacaccggcaggagagaaaagggaaaaaggaggagagaaagggggcttgcccccttgccactttggggaaaaggaggagggagagagggcgacgcggcagagggaggaggagctctgcctctgtcccttggaggctagcgcgcggagtggcggggtcgggttgatgacgacggcgatgacggccgggcggtgtggagcggagcagcgacacgggcggcaggcgcggcagaggctgacggcggcggcgaccaggcggtcggccaccacggcgtgcgcgcgcgggaagcaacgggcggcgcggctcaggcacgcgtgctggctcgcggggccgagcggctgcgcggtagggcaacggggccgggcggcgcagacggcacaggcgcggcacgggcggcgaccacgcgggcgcgcgcgcgcgaacaacggcgcgcgggggccgatttcgcgggcggggagctcgccagggatggaggcggggagagggagagcgagggggggcgctcggcgcggctctcgcgcacgcgcgggcagagcgagggagagagggagagatggggagggagggagagatgggccgagaggaattcggcccatcgaacccgagggaggcaaaatagacttttgcggagggatttgatttgggaaggatttggattcgggattgatcttgacgatagatcggggattgagatccggaaaggcacggagactgacagcaagcgaagaaacaattttcgcaattagggtttttaggaaatacaatttcccgctaggcgccacgacggaacgggcgctacatttacactatatcacatcgaacatttgaacacctgcatgaagttaaatatagactaaaaatataactaattgcatagattgcgactaatttgcgagacgaatattttaagcccaattgcttcatgatttgacaatgtggtgctacattaacttttgctaatgacggattagttaggattaataaattcgtctcgttgtttactgacggattctgtaattagttttcttattagtacccgaacacaccatgcgacaccctatataacacccgatgtgacacgtcaaaactttacacccctgtatctaaacacccgctaatttagtagccccaacatcttcagcttttctaggttctcgctagctagttactcaccgactatttgttagaatccttccctagctacgatctctgtgtgacacttgcctagcagttgatatatgttttctgggatttgaaaaatgtcaaccgcgcaaaatgtcaagcactgttgaagcaggaatatacatgcctagggggaaaaaggagaaattttagaaaattcatgcaaaagtcccgaagctttttttttctaaaagaatgtataattttgggggaacgaaaattgaaatcttcaaaattttgtgaagcgccaacaatgtggtggttagggtgggacattcggtcagaccaactatccaatctttgttctcaatcttttgagaaatttcggtaatctaaaaagtaaaagatcgaattaactaattcgttatcggtatccaatatgaccgaaatttcaaaagagatccaaaaccgcacaaatccagaaattcacgcaaatccaaaaaaatcacacaaattgccattggagtagatgatccgaggaggtagacagagagtacgtaggctgtcagcgcagcgaccattggcggcggcggcggcggtgcccatgacccaaccctcaccgtgcgccgcttagcattggccagtgtggtggcgtaacatggaggaggagctgtaggcggctcggcacgctggtcatggccatgggcggcgaagtgggagatcgatcatttcaagtaagaatctatagcaaggcaaggatatactcacttgaaatgatatgtgagttaggtttgcatatatacatcctataggatcgaacacaagcaaccaacccaaaaacttttagcggaaataaaagttacccttaaattgatggaaatctcgacgtagttttatcgccgccggtcggaccgctcggacgccgccggttagaccgccggtatgtcgtcggttagaccaccgaacccgataaaacataaatcgaagaactctcaaaatagatgacaactttattgcttctctgtgtttacaaagtgcaacaacagcactccttacaaaaatctcgactaaactcgaaaccctaactaaactatcaactccatgctctgaaaagcgatacagggaagtcacacgctccctctctatttataccaaaaaacctcctacttaaagtaggagtagaactcctagttccaaaacctgcagccacaccggccacagacaagtcggactctcctcgccgtcacagcagcgacacgtcctcctgttctcctgagccgactcggcttgccatagccccgagccaacctatcagatcaacacaaatgcatgcagccacatgcacgtgtacatgcatccacatacacgcatacacgccactgtgtacacatatatgcacaatacagtaacaccgctacagtacctcgagtactgtagcaaccatataatactccacaattttcctccgcgaacaccgacgcttgcacgcacacctcgtgaagcccgctgcgaagatctcttccacacgatgtccatccatcatgtaccatctcatatccaacttcgtcacccggtatccttaaccgtctggaccttaactcctccctgagtctagtcccgatccccaccgttgaccgaagttgaccttcaagaatcctgactttagtcaccttctcacatggtatcccgaccacactagacatctgttcctccctgaacatagtctcggtcctcaccattaaccaaggctgacctcaagtcacctgcacacaatcagacaaaacaaccgtttctgagcacaaatatcacaacctgacccacattagtcacacgcacacacaccaacatccacacatcttttcaaaccaattcatcgaataaatcatttgtaaagccaattgttcatcacaaatattaatcatgacaatgatttcacaattggtatcagagccaggctaggttaacatctctggcccgatggacatgtgtgaaggcctgatgaaccgtgggtgcctgcggggcccgtatacctgatggaccgtgggccggtgggggcccggatacagtgaaagggcggtgaagggctgagggacactaatgtgtgaaggaggagattgttgaatagtcccacattggttgtagaagggcaaatgacctaagatataagtggggagcccctcatctcaatggctagtttctgaggtgggaaaggccctttacgacttctgtataaccgtgaaagaaaatctcaggattttaagaattctgttccgaaattctgagtcgttggtctccatctgtgtttgagtggatatgtgaatgaggtttgcatacatcctgtgttagcttctgtataaccgtgaaagaaaatctcaggattttaagaattatgttccgaaattctgaaccatgcatgctgacaggtttggcatgcccctatggcggcgaaattaagacagtgttgcgcgcccttatccgtttgattcgagccaatccagaaaaccaggagcatcccggccgtctatccccgcactactataaatacttgcccggagacgatttcttctccacgcagcaagagccgatcgatcattgtccaagtctccaagcgatcagctagctgacttgacgacgctgcgagcagcggcagcaagagagcagcagcacaaagggttcccctttcacaagtgtccggccggctgcacgtaggccatggggaagcaaatggccgccctgtgtggctttctcctcgtggcgttgctctggctcacgcccgacgtcgcgcacgcgcagacgcagatcctcttccaggtgctttattcatttcacccataaacgggcaagggggttcacctgtgtaaaattatcgacagcaagtcagaacggctaatataattcacgtacaaccgaatacgtgtctgtaacatttttgtgcagggttttaactgggactcgtggaagaagcagggtggttggtacaacatgctcaaggaccaggtgggcgacatcgccagcgccggcgtcacgcacgtctggctcccacctcccacgcactccgtctcgcctcaaggccagcaagccatgcatctccttcatctcgttacgcttctctttgtagcatgtccgtttctaaatatttgacaccattgactttttagcatatgtttaaccgtttactttatttaaatttttttgtgaaatatgtaacactatatgtatacatataagtatatttaacaataaattaaatgataggaaaagaattaataattatttaaattttttaaataagatgaacggtcgaacatatttaaaaatataacggtatgaaatatttagaaagggagggagtatattacgtgacgtaaagtgtgttacggccagtgtcttactgcaattatcagctgatctagctcatcaggcaattgacatgtatgcatgcatgtgtttaaatcgatttttcccgtgcatgcacgcaggctacatgccgggacggctctacgacctgaacgcgtccaagtacggcaccaaggcggagctcaagtcgctcatcgccgccttccacgccaagggcatcaagtgcgtcgcggacatcgtcgtcaaccaccgctgcgccgacgacaaggacggccgcggcgtctactgcatcttcaagggcggcggcccgcgcggctgcctggactggggcccctccatgatctgctgcgacgacacgcagtactccgacggcacgggccaccgcgacaccggcgccgacttcgccgcggcgcccgatatcgaccacctcaacccgctcgtccagcgggagctctccgactggctcaggtggctcaggagggatgtcggcttcgacggctggcgcctcgacttcgccaagggctactcggcggccgtcgccaggacgtatgtccagaacgccaggccgagcttcgtcgtggcggagatatggaactccctgagctacgacggcgacgggaagccggcggccaaccaggacggccagcggcaggagctcgtgaactgggtgaagcaggttggcggcccggcgacggcgttcgacttcacgaccaagggcatcctgcagtcggcggtgcagggcgagctgtggcggatgcgggacaaggacggcaaggcgccgggcatgataggctggtatcccgagaagg

SEQ ID NO: 8353 - DNA, 765 bp, Oryza sativa
ttgtttgaagttgtcatattttcaaattcaaatttaaacggttcaaaaaatattatatagaaaaatgaccaaaataaaagttatagatcttgatgagttatacaactttgttattgatgacattttcagttgaagtcgttcactaacaaaaaattctgtttgaatttctcaaactttgaatttcaaatttcaaattgtttaaatagagtcggatggagaaatgaccaaaataaaaattttgcatctcgatgagctctacaactttggttttggtgacttttccatttgaaattatttattaaccctaatttttgttccaagttgtcaaattttgaaaattcaaaatctgaattattcaaatgaacttatttgtacaaaggaccgatacaatagttgtagatctcggtgagttatacaattttgttgtttaggatttttgatggttgtgtatgtgaatgaatgtatatgaatgagggatgttggggtgtgacgtcctagcctagggcttaataggattaatagaatactcataccgacaagttacaacttctcttccggaagctgatctccaaagaactttgatgttaagcgtgcttggcggcctgagagaggctagacggcatgcctaaaaataaaatttattttttttgggattatactcatctgtgactggcattaacttaggcccgattgagatgactcatctgtgacgggcattaacttaggcccgattgagatgactcatctgtgacgggcattaactta

SEQ ID NO: 8354 - DNA, 17850 bp, Oryza sativa
ttccttccccttccggccgccgtctctcgccctcgaccctatttaaaccctccccgagctcctcaccaccgtttccaccactcgccgccctctttccccctcggaaacgcgctcgcaccgctctcctctctctccgccatcgctgccgagctccggtccgtcgccatcgtcgccccggacctcctcccacctcggcgccgccaacctcggcttcgccgcgtcaccgccgacaccgtccaccgcctcgccgagctcgccgaccgccagaacgctgccgtccccgtcgaccctagccgcaccgccatctctctccgctccgaccgcctcctacgtcgccgtcatcgccaggggtgagccgtggaccgctgcctcctttccccccttccctttccctctctcgaggcgtggaccaccgtccaccacctcaccagtgaccataggggcacaggcgccgcctcccgccgaccgcgccgacgtggccgcctccgagcgcgccgtgtggccgcgtggggctcggccgtcagccatccgtgccctcgggtgcggctgacgcgtggggcccacggggccgaccggtgtgagcccgagtgcacccagtccaccgtggaccgtgaggctgccgcatgggccccactcccgtggacccggtccacgcaccctctcccctctgctgacgcaataaaccctatttttaattaaaatttaaatgaagaaattcgcaaatattcacattaagagcatataaacttcaaatggctatatcttggtcatttgaactcggaattggaccgttcaagtctctaatttttccttaagaagtcaagaacccatttatgtactttgtttctgcttgttatatggagtttattaaagtaaaagcctttttttctttctgttggtcgtgtagacgctgcagcttcggaagatccgctctacgtggaggttgaagccgacgtttgggaaagcgagcaaggcaagtcacatctcctttgaacatattgttgtcccatgctttaaaattattttgttttaaattaatgcattatcgctttattcaaattcccacgttatcactgttttatttagccatgcctatttacctttgttatgaccttattattattgttattgttattaaccctagagtaactaaaacctcactggtgtgtactgtattatggtctcactagtaccaattttaggtagatgcttcgccatttaaattagacaaattttaggtggttttataattctagactttgggagttctcatatcagttgtaccttgtggaatggttggcttatgtggaattggacacacaccttctcctctattcaaaaccctcaaaatggttttaggctgggctcgaggtgcatggttttgatagaagcacctcggccactataaggaccggtcttcgggcctctgttgcaaagcactaccgtacttccacatgtctagtgggtaaggcgtagtttgtggctcagtctggtcatgggcaaaagtacatggatagggatatacgaagtcgaggcttgatggacatctcgaggacaaatgaaggctacacaagctgtggcccgatagtcgagatgtcacggcacagggccggtgtcttgttgctaggggctcaaccttggttacctgtctcgggattccggccatagccagggttgggtcggtactcttgtttatggctaggatgggttgggaactatgtcatgtcttccgtctgtatgccgtggtggtatgtggcacgtggttacacgtgaggaagacgtgtcttgtgggtaaagatgtatacctctgatcagagtataatctattcgaatagccgcgcccttggttatgggcaagcctagcaatgtacccaagttagtggtttattttttaaaacttgcttaacaactaaaatgtgaaatggttggcctgggttggcttgggacgaactgggacctgctgggtctggttgccagttcggtctgaatcatcataggccttgggttaaggcaggttcgtgggggttcatggccttgattaataacactgtgtagttctaggatcgtctttacaaaatggccctgagcaactaaatgtcttctaaatgctgtttactgcaaatcctaacccctatattataacccccttatactccttcacatttattctgcaattgtgggtgtgtcttgctgagtacggtggttgtactcaatcttgctcattttttccccaacctagaagaggagttcctggaggatgatggcgttggtgtctagctcgtgcctgccgtcaagtgcctgtggtcgtcgccctagtcttccactgtttttgtttatcttcgtgtgtgctgagccttcgtcgcccatgtaataaattaactatttacgcttccgcttgttaaactctgaattgtatcaacttttggtgtaccttgcctcctgggacaaggaataatacacgcacttatggaatgcctgttgggttaattccggtcgtgacacactgataggtggggtctacttgtcgggatcatccctaaccttggccatgtcgcgatcccttgtcacgccttcccacccacgattgctcattcaaactcacgaggacgtgatcatcgcccacttcccctaccttcttcacccactcgctcacaatagctagcctttccacccactctatccttcacatcacctccacgtcaccctagccaccgcttgcctctccttaaccctgcctcccaaggctaaaaaggggcccctagcctccactactttttttccaccctcacctcctaaaaccaagcttctggacctctccattgctatgaaaggtaagcattgctgtctcttccattcttcgacgatgtttcgacgccgttagggactgtagcaaccgccgctagcctctccatgtccttcataggttcaggtgtcctcggccatggcttccccacagctgaggactggtggagcattgtctttgccggtgtcccgtgagtcttctctccctgctgacttttgaccgtcatttctcgcgtctcatggcatcgtggacctccttaaccaccaccaccaccccctaccttcgcctggtcaaggagatgcttggccacctcttcatcttcaccaactgccagtgaattgctgtcaatatcacttacccgaagcctcttgccgcttcgcgccccgccgttggtttcctctctatgcgcaccgccgtcttcaccattgtgcactcggcgaggacaccatcctattatgcttcctttttttccactcccatcgccacgtcgtatggtcgctaccggcaaccatcaagtcacacatccggttgtctggcaagccgacccctcctcgccccgtccgtccaatctgtcatcctcgtggatcatctgtggctgcctatgtcagtgccgtggtgacaccacctcaatgcacctgactaccatgcccgccatgtgcactgtcgcatggcaaggacacatgaccgtgcaccagtgatcccgggcttcgatatgtgctggcaaatcccggtcattgacctctcgtggaccacctcggcggatttggtccacgagagctggcctcccttcctcgctgaccgtgaggcccgcctgttgacgccaggttccccactactgacatagtaatcttgttataatgcgtcatatatcagtttataacttctacaaatgattacaatggttaaaatttctaagatttataactaattcattttaactaggtattgaacattcaacatgcacatttgctctaaaattttaaagaaatcattacaaatgttagatgtattgttttatgttgtcttatgtactattttgcctatgggagtatctaaagtgaaaaaacttctagaaataactataatataattgaaatgtaattatactgtaattacactgtaactacggtatagcttatataaaacttgtattcaattatggttttgttggttagcagcggaatattatacatgacatgtgtggaaatttctttctagcaatttttttccttcatgcacaaatctcaaggcaatcaaatggctacaaatttgaatgttcattgagcaaaaagaaaaaatttacgaaagtttttagcaatttcgtttgcgtttttgctttgtttctcgcttccaacgctcccatttaggccatgtttagtttctactcaaaaacttttcaccctgccatatcgaatgtttcgacacatgcattgagtattaaatatagacaaaaagaactaattacacagattgtgtgtaaattgcgagacgaatcttttaaacctaattgctccatgatttgacaatatagtgctatagtaaacattcgctaatgaccgattaattaggcttaataaattcgtctcgaagtttacaggcggaatctataatttgttttgttattagtctatgtttaatacttcaaatatgtgtccgtatatccgactgacatgtcaaaattaaatttgaaaatatattgtttatttattttttcctcaaaatattcgggatacaaatttttcttttttacaaatataccgtcctcgctagtttagagtgagaaaacgatacggtatcgtataactactgcacgagaatgacgtagggtgatgacacgacacggtttcgcgaggggtgtcgcgagagcgtacggcctcgcacagtcaatgtacgagaccgcacggcattagctgccacacccaatgattaatgtcttaatcacattgattagcaactaattaatcatcaattatcattaaataataattaattatagtaattaatcattaattttgtacaagacattcggtagcactgtttctttgtgcgatactgttcggtatcgttacttcattgttccgtttcgctgtttcattatgcgagaccgtgctctcgtacaacggttgtgcgagatcgatatatatttctgttaataaacttgtaccccgaatttttttagaaaaaaaataaataaacagtatattttgaaaaaaaaattaaactttttacccatgaactagagagggcctttgtacgagaatatcgcagaagtcccaggaggccagcaaggcaagttatatgctctttttttttgaaacgttttatcctttacaaataaactttcatgttttataattacatatggatacatagggacacctatgtataatagcgacagcaaagaaatgatttattatagtaggtgttaattagctttaggtgtctttgttccgcggccggcggcggcccaccttcagcagatgcagcagctcgcacgcccttgtggtccggtcgcggccgcgcgcggcgcaagggcggcgtccggagaccacccgatccgcagcttcaccgcccaaaaccgatgctccgcccgcctccacgtccgccactcgacaggtaagtcccgtagtagaggatggggaaaagtggctacttcgcgctaccgcttctgttcttccaactgaacaatctatattgccaagtgttttgggtgataatcgtccgatctgggaaatgctactagtagtacatgatctattattgttcattttattgcacacagccaccgtgtggacgtactgtatattagttgctgcgtcagtcaaggttgctgtagacgtagacaagtagtattgggcattttctttccaagatatcgagggattgtagtacttattatcttgttaaaatgttggtttggttcatccatgtgtttgggatggacaatttctcctctctgtcctattacacgattgagcccagaactgctttggacattcaatttgtggtggtgttgcgtctattagttatgtagcacagaagctggtcttaaatctgcccgtagaaataagtgaaataggtgaaaatttaatacatgtaaaacaagtaattataaaattatctctcaatatcagcattacacttttcactgaaagaggcatgtctatgaacatgtcaccgacattcccttgttctggggcacactttccagccttccagttattgctggagtttttacaacagatatagcatgattattgtgtaaatattactagttacagtagtagttagctattgcacaaatattacttcttctatatctggaccctcttcttgcatagactttaataacttattagtgatgaagttctggttgaatgtggttcctcacttcctcctgttggtgtgctactgacttcatcaactgatacaagtttctgcaccacacattccatggtaggtcttctgactctatcttcttcaaggcatgaaacagccaattccatcatcattcttgcttgtgcgctgttgaattggccattcaatcgggtgtcaatgaagtcggcaatccaaaactgatcgtcgccatctgacttaagttgctctgagcatagcctgattacccttcccagggccattttcacgtcctcatcatcattcttttccaattctgaaacacgagctcccttcagcaattcgaggagcacgactccgaagctgtacacatctaccttcgctgttattggcagactgtaaacccattcaggtgccaaataacctcttgttcctcggatccgtgatatgtctatgttagatccatctctgttcaggagctttgcaaggccaaagtcggcgatcttcggctccatattctcgcccaacaatatattttcaggtttcatgtcgcagtggatgacccactcagaacattcatgatgaagatatgccaatccttttgccaccccaagagcaatattgaatctttgtgtccatccaagtaagttctgtgagcccccactgccaaacaagattttgtccaacgaaccattctccacaaattctgaaaccaatatcctgtgtggaccgtcagaacagaatccccaaaccctcactagatttgtatggtaaatcctgctaatcacactcaattcatgctggaattcttcttcaccttcgtttacgtctaccaactttttcacggccactaccctattgtctttcaagactcccttgtatacgacgcctgatgctccccttccaagctcatccttaaattttctagtggccaacaccaactctctgtaggtgtacctgcgaaaatggttagctatcatttcatatccggcctcagctggccatactcctctgagttgtttggcctccctcctcaaaataaaccatcctaataaaacaaataatacctccgccagaaatatcgctgataagaacccgtagaaatacaaaaactttgatatgctctgcccactattaagtgtatccaaaaaatctgctatggaaatgttgtttgttgtattacagttagggccatatttaggaccaagaggctgtgaatggggaaatgaggaccttgacacatttactccctcaggaagcttgagatacatggtaccagtgctgccaaagttacttagtgttacaccaccaagaagaacagactttggatagcaatcaccagttccttcccagtaggcgaaacccttacacctgcagtctttcaagcatatgttcttgcagaatccaagaggaacaaaacgataaacactcagatcataccccaagaaatcagtattgcggagtgcaacaaatttcaccttctgtccatcacaactgaggttgacctttgggctgcaacctttgctccggtcacttgggtcgatgatctcgtaaccaggggcacaagcacaggcaggaacaggtgtatacacacatattccattctgaccgcacaaaccgcgtactttgcagagctgaggaaatgccatccatgtcactgaccatgttctgtctaccttatcaagactgtacagcctgagattgccatcataatccagtgttagtctcctcactgtgccaggaccccaatcagcagctatgaatgttgcattatcacttccaaggaaatgtccccagctgtcaagaaccccatttgtggtgctgttgaatggacttcttagctttgcccaaatagtcatactagggtttggccagtagataaaagatatgttcttctcatcatcaaacagtgaaagtaagtactgatcatcgaaacggaaactgtaatggccaggaacaagtaacctatttgtagacacaagctttgtagcagcagtgatgctctgagtgggtaacaatgtatcagtaggagaatcaaagctttgccacagagtgttaccactttcgcccttcacaacgaggttcccggtgtccaagagctgagcttgagcatactgggtatctgaagagctaacgttgttagcccacacaatctggccagcataatctttcaaaaacatgccaccatcgaatttcaactcaactttggatccccaggtgtacacagggtggagaggatttgcgctccagacgacggggttttcggtcaagttggagaaccagatagagaaggtggaggcattgggggagattttgtagaagccacaggtgaaagtgccatccggtgaatggagcacatcctgtacagacagggaggagcctggcttgaggaaatcttgagctgagatgcacaaaagtgggtggatcagagtgaagaggagcagagaggcagagcttgcaaccatttttggtggagctgcagctttggagttgatctttcaagagttattaagaagccactggctagtggccgctaatggagtgagcatcttggaactgcaggtttgaactttagtggaagacaggggcgaagctatagccatctatcggggtccactgaccccgacgatttcttgtgtacgtttcttactccacttaattttaccgtgtatgaccccggtcgataaaaacactagaccccggtaaccatgatttgttatagcctgattaattagcaacttgaaacgacacgtttgagattagcaagcaacaaataggaattagctagcgctaatgattatacgtcagcccaaaggcccaatatacattttggtaatcttagcagtgagtatttgtgcatttaatgtctactttgtttacatattaattatgtccggtttttaatacttcctccgtttcaggttataagactttctagaattgatcacatttatatagatattaatgaatctatacataatatgtagattcattaatatctatatgaatatgggcaatgctagaaagtcttataccctgaaacggaggtagtataatttatagacatgtccgtgcgttgcaacaatctcctatgggccaatggttgctcgtagcattatttaggatatggattttcatccctcgaggggatatcccctcattgtttgcatgtcatctaaatagttataaaaaaattgacaacataggttgataaggaatatatcactctacaaacatgcaaaatcaaatttgacttctacaagttacaataaaaaaataaactgaaaatagttatcgtacattcgcatttatatttgttatttttgtttcaatttgtagaagttaaattttaacttgcatatttgtggagtgatatatttcgtattaatctagctatttagatgagatgaacgaaacgagggatatcccctcgagggatgaaattactttccccgttatttagttttctgttgggtctggtttttccccgtattttttctttcagggtggatgataaattctgtttttatgtagtagagataaataggcaagcaaagtattatggagcgattcttgaaaaaaaaacccccccgctattttagaagatctaacaatgtatcatacactaaattagtattgaccccgtcgaccatttatcctggcttcgcccctggtggaagatgcagccattgaacaagtatgcatatgttttgcttaaagtcagggtgtgggtcgtgttactgtcggatgatcagttgattattggaaccacttgtgcttcatagagcactaaatcaatgggggaaaatatttagttattttttgtggtgatgcaatatgtgcaagagagactggtgttgttacttacacccttcgtcccaaaaaaaaaaagtccaattctaagtgtccagatttatctctagaattgggttttttttggacggagggagtaaaccccaatcataaatatttatttactccctccgtcgtaaaatataagttcttttttatggacacagttattaagaaagtatatagaattaaatgtgggaaatgtataattggatgagaagtgaatgtaggtaaaaaaaattgaatggttgagagttgtgattgattaggaagagaatattggcgaaaaagttgttatattttaagataaattctaaacactaaaaattattatattctggaacagaggaagtagattttatgaacttattttaaatttatggtcagtgtttaaatatttctaactggagtgtaatatactgtgtaattagatgttaggggaacgagcgtttgttattgtactagcgttttaaacaaattattcaccgaatcattatcgcggattatatattttattattacaaggataaattaaatattttaaaaataaatttcacagaacagaattttttaagaagtacccagaggtccagagctgctgctgagaggatcccctgtgactcgtcgattcagcgggagagggagtgcagtgttctcagcaggtcaacacgccaggtcatcggtcagccaccaaacatatttttggggggtggagttcaaagatgcgaatggtaagccagctggataattccttgtaataatgtacctaatcctcatccgtattcgcctaactcctgtcgggtgcccccactgaaatgccgcagcagtagatccacacaaacgacactgggatttattccttaatcatgaacttccaacagcagcttcccatatacagcgcatatacaccaccaggccatgcatcttttcgggagaccaaaaatttatgtcacgagacaactctattgcagcttcccatctctcctgtctcagaataatacaaaatgggaggtacataaaaaaggaaaaaggaaaaaacaacgccatgtacgttttaacatgttctatggaagttgaggagctgcaacaaaatttccaaacaaagaatggggggtacagcttggctcgaggagggaacccattttctaaggacgaagatctacataaaaccagacgcagcagagaggaacatcaacagcgggagttaaaaaaaaaaagatcaacgccacgattacaaaaagtagtcgggggtcttgcgcgttgtgtccggctctatttgtcgtggggctggatcgaactgtaggaagttctgatccatgttctccccgatttctagaattgctgccatgttaccacagcggtaacagtagtttggggcgctgaacaccgtgacaacgttcttgtcctgcataacaatcattgtcattaagtatcaagctttttgttagaattttccaatttggtgctcaagtgcaggtcactgatggtaaggtaaggttctatgtacatgctcctatgtgatgatacatgaaaaccaaacatatagtaataatactaggatcaacaacaaaccacataccatacatccaaaccaagaaaagttctgctcatcttatagaactgtatcaagcgttgcattctttatgtccgccatagattgtaaatatgttatgcctcctagataataatcagcaatcactatacagcataaactatgtgggggaagggccgaaggggttgtcattgtttaacagatcactgaagggttgaacaagctactaaaacttatataatgcgaagttcaggtaccataacatcataatgattactagattcagcaatcagcatcagcatgcaactatgagtctataacttagctaaagcaccagaaattattatgaataccaaaatggattagcctaacatagtaagaccaataataattatgtgaacagggctctcagagtgggacgaatgaaaacaagcaaatggaacattttataccaacctggcaccaattgaagccttccatcacaagttgatgggcccttgaaataagggtaaggccattagtatggttgaattgttgtgcaatatcttgcccaaacgtgtatcctgcccctcttggagaaattccccacccacatcgatcgtccgggtcagaccacaaaagatcacacatgggcccttcatgagggacctataaccattaaagagaacagggtgcataagtcaaaacatatgatttccataaactataaattatcaagacaaaaaagtgtgcaaatacagcacatatgttctacacaaagacggtcactattacgcacaattgctcaatgagggccacctttagttactagtttaagctatgtacgaacaatggcacgaaccaacaaatttgatatataggcatagcaggtactaacactaaaccagcaagcataatattatttgtgaatggtcatggcgagtgaggtcctgtttagtcttaccaaatgcttggccaacaataaagtaagaaatatctgtaactacttaagcaaattgtacaggaatattgatcttttagtttgtttaatttctgagctcttctcccatatcccattgcatcttgtaaaaaagaacacactatggtacatcagaaaatcgcgtaactggaacctattactccctccaggttgataatagttgtcgttctagacaaggctgatgtcaaactttaaaatctgactatgaataatttccaaaatatctgtctcagaaatatgcagaccatatgtatagattagtcttaaaaagtacttcaatagaatcatatatttgttgatatttctatatatattataatagaaaatagtggtcaaagttgttttttcgagaccatgtactcgtccaaaactacaagtattatcaacctggagggggtatatcaacctttgtatatcatttgatcctcacccagaacattttatgtatattaatataaagttattgtgtgagatcaacatatatgagaagaatgccattcgagccatgcacgtgaaacgatgcagataaattattagagcacaccgaatcatccaatggcaaagaatggtatatgctatcctctaatataggttcaattatttaacactcctggacctgttctcaagctatcatgaatgagcattacctccagttcaaaaggagggtgcctatggactatggagacatggcaagtaaagacgatggtgcaaaatgatgcataattagatcactagctcaaaggtatgggtgaagtgttgcatacctcctgtatgcgatcgagggcacgaatgttatccaatgtatccaatgacggcgagagaccgccatggaggcaaaagacctacaaaatgaaatttttcctcttgtcaggtatgccatatacatggacaagctgagttcaatgtccatattaatagaacaaacatttggcaaaaagagctaacctggttttctacaagagctgtgagaggcaaataatcaaacaagtccgtgaagtacttccaaacatttgcatttccatacttccgtaagcattcgtcatagaagccatacctgtatccaaacactgcatgtcaagaacaccctagcacagtgggtgtgcttgcattttacaaagtagaatgcagcagaagaaattggcaaaagttcatgtcatgacaagaacattataaagtaggattcttgctacatcaatcttcagacccagagcaatcataacttttttactttaagaaagttcatggcagcaagtcagcataaagttgagatctattcatcatattctaggaatttggcttaaacctccagtagatcattggctgccaatacctaaacttctatgtggggttgttagatcagattagggagtcagaagctgggagcccttgtaaattatttctaaataactctgcaactcaaatctcatgcaacgcataacccaacttacaaagtcccaaaacatacttacgcagctaattatttcaaaatataaattgatgatctttattgctaatttgcattatttctttctttaggtttctaaccaaaaaaagtcatgtaatttaccaaactttatgatttataaagcgacatcaacattacatgatctaattcttatgatatcatgctagctaaaaactacagtaccagataccgtgctgagtccaagaaaaataaatgtgttttgttccatgacctcttaatcaagagtggttagcagggatgcctttggccattttggatcaccagttcagataacaaatcaccttttgttgttttctccatgaaatggaatattcagagttcagttggtgtcgtagcctggagcccgagtcaaccaaataagccagcaattggtgattactttccatgccttttaagaacaaggaatttgtttcttaaatgattgtttattgtcattgatatatctgttgaaatgcaaatcgttgtttaaatagactgcctgcataataagcaaccaggttgttttttacgggtgttacgttgcaagaaattattttaactttgtaagtctttctaaaagtttttgctgttgagggttgtcaggctcctacaaagtataacgttttcatagtcatctgcacacataaccactaaaataggcgatccgtgactctgccactgcataattttaacaattcatcaatgtttgaattcctctttataatcaactccagattactattttaactcaatccacaattccatatctaataagatgtagactgagaatagagtgttgaattacatggcatgaatttccataccaagacaagagacagattccttattcagcttataggatttctgacgtttggcatgacaccatacagccattatgttacccctattagagggtattcaaccatatggaagtggagtatcatctatgaaaactagaaacaggatgcaatcctcctgattctaaaatcgaacaagttgactaacaaaatacccaggggataggccatggggtaccaaggaaacaattgaataaccaaatataataatgcctgtgccagaatttgcatcttacagatattatgtggccacagaatctagttcaactaatatgctagttcacctttgcaaggatattgctatgctcaatatcaaaacaatgtatttatataagacaagcttttgaatacaactaatcaaggaagttaaagctactaaggtcacaatgtttttcttgcatgttaactagtattgcaaataaaaaagcgcacaaaccaaaagatatcgagacaatgtaatcgtgatcttccaacagaaaaaaaaaaactgttactctaattcatgcccaacaaaaatatattctttgtctaaggaggcagaaaagatcaatttcaagcataatcatttggtaagatttgcagcatggtcatatatgttttgcaaaaaattgcaatatagagatactgtgctgaaaattggcaattggcaactattgaagacagttcagagtttttttcatatcagaggaatagaaactcacacttgggtgatttgtctgctctcgtgatttcctctcaatattgtgattctgtctctataacggactttaagagccactagtaatgtaacagtctccactgaatagtaaccacggtctgcagcaagcgacaacaaaatcaattcaactacaaatagaagaaacaaataaacacaatacaggaaaaagtaattgtgatagaaaaaaggcatatcattcaactgcttatctgaaaaggcattccgtacaaattgtctaatccttaactgaatggtgccctgtttgtccgacatgttgtattgcatacagatttcagatcaatacacatcatgagcatgcaatgaatacacatagacaaccatagtcatgatgacctcaagtttaagaatgcttgacatgtacgattaccaaaaccaacacggcagcagtgtagcggaaccaagcgacaagatccttgtatgttagtgtaccggtggcaacaagctatacatgccatttatgttgaaagtacatgcaagctctccgtttccatgcaaccttgaaacatttaaaatgaagcaaaccaaaaccttggctaacagacatctcatcagttccctaagacagtaagactccatataatccaaggaataaacactccaaagcccaaggacgttcatcccatcaagaaaaaaaaaatccaacatgcctaatatgtccaatagcaataaatactcacataaatttctacttgattaatatacctaatccagacgaacaacataagaaaggctagcatcaaaattctagcgatccatgggacaacataacaagaacatgatcatcaattcagcacattaatcagaccaaagcactgcctcaaagctcccaaatccgaacacctcagcacctcaacactgcatcaggatctaacgaattcatcccctacctcacacgccccatttataccagatcgattggtcgaaccaccacaccaaacccgcagatcggcccaaaaggggaacacacgcgtccgaggccggaggagaagagagagagagaggggtagcgagctagaaacttaccgacgtagtcacccatgaagaggtagttggtgtcgggggagtccccgccgatgcggaagagctcgatgaggtcgtagaactggccgtggatgtcgccgcagacggtgacggggcaccgcaccggctgcacgttccactcctccatgaggatcgccttcgcctgctcgcacagcgccctcacctccgcctcccccaggaacttgcactcccgcagctgcgagatctgccggtccagatccgcgtgcgacggcatcgtcgcctcccccctccccacctccccctcctcctcctccctcctcaccagggcgccgccgcaggggaggtggcggtggggggcgcggtcgctagggtttgcgggggatcgggggaggtggcgatgcaggaggaggtgctcatgccgccatctctctctctctctttcttctgcgaccgcgtggttgctcgcgtcgcctgtataggatgggggaaggaaaattgtttttttttttagggtgtttgttttggttttggctttgatgggggtttggtgatttggattggggcgaaaagtataaataaatttttgcgagttgtttaattaattcggggggaaaggtggatgggggagtgctttccaggtgtgtagagattagagaaagacaggatgtttcgtggagggatgtctgcgggtgcttttcgtatacaattgctcaattagcagggttggttggttacattaaatttaaattttatattgattttaatgttttattaaaaaaattttatttacttttaaatcgttaaaaacatagttttacacaatatttttattcgcaattttttctaatacatcgtgtcacatactatcagtatatagtcaactaatgggaccatatgttctaattgtagcttacggcatctgtatatctttcgaaagaaatttaaggttcagattggtataatataatgatgtgatttgtgggagataaaaatatatgtcatatgccactatatttgttgtgttataaatctctggctataattagtgattggaaattagccatgagtcatggcatatggcttgtctagttttcactcatttgtccaattgtgcattgttcaccaggaatgattgtaggaaaatagtttgtggctttgaatatattgcctgatcattaggatatatttaatagcatacttgcattaagaactagattgaggcacatcaatttatcattttggttcaa

SEQ ID NO: 8355 - DNA, 7512 bp, Oryza sativa
ctttatcggatgaagaaatgaccaaaataaaagttatagatcttgatgagttattcaactttgttgttgataactttttcagttgaaatcatttagtgtttaaaaatgttatttgaagctgtcatatttttaaattcaaattcaaacggttcaaaaattgttatatagaaaaataaccaaaataaaagttatagatgttgatgaattattcaactttgttattgataacttttttagttgaaatcatttagtatttgaaaatgttgtttgaagttgtcatattttcaaattcaaaattcaaactgttcaaaaattgttatatagaaaaatgaccaaaataaaagttatagatcttgatgagttgtacaactttgttgttgatgacttttccatttgatatcatttactatacgtaaaattattttgactcataaattgaattattatactgcaagttaattattttgctatagttcaacttacaaatataaacatttcatatgaaaaatgagaaaatactcatcgatgacgggctttagttaatgcccgatagagattaagtcatgtagaagttgaatttaaacttgcatatttgtgaagtgttatatcgcatattaatacaccttctcaattatttttaatttttttataaccattttagtgacatgcaaacaacaaaaagatatctcctcgagagattaaaataatttccccgtcacggctacgaggcacttggaggcaccgcgctggacgccggagacgagccgttggggaagcccaatcatggtcaagctgaggaaaacgaggcagctcccgctgacgcctgacggacgtggcgaatgccaacaggagtgagacaatgaagcgcgtgttgctcgcgtgcttcgcctcggtggggaggcagagcgaggcggtcagcacggtgaagccgaagacgacggcgatgccgctggccttgaggttcgccttcgccttggcattgcggagctcttcttcctccttcctcctctctgtcggagcaccgccggcctcctcgtcctacattggaaggtctgtggatgaccaacggttaatttgtaaatacagtggggaaacaattttttttaagaaaaaggaaaaaaggcaaaagaaatgaaagaaaggctaaagtaataagttcaccggccgtccctcaactttatgccgagtctgtttgaggtcccctaaccacaatatccgaaatgtgtacccctaaactatataaaaccatccaaaaaaggtcccgaggcagtatagatgcctgattttgctgacgtggcatcctagtcagcaaaaacaattaaaataaatatgtggggctcatatgtaagtgagagaaaatagtgtgggccctctcttctctccgcttctctcgagcgggcattgtggcagatgggggagaggtggccagcagtggagcaggggcagcggagagacggacggcgcaacagtgagctcagcggcgaaggagaggagcagcgcgtggcgtggcggcaggagagacgagaggactggcacgcagaggccgagctgctgcgccatagcgacggcctcagcctcggctttgccgtgatggacgatagcgccacgatgctcggtgcgctcctccatgccgcttaccgacacagcgcccgccctccccctcccccaacccggtcatctgcaacagcagcttcaacaacagcagtgggagcgagcatttcgcccccctacctgcaggaggaggcttcctcatcggagagcagcagcatgtgttgccggcgtcctacgccgcggcaggtgtccgattcatggccacgggagaagaaacgccgcagagctttggctttggcagcctcttcaatggcgatctcctgcaggaggcgaacgggagcatgtatcattatcagcagcagcagcggcagctgggcattgtgccctcgtcgcagccactgtcagggactcgagtgggctgcacatgggccgctggctgcaccacgggctggtcagcccatcgccaagaagcccaagcaaggccaagctgaaaattatatgagcagcagcagcttacaggagatggatcgaacagattcatttggccaaggcggcgaacgacggcggcggcgacctagaggctggctggcctctttgtcgatctctcctctatctcccttcttctctactagtctagaagctactagaaccttctagcccttgtatccttccatcttccacctcagaaccactccactattgtaacagacttggttgttccctgtgttggatttggcactgctatttctgaaattacattgttgagtgggtctctaacaatttggtatcagagccaatccccaccaagctcatcaagcaagctgccatgggaagtgaggacaagtttaacatgcttttaaggatgctcgaagagtgcgagcgaaggcgggaggaggcagaccaaagaaggagagcagatttcctgtctctcaaggcaacaatagactcgtggatgccccaagaatagaagaaagctgaagaccttcagtttttggttgaggatgagcagtccaaggtgacgcccaccacctgttcaatggagtgccccaatggcagcagcccgagcacaacagcgagatccatctacgacgacgagggggctactccgacgatcatcctggagcttggggatggtgaggggaaggatcgcatgcccttcatcattagcaaggacctttccgagttgacgcctatcatgtgtttgacaatatgctcaagcctcgacgtcgagcctgatttcaccgtggctgcggtggttacatgctccaacactgccatggactccaaggagttggtagccaccgatggtgcaaccggcaccaccaacattgacccccgtgtttgttccaaggagacgcacaccaagtgtttgttgtttggccccgatgtcaacggtgtcactgatagaggtgtgattgtgttccaaagtaggatgggtgtgttcaaggtcgttccgatatcaagtcagtccatggagttgatggttgacgagaaagcaacctgcactgacaccactcaccttcccaaggtgatgcacccaagccatttgatgttgggccccaacgtcaacaccggtactatccaggctggggttgcgtactcactattgcttggcgcgccagaaggaatagcatcctcgggaaaggccacactagtcatggcacaaaagcttaactccaatttctgcctaaaatgggtggcgctcaacaggtgttcgaccaaatgctccaagggctacaagaagctgttgatgagtcatcccaagagaaacccatggccacctccttgctcaggtagagtggttagaagatggaaggagtggtatgtgccttgggctgcgggcaattatttggggataatattttatttcatgccaccatggccaccaccaactcaaattggaaccataatactttggctgctggtaaacacatggttgacggaagtagagctgaaaccgtggcctgacccacaaccaagtcaatatagcggaggcgtgatgtgaactgagcaagtcccatagcctgcaccagtttttgcacatttgatgggatatgatttttgcagtgcaaattgcataagagaccaaacaccttctgttgcactatattgtgcacctaaaggagatttaaatcatgaaaaatctgatcgagctcataaggatacattggtggcaatatttaacttggaacagttccattatgtgggtggtgaggaaaaagttatagagggaatgttatatggcctaattacagtaaactgcaactacttgatcattcctgctgctacaatgacaacaacatctactcaaaatatatatatggagcttgttggttggaggctagagaagggttaaatgatatagctaagggaagaacttacaaaatttgtaagtccatgcgcatgacacttaatcatgttgagagctggctacagaacccaacaaacatattatacaatggtcagttgtttaactgtccagtgggggtacattttggggtcagaaggatttctgagattattgctagaggtgctggtgagaatcagaataggaaggttaagacatgtagttatgattccatttttgatttctgtgagaataatcctagtgatggtagtgctgcagcaaggttttccattgatgggattgataccaggacagattcagagatgatatatgcatcaattgcaaacagggattattggtctgttaaattattcgaggtcataaaagaggggtgcccaatacgccacttgttactaggtgatgtcaagatagaacaattgctgcaatgtgagacattcagtacaagacagacaaatatagagcaagttatcaagctacagctgagcaattccaaggaaatacaagagctacaggtaccatgggatccaggaggttttcttcatcggcttggggacaagccaaatttcaagaagaggggattgtcaaggactcgggtgggctgcacatgggccgctggctgcaccacgggctggtcagcccatcgccaagaagcccaagcaaggccaagctgaaaattatatgagcagcagcagcttataggagatggatcgaacagattcatttggccaaggcggcaaatggcggcggcggtgacctggaggctggctggcctctttgtcgatctctcgtctatctcccttcttctctactagtctagaagctactagagccttctagcccttgtatccttccatcttccacctcagaaccactccactattgtaacagacttggttgttccctgtattagatttggcactgctatttctgaaattacattgttgagtgggtctctaacagccacatcatctgaatgtgagtagtgactcgacaggagcaaaaaacctaaattgaatctgacatttaccattgttcttccatcattcgtccagtggtaacattttacatgtcttgcatcaccgcctgctcgccggcctccccatctccttcctctctgcttctcgtgcctcctccttaaagcggcgttcgttgacgttggagctccctccttgccggtcgtcgacagtagccaccgtcgacaaccacgacagtcgtgcgcgggcaagaaagagggaggtaacatctgccgccggccgtatctggcgctcatccgtgcccgctgcgctgctcctctcccctgccggtgcgacacgcgctcctcctctcctgtcgtcgtcgtcgcgccggccgccacctctcctcctctcccgccactgccatcgcgtcggcctcttctctctccctctcccgccgttggccgcctctctccccctctcccgccgcctccgctccgccgctggccgcctctctcccctctgtcaccacgccaactcgatagaatcaggagagaagaggaaaaataagaaaggagagatgtggggcccacaccattttctctcacttatatgtgggcctacatatttattttagttatttttgctgactaggataccctgtcaacgaaaccagacatctatactatgtcgggacctttttttagacggttttacatagtttgggggtacacatttctggtattgtggttaggggacctaaaagagactcggggcctgatcggttcagttggctgcggcgttttggactgcagctgtccagcctagacgatcggctgcaacccaaaattctacagcaactgttatgttttgaatgtgcacactgctgcaaagagcagctgcttgttggttgttaggaaaaagtatatacgaagtccctcatctcgtcatcggattacaaaatcatttcccaaccacaaaaccaggtatataacatctctcaaaatacaaaaccggttcactctaagtcctttgacggttttaaccgatgtgacagctgaatcattgtgggacccacgtggaccccacatgtcagggtgtccatgtcatcatctctctttcccctcttctctcccttcctcccactcttctccttgtcgtccgccacgaaggggtcgacgatgcatgccgtcgtggcgccgctgccgctggttccgggtggcgcgggcaccacaagcatcggcgccccggcagcggcattgccacgttgctcgcgctgccagagaacgcctgctcgttcgcggccgtcgacgccaccatcgcgtggctgtacatcctgtcgagcaccatcatgcgtaggccctggcccgcacgtcggcggcgatcccgttccgggacttcacgcactctatctcgtcctatttcttctcgatcaaaacacatcccaaaaatccgagaaaaatcaaggaggagcgcgggatactggcgcatcctcgtgagaaattcaggctagatcgatggcggtagagggacaggacaaaataagaaaagaaatacagtagtcttctagcaaaattgttgtgattttcgtctgatcgagacggcctctccatctcgatttgtattctatgttctagccttcagggagctccagagcatgcatgcaggcgactaggcgaggcttccagggttcgttctgctttgaattccgcctcgataaggttactaatctctatccccttggtcctatgatgaggcagccgcaacgccacgctgcttgcgctgccgtagaacgcatgcgcgttcgcggccgtcgactccgccgtcgagtggctgtacatcccgtcgagcaccagcatgctgaggtcgcggactggacaagcgccgtctcccggtccgtcgacgaggggtcggacgcgtcgtgcattggcgccgacccggctgggttgcctgctgcccgtgctcttcgtcgtgaacagggcgagcgccagctgctgcctgctgcccgtgctcttcgtcggacatggcatctccgttcaagttcaggaagtcgggtcgccgtcgggagatgagcgggggcacctccggctcagcaggcaccgtctccccggccagtctacagtggtggacgcaggattaaaataaaaatgaggtgaagatgctcatctcaataagaacaactaaacacaaaaaaataccatatttatattgtaatcatataaacatatagtataatcaataaattaaggcaaacaaaaaacaaaaatgatattaaaatagagtaataatttttgcgccatacataattcatcatacataaaaatatactagtaaacatatcaatttgcaaatatgagttaattcataaagcatggttgatagatatcttttaaaaagtaaatatatgagaagatatcgcatacccagaataagatgattattattttgcttagattagaagggagagagagaaaaacattaggccctatagtaggggacgggggtgagcaatgttgaggaattgagtcgggaaagcatcacatacgcaggattaaaattggacacttgggctgcttatttatgggccaattgtgatatggagggttggggcggctcaaaaatgatatggagggttggggc

SEQ ID NO: 8356 - DNA, 8051 bp, Oryza sativa
cctcccagagtgtgatcaggcaggcaactatggatggctgttacgagttcaatggcttcttccacgagtacatgatctcgcggccagtggaagaaagaattttgttgccactagaagtctctgtactggagggctattgctggagactaaccacaaaaggcgacataggacaacacaggggcgaagccactttgggcggcctgggtgcccaggcaccccccggattcctaaaatttcttagagatgaacaaattttggccctttaggcacccctacagcccaataggaggcacccccaccagaccttgaatcccacgatgccacttattcagcccacgacgcatcagctgcccaactctttttctcctcacgacgacttcgcgagacgtgccgtatacaccgacgcagcgacgcatcgactgcctgcccttcctcccgactcccgagtcgcgacgccgacgcccggagcgagccgctgcccacgaagacaggactgcacgaagacgaagccgctgcccactaagacgcatcagctgcgcgtgcgacgatcgtggctgcctgcctgcctcgccggcgttcgacttcgacgatcgacgttcatctgatcatctcgccgatctcgtcctcgtcagcgtcaaagactcaaagagccgctgcctgctgctcgaccaactagagtgagtgttcgtcctctgtcctcaaggatcatctcgccgattatgtgttagctatactatttgcttgaacatcacaaaagacattatagtcttgataaagttaggcaccccccacccatttgctctagcttcgccactgggacaacacctagccatttggaacagctgggacaggaacaagactctgttcgacagcctggacttgttgaggctacggtctttaacggtgtttggtccatgggagtcattcttcatctccaacaagatgggagtgcttcgtgtgctcgacctggaggatgcatgcgatgtaactgatgttgatgtcgagaatattgggaaggtgctacatcgcctcaagttcctatccctaagaggacacaaaatcacttatctgccggattccttcggtgggctgaggcacctccagactcttgatatcagatgcacctccattatcaatcttccaacaagcatcaccaagctaaagaagctgcagtatgttcgtgcaggtaaccctgtacctgtaccactggatgatgataccagtactgatggaatcctacgattacgaccaccgccaccagaagcagcatcagcaacagcttccccatcattatcagaaccgtcgacgtcaatgagcaggccacatgctgcgcttttgtagaggcattttgcaaattgcctctaagatcaggagttttatagcgtagagacactttatagaggcactttcaaaattgtctagaaaatttttactctagagacactttagaaatattttcagcgcattttattatattttatcttgtagaggcattctttcggcactttaaaatgtgtctaacatgtaaagacatttgcttgagacactttaaactctgtagagacacttcttacaaaaaaaaatatactaaatggctaaatataagtagcttaaggcataaacatatacaacgaatgacatgaggttgagttggttagtgccttgaagataagaatgatttgatcaagaaatcacgagttcaaggattggcaaaaacaagggaaaatattttattctcatttttacattggtttcatatggttgtggtacaatttaatgtctctagaaaatgcctctaccaccttatagacattttataaaatgcctcttcgtttatagagacaattcaccataagacacttattagacatttttaaaaatgcctctatagtattgtaaaggcatttgaaaagtgtctctatagtactagaaaaatgtctctacaaagcatttttgttgtagtgatgcaactgcggtgtcccgtttattcgagttgcgggagacgtggacaagccggcaccgcggccagcagcctgctgttgctggcacctgcaatggtggaattgtggtgcccagagggattcgaaaaatgacgaccttacacactctgggtgtcatcgacgtcagtgttgcaaagaagggccgagctattctggaagagctcaagaaccttacccaattgcgcaagcttggagtatctggcatcagccggagaaactgtcgggagttttgttctgccatctctggtcacgcccacttggaatccttgtcggtgcatctcaataaggagaacaatcgaggctgtttggatgctatctccaagcctcagagaacctaaagagccttaagctgtacgggtatgcagacgacaagctgccagagtggatcacgctgctgcggaagctcagtaaattgaatctacagatggccatgttgccgtcaggtgatgggctccagttccactcaggcttcgacagtctcgtgatactcaagatttcctgcagccccagtttacaggccgtaacgtttcactctggagtaatgcctagtcttgagtgtctgaagctccgttgctgtaatgtctcatcgttgaggctctctggattagaagcactaaccggtctcaaggaagtctggttcggtggatcctatagagaagcattcaagcgagagctgaagagacagattggccagcttcccagggaaatgaaacctgtcttgaaggaggagcaacgcttgccctgaatcctgattggggtgcactgcacgcagctatgcgtgatagtcgtcgcctctactgtcccaggagcacccacaggattacacgagtgctgttgttcacttccttttcactacgactctgtccagcctagcttctcgaccactggaatagggatagttgtgtatccagcgcacatctctagctgtaattgttgttagttgatctgttgatgtcactgaacactgaaatgctatgttccatgcatgccccttttcatttcattgtatggatgaaatggactgcatattgcctggattagcaggtggattgattatacaccgtagtatgtacagcacagcacattcattctacagtctgaacttactgcgcacctggaaatggcacattgctatggcaattctatgatcgaccttagtacttctctatcgagggcattgctgataaccaaatgattgtggacaaatcctgtctggggagctcatctcttgcttcatcagtgggacttcacaggatttgtgcaggagagacgtcgtggctaatgtcatcactacttgtgagaccccttgatttttgcaaacggagcataactagcggcgtctttgcatgcgtccccttaagtggcccgtacggaaaaatcgattttcccatacgggtcttttaagaggaccgcatgtaaaaatgacacttaagcgcccgtatggaaaaattatttttttttatactggccacttaagaagccgtatgcaaaaataaaatttcaaaaatttaaaactatgaactccaaattagatgattcttttttctaaatatttctaaaatcatgctctatcatgttattgtgttcttgctgctattattttggttattttttcttgtgactttgttttatcaattaaaattttaaatttcaaaactttaaataatattttgaaccagtaattgatttcaactgaaaaagtcatcaccaacaaagttgtataactcatcaagatctataacttctattttagtcatttcttcatccgacaaggttatttataagattgttaataaaatgtacatctctcttgtagttttataaactttataagagatatgtgcatttttgtgaacaattttataaatcactttatcggatgaagaaatgaccaaaataaaagttatagatcttgatgagttctacaactttgttattgatgactttttcagatgaaatcatttagtatttgaaaatgttgtttgaagttgtcataatttgaaattcaaattcaaactgttcaaacaaagtcatatagaaaaatgaccaaaacaaaagttgtagatcttggtaagttatacaactttgttgtttaaaacttttccatttgaaatcatttattgctttaaaatattatttgactttcttatattttaaaatttaaattttatatagctcaatcaacctcggatggaaaaatgaccaaaagaaaattggtagatctccacgagttgtacaactttgtttttgataactttttcatatgagttcatttaatatgataaattttgattcgaagttttgatattttaaaattaattgtttttccctcctcatcccttcaaattttttcatcaccccttctcactcccctgtctagatacttttaccaccacacactctctctctctctctttctatcctttcccctcactctctctttctttccaactctctttctctcctctccactcctcctcgagcacggcggtggctagggcggcttggcccggagctagcggcggtggcgacctcgggcggcggcgccaccgccatctcctcctcaccgccgccgccgccgacgaggaggaggtgacgggccagatccggcggcaggcgacctcgggcgacttgaggcagcgacctcgggcggcgacgccaccgccatctcctcctcaccgccgccgccaacgacgacgaggaggcgatgggccagatccggccgcgccggtcctcgtctcgcccggatccggaggcagcgggcctcgtcctgcccggatccgacggcgaccttgggcgaagagtgccgcggcgacctcgggaggcgggagcggctggcagtggaagcggcagagggcggcggcggcagcgaggcgagcagcggcgggagcggggtgggcggcggcagcgagagcggggacgggcggcgggggcgggaacgggggtgggcggcggcggcgggagtgggggcgagcggtggagccgggagtggggacgggcggcggtgggagcgggaacaggtggcggcaggagcagccagcgagctcgggtggcggctagggtttcgttttttcttatttttcgcatgcgggtgccctggccgcatgcaaagatggcgatctttgccgcatgcgaaaatcgttgccggccgtatgtaaaaacgtattctgtagtagtgcatgctcctcacactgaaacattttattttaataaaaaaactattctttcttgaaagtagtgaaaaaactaatcccagccgtgataattacactggtgtaacctcctttggctaatatacatctaaagtatgtagtgaaataactaatctttctcaatacggtaatatgcctgccatgtcatcaaagaaatacagaccatattcaatttatattttcagcaagaatcctagagctgaagccattacagacacggcctaaggatagacaaacgcggccttgaatgattaataatttttgttttgtttgtagaacacaaagatatataatggactaaaatgcatttttgttctcttcaatgaaagggatgtatggcctggcatgtaaaacaatgagaaagtgcggtaacttctaagtaaaagggagccaaaatttattatagccaagtccatgcaagcacaccaagtcatggccctcaatttgtaacctattattgacaatattgagtatttccatataacggaataatttgttcaggaggggttcaatttagaaggaggatcgaattacagaattcgaatcctgagggatttaacatttggcaagatttgggattcacccggatggatttagtcaagatctttggtaaaaaaaaaaacctaaatgtactcaaagaaacacatgttctattgtgcgggctgggctaggcccttcaaggacgaaaaccagacttttccgtgaattcttttaaaataaactctttttacgattttagtttgtaatagggtttagatggcaaattcccactagcctttatttgtagaacaaatacaaaagattatttcttaaaaaggattttcatatattaattaatattagattttgtttataaaataacttcctccaggaattatccctgaagggggttttctttaaagattcagtaattgtagacattcgtaaaacaaatacccaaaaggggttctaaattatagaaaaagagtttttaggaagataatttatatttacaaatattttattattttataatcatggttcctttagtaaataatattttaatccaaattagattttaatttccgtccttgtggtcaagcacaacagaaaaaagaaagtaagatacaataaagaaatttggaaaaagatttttgactattccgaatttttttcatatttcaaattcaaaattttcaggtgttacaggtccccacgcgccttgtgagttgcgaatggctgaggccaatcaccggtcggacacacgctgcccgtgccacaagaaaactcggtgctagacctcaaatctttagaaacagatctcctgaaataactgtacatgcagttatgtcacttataaattgatctcactttactataattcacatgtaaatatctcaactgcgtagtagttaagttaaagtatcctgttcctaaaatgttgtatttcgttcatagtacaaactcaacacttttgaaacccaggtcaagggtgaagacatcactattagaaaaatcgttttttcaggcggcccaaaacagttttcacagacagagagaaggaccgtcggttcactgtcgcctgtcctccatcgccttcagccgcgcctcctctggctccggttgaccatccagcaggtcggaccggccgctgggaacacagtgacggaggaggaggaagacgagggatgtaatggctagcagcacgaaggcggcgagcatgaggaagtacccgaggacgacgtaggacgccgcgagcaccgcgcaggcaagcaagcagagcgagagggcgctggttatcctgatcgcggcgactaggaagaaccaccggttggctgtggcggcgacgttcacggccctcttcgacaacgtcatcgccgacatgccgacgatggcggtggagaacatgaagaagatggagacgtagatggccgtgaacctggtggttgcgctcactagaacagataccatcatctcaatcgggcggcaacccccatctcaatcgggcatggcgtccgttacaggctagaagtcactgatgtgaaaagttatctcaatagggtaaacggccgtcacagatgaacctatctcaattgggccataattaaagcccgtcaccgatagttttgacccagacgatcagtcaaactatagcccgtcacggatgacctatctcaatcgggtctaaactatagcccatcacagatgacccttatctgtgacgggcattaactatagcccgtcacaaatgagtcatctcaatcgggcctaagttaatgcccgtcacaaatgagtcgtctcaatcgggcctaagttaatgcccgtcacagatgagtataatcctaaaaaaaataaattttatttttaggcatgccgtctagcctctctcaggccagtcttttttgtccttactcgtgtgcacctgggaagaacttccccctatctcaatcgggccataattaaagcccgtcaccgatagctttgacccagacgatcagtcaaactatagcctgtcacggatgacctatctcaatcaggcctaaactatagcccgtcacagatgacccttatctgtgacgggctatagcttaggcctgattgagataggtcatccgtgacaggctatagttagactgatcgtctgggtcaaagctatcggtgacgggctttaattatggcccgattgagatagggggaagttcttcccaggtgcacacgagtaaggacaaaaaagactggcctgagagaggctagacggcatgcctaaaaataaaatttattttttttaggatcatactcatctgtgacgggcattaacttaggcccgattgagacgactcatttgtgacgggcattaact

SEQ ID NO: 8357 - DNA, 18731 bp, Oryza sativa
ccccgcctaatgggtggtaccgcccctgtccccggcgttctgctcctcttgcaccggaaccggctcctcggcgccggaagggccttgatggtgttcatgtcgtcctctgcgacgggagatgcctgtcggctgggtggttctggcgacggccgcggtagcatctgccccgacgccgccatggcgcgccatcacctccgacgagcggcggggacggggagcgcgacaggagagcgtggacactgccgtcgctgcgtcacccaccgccatgggggtcggtcctcttgctccagcgtcgtcgtccgcgtcacccgtcgtcggtcgaaagctgtcggacctcctctcccgcctcagctcgctggcctcctccccacccaccggccggcctgccccagatgaggagaaaagtgagagaggaggaatagagagaagaggggaaagagatgacatggtcgccctgatatgtgggtcccatgctgactcagctgccacgtcagataaaaccagggttaaaaccgcctaaggatccaaagtgatccgattttgtaagttgagggatggcatatatctggttttgtgattggtagatgattcgtaatctgatgacaagatgagggacctctggtgtactttttccttggttgctgctgcagcgcaaccacaagcgatcagcctctcggtgtaaagttgagggatgtatggtgaacttccacaaaaataagcccgtcattacacccatgttagatcaaggcccaatcactcattggcccagctagcggtttcacccatagcccgccaagctgctctgcttccgcacgacggcccaccacgacgtacggggtcacacagcatgtggaataagttcattctaggccccttaattttacaccgaattcgatttttatccttgaacccaaaaaacagatacaatcggtccctattaaaaccggtgcaaataaagtccctggcggtttagaaggcggttttggctgacgtggcgccaacgtggctagtttgacttgatcttcgtcacacgtggcatatgatgtggcgcttatgtggcaattcgatacttgaaaaataataaaaatcgtggccccatacgccagccacacacaaaaattaaataaaaatggtggggcccacgtgggccccacatgtcagccttataccttctttcctctcccctcttcatcctcaccctcttcccgcaggcgagcgaggcgggcagccggcggcgccctcggcgacctcgcgcgccaccgccgcactccacctccgaaccgccgcctttctctcccttcctcccccggccctcgccggcccaccgcctccatcctcctccccctgtgccgcctctgcagcagcattgggaggtgaccggtgagtagggagccacggcgttccgcggcggcggagaagaggcggctgtggcagtcggaggttcgcgaggaggaggtagcgaacccgtccgcggcaagcggcagccgatgaggagaggacagaggcgagggagaggagaggggagccggcgagctcgagcttgccatctcggccgcccgtcctcgccgaccaccaatgcgtccaccgccaccccgacgccgagctatggggccgccgggacaggcacgggcctcgccgcgaggcgcgacgacgaagactgcgtgccgaagaaccccgacttagtgttatccacggcgtcggcgctgtcgtcgtcctccgccgccttgctcctcgcctgtgcggctgtgccgctctgctccggacgccgccgcccacctcgctctgccccgcccgtcgcctgctccgaccgccccgctccaccgccaagcaactgagagagagagaggatggagagaagggtggcgcccgacggagagaagcccgcgtggcccgacatgcggccctccgctcgagcccgaacgatggcagcggccgccggaaaaccgcccgctcgtcttacctgcacgagctgattccgttacacattctggcggcggtgtcgatttgcttctcgccggcgagcccccggctagatgcgtcgtatccgccggtgaattggggatttccggttgcgaacacagaagaatgaccccatcatgtgggtcccgcgtggtcccacattttttattattttgtatgtgcctgatttgtgggtcccacagtttttattattttttagattagattgccacttaagcgccacatcattgccacgtggtacgaagacttagtcaaataagccatgtcgacgacacgtcagccaaaaccaggttcaatatcgccgagggacttcatttgtactgattttataagttggaggtaagcctgccaatgggctagattgaaatgggcccaatggattggtttcagctttgggtgtagtttggatggatggaaatggattgaggagtttaatgggctggactggttagggtggaggtggaaacggtttggattggattggtttttggtttctgatttttggatccaaattggattcagtccatggatttctttggatgcactagacagtccagtactctccaaagtccaaacctagcgtcatcagtcgtccacggctccactccttccgccgctgccgctccctccccttgcttcgcctcctccacctctccgccaccgtccgcgaatccgccgccaagccgtcgccggtcagattccctcccccaccaccattgcttttctttttccctggtttttctcggtctttgatatatcctggttgttttgtttgtgtttttttttgggtctcttcctgatcttggtggttgcgggtacaggtgaagcagaagaagaggaaggtgcgtgcgccgccgggcgctggcgaggatgtcctcctctggcggtccggccgcgtcgccaatctccctaagaagcccaagtaccacgacgtatgtgaacagtgtgattggtgtgatagtttctataagattttgttttttttgttggttttactgaggagttaacttgctcaagattacaatcttcgatgggtttatgtgcaggagttccaagatttcaagaagaagataaggaggtatagtgaatgcaggttcccttcatctcccaatgcaaattatttaacatatcattacagattgagtcctgatatgattttgagatgcaaattaattctatggtcaatcgaattttagtgtgcaatttttagattgtagcacatgtacaatgtgtgaaaaaaataattatagaccatgttctttcaactatcttgattttagatttcttcctctatgcagacaattgaacaaactcaataataaatatgtccatacaaatgtcagagagttcaggtactaatagtccaaataataatcaatcttcaagaacacgtaagagagctaaagtatgggaacactttcagcaagaggttgtaatgatagatggtgtccccaagactcaatgcaaatattgtagcttaagattgacagccaccaaaaagtcaggaacaagtcaccttattaatcacatagccgaatcatgtccagctattgatggtgatgctagaatcaacttccttgcaacaattaagaaacagactggggaaggtttcgtgtttgttcccaagagaagccgggagctaatggtcagattcttcattcatgcagaggtgccattcaagaaaattgaggatccttattttttggagtgggtggagtccatgcagccaactttcaaagttgtggggcgtcaaacacttcgtgatgatgcctttaacttgtatgagcgaatgagggaagacttgcatgctgaattacataatcttgattcgcacgtatgtctaacatccgatatgtggacttcaattcaaaatataggctacatggttgtcacagcacactatattgatagagagtttaacattaagaagaaaattataagctttaaggaattgaagtatccccacacgggattcgccattgaagaagctataatgagttgcttgacatattgaggcattagagcaaactgtttactataactttagataatgccagtaataacaattctgcatgtcaagagttgataaagaatcacaagaatgcattgatgtttgagggtcagcatttgcatgttagatgttgtgcccatatcctaaatattttggttcaggatggtatgaagataattaaacctataatacacaagctacgtgagttgttgaagcatttagattcttcagtatcaagaatgcaagatttcaattctatggcaaactcgaaaaatcttccttcgaagttgagtttttcttttgatacaccgactagatggaattccacctataaaatgattgtagaaggattaatgtacatatctgtcctggatagctatgcaaatcaacatggtgaagttgcacctactgaactagaatggcagaaagttgaatcaatttgtgcttttcttaaagcttttgaagaagctacattatcggtgtcagcagataggaaaccaacagcacataggttcttgcccttggtgctacaaattcgtcatgcattgaatgaccctgattggcagactagtgatattttaaaggtattggctgcagctatgctctcaaagtttgtcaaatattgggacagtgggtttaactctgcacttgtcattgccacaatgttagatccaagaagaaaaggagattatttgaatttcttttatgagaaaacatctaacagtgtgacagagattgtcaaaaaagtgggttctgctgaagattggttgaaggattattatgaaaaatacgaagggtttgtaagaagaaatgatgaacacatgctttcacattcttgtgaaggcagcaacagtgttggatcacctgttcttgggaaaagaaaactcgaggaagagtttgctttatacaagtctcgaaggagaactgcacggcaaacgaaatcagaatttgccatatatttagaagaagatgttgaggaggatagtgagagtttcgatgttttggactggtggaagagacatgctcaaaaattcccagtattgtcatctatggccagagatttcctagcaatacccctcagcactgtatcttccgaatcagcattcagttgtgggggcaggatacttggtgacacacgaagttcgttaacacctgaaatgcttgaagctctcatttgtgcgaaagattggttaattaaagccaacgatcctttgatcaatattccaggtgctgaaggtataatagtgataaatgattcctccataaatgttctgtgtatttcaatcatgaagtagtgatcatatatcatttacaggtggaaatttgtcctgatttattcaggtggtgaagtgaagaagatggaaaggtgactttccatatacatatatgcaactttaaattcaacttttcctttggcgtattggaaatttggaatggaatacttctcttgaacctgcatttttccaaaattgagtttaccactttgttgcctattctgtttgtatataaaatgttactattcattatttaccaattgaatcaatttggcacattgttttgataacactgcaaaggtcacattatttaaattgttattgtaattttgtatatttgctttcttaagcaacgaactcacaattttctagttattcctggatataaatttttgatgacatctacttctttcaggttactgtcatctgcaagaatgtgtggctgagaattggaagggtttttggttttggttatcttagaaggtaatctaaagattgagacatgaagaaattattggtgttcagttatacatggttctgaggcttgtaatgcttgatagctttttttgttagagattttctcttgagcctgttgctctagtagaatctctagtgataattgtaatatttagttgccaaaacttgttggatggcactacttaaagcatcaaaagttctaagtatgctagtagtgttgattgattatttttgcatcttgcttatgttatttgtaagtatgctagtagctgtatgcagcgtgagtgttcgccggctgctctgctctgctctgcttcctgccgtggattgggtatgggttggaaaatggattccacccgtggattgtgttgaatctggactgagcaactttgtgggttgggttgggtggggttagctcaaggaattcttggtatggattggagtgacaattttgctatagtcactttgggttgggttggattcggggtggatgccaacccattggcaggcttagttggaggatgtgatgtatctggtttttcggttcgaggacgaaaatcagattcagtgtcaagttaagggacctagaatgaacttattcccacagcatgtcgctccctgcgccgcctcgtggcctcgtcgccgtcggccgtcgccctcccgccgcgcgccggcgacgcgcatcggtgggcagctggaggcgcccgcggtgcggcgcagcgcaggatccatctccgaatctccactggcgctggtgtgaggaatacttgctccctctctctctgtccctgtgtcccgcacgaggtcatttaggtttgtttgggtgtagaaaggggatcgtcgacatggggagtgcgggcattcgtccggttaaacttccaactgaaaaattgatgccaaaatctgatgccgcgactcatccgatcctgaatgaagttgaatcacagcagcagctgtgctggcgctgtgaagagctcaaaacgagtcccaaatctgccaagggaacgagctatggataagcgtagcgtaccaggctagaactatattgtatgccaagatgctatgcaaatatcagcactataatttagcttttatcaataggaggacacgggagaccaatggaaactgcctgatctgatccactcttcagtcatagttggcattattgcaacaaaatattgcactttagttccagtactgttatttctaaaacaacacattgtgtatgtagtacataataattaataaaatgatacattcactggcttggacacatttatagtagtatagtagatgatatcttgcgagaaaatttaccacacagtcaaacgacagatctcttcacccagaaatagaagactccaacattgttcaaccggcttcatcaacagaaacaagcatctccaccacactttccatggtgggtcttctggctctgtcttcttccagacatgaaactgcaagctccatcatcactcttgcttgcaagttgttgaatcgagtgtttaatctggcgtcaatgaagtcagcaatccatgactgttcatccccatcagacgttagattctctgctagcattctaatgattcttccgagaaccatttccacctcctcatctttgtttgtttcaaggtccgaaacacgagctccttttagtagttctagaagcaccactccaaagctgtagacatcaacctttgctgttatcggaagactagaaacccattcaggcgctaaatagcctctagttccttggatccgtgacacgtttaaattggatcctcctctatgtagcaactttgcaaggccaaagtcagctatctttggctccaaattctcatcaagcagtatattttcaggttttatgtcacagtggatgacccactccaagcactcgtgatgaagatatgccaatcccttagccacacctagagcaatcttaaatctttgctcccattctagtaaggcttgtgattcctgactgtcaaacaatattttatccaatgaaccgttctccacgtattctgaaaccaatatcctgtgtgaatcatcagaacaaaatccccaaaccctcactagattcatgtggtagatcctgccaatcacactcagttcatgcttaaattcttcttccccctggtttatgtctagcaactttttcacagctactaccctcttgtccttcaagacccccttgtatacaacgcctgatgctccttgtccaattgcatcctgaaaccttctagtagctgtcaccaactctctgtaggtgtatctgcgaaaatggttggttatcatttcatagccaacctcagctagttctcttagttgtttgtcctccctttgcaaaataagtgatccaaatataatgaataatacctctacaacaaatattgctgacaagaaaccatagaagtaccaatacttcgattcattttgaccgctcttaagcttatccaagaaatccggtacaaaatatttgtcaactgtagtacagtatttgacatatttctgatcaaaaggctgtgaacgggggacttgatgatccgacacttttaattcctgaggaagcttaatatacatggtaccagtactaccaattaagcttacaccactaagaagagcagtcttcggatagcaataaccttttccttgccagtatgcaaaccccacacagttgctgtcattcaagcatatcttcttgcaatcgtgcaaagaaacatgaggataagcccttatatcattccctaagaaatcagtgtttgggagcctaaggagccttactttctgttctctagtgatattgaactttgggctgcagcctttgctccaatcgcttgggtcactgaactgataaccaggggcacacacacatgtaggcgcaggcctatacacacatattccatttataccacacacaccacgtacattgcagagctgaggaaatgccatccatgtgactgaccatgttccgcttgaatcgttcagactgtacaacctgagattgccatcataatctagtgttaatctcctcataatcctaggacccaaatcagcagctgtgaagtttgcatcatcacttccaagaaaatgtccctggctatcaacagcaccgtttgcagtgctattaaacggctttctgtgcttctcccagatattctgagttggatctggccagtagatcaacgagagatccttctcatcataaaacagcgaaagtagatattgatcatcaaagtggaaactaaagcgaccaggggcaagtaatctattagtagatatgagcttaattcgagcagtaatgttttgagtgggtagcaaggtatcagtaggaaaagcaaagctttcccatagaatggtgtcacctttgctcttcacgatgaggtttccagtattcaagagcttagcttgaacttgctccgcatttgaagagctcacgttgttggtccacacaacctggccattataatctttcaacagcatgccgccatcggatttcaactcaaattttgattcccatgtgtacacagggtggagaggatttgcgctccagacaacagttttctcggaggagtttgagaaccagatggagaaggtggaggcattgggggagatattgtagaagccacaggtgaaagtacgatctggtgagtagagcagatccaagctgcgttcaacagagagaggggagcctggcaagagggattcaagagctgaggaggagtacaaaagcagatggatcaatgtgaggagaagcagagaggtgaagattgcatccatggtggttgccgcattcaagctgatctttcaaatgacaagcaatgcaagctgttatcggaactagctgcccaaacttgcagaaaaaagtgagattctaacattctatatactactacgaaggtgataagactaaattcagtctgccagttattttgcgtcaatgggcagtttccttggaccaaactatgcaatgcaagtaccatgttggcaaatgattcgtgtatacatttccaacctgttgcacaagtggcactgtggcatgacgtgtccttgtcaggatccgtaaatctggacagtaaaataagatttgcaatatggtaatgagttcagtgtacttcaccagtccataggtccatcctaaacggctgcacatgcacatattcatcccccatttccaaagaagcctgacttctaacatgacggggaagctcaggctttgaacatttgaacacaaaaataatggcaattggccatgctaatttttatttacatgtggtacttcatgcattgtgagtttgtgattgggtccctttcagctttgagtatactcacgtggaatcttcaacgagagatttcagcaagcatacacagtaaggagagtttaataatatttttttattggctgaacaaatctgtgaagacatttcttccgatcaaatgcccattgcttgaacaaaacatttacatccttacctaaaataaacaaacttaatacgggacgtggacagattcatcgactttgttcgtttgttacctttttcagctcacatcccccaattttcacatgcacgctttttaaactattaaacagtgtattttttaaaaaaatttctatacgaaaatttctttagaaaaccatattaatacatttttttaaaaaaagctaatacttaattaattatatgctaatgagtactttctgactgcaacaaacgaactcagccttaaagatataggcaacatatccagacagagtcacgaaggggatatcaatttacaccaaacaatgctgtaaaaacagcttctcagacgacacagcacagcaccagggttcataattccaataaagaccggtcaaatacagtgaaatttcgagatttcgatgaggctcgaaagtagtaagctgtatgagatttcgatgagtttcatccaaattcaaatctgaattgataaaaaagaaaaaaatcaaataaaatcttataaatagtatgatattcatagaacctattgggatataaatttttgaaaaaacatcaactgtcatagtaccacaccattgtacacgtacgcgcgtggcgcaaataattttgggttgcctacggctcgggcgcccgagcgatttggagtaaaatcgggcgctgacgtcagcaccgatttacgtgcaaaactactttaaacttatttttctcttaaattacttatccaaatcatgatccgattgcaccattaaattcgttgcaattaaatcttaaaaacaagaccacacatggatatattccgacgaaaaaaatagcttattattgaataattttaaatattgcacgatgttctaccaggtatatcggaattgtttcactaagtagatcgaaaatgtttcactcgtttagatcgggtgttgtttcaccttatataaaaacaatgtttcaacaaatatcgaaagaatgtttcagttaactgcaacagttgatccatacatagtgaaacattataagtacactaggtgaaacatttttcggtggaacaaaaaataaaacgaattccctaaatagggggttttcaaaatatatgggtttttttttgcaatggaatatttttattcaatgcaacattagatctatacataatgaaacattatgagtacaataggtaaaacattttttgtaaaacaaaaaataaactaaattcacttaatagagagtttccaaaatatgtggatttttttattgcctccagggatatgctaataacatcaactgaaaattttgtatcgatcttaaattcgtaattacatcagttgttcagggttcagctagctagctataggaagtgtccggcatggtaggattctccgtccttgggatgcttaatctcgccgttacagctgaagcagaagtccgtccgcgacggcgaggtgatctccgggatttccaccggccgaccggcgggtcgtcgccagcggcgaggccgccaactcggtcggcctcgtcgtccagggaccggaggcacgtcggtatccaaccttcaccgtcgttacgcacctcggcgaagaagagccgctcctcctgccgcaaggtgccgccgccactggcggcggccctggctatgaagttgacgtggccgtagtcggctctgcaggtgatgatgacgccgctgatgatggccctgacgagctcgttgacgacgccgccgccgccgccctcgacgacgagggcggcgttgtagtgctccagcgccgcctccgcgtacatcacgctctgccgcatccagtccggatcgtcgggctccatggtcggaaacacctcgtagttcggcggcggcggcggcggcgtgtagtgctgcttgggcttcttcttgtttttcttcttcttcttcttcctcctcttttcgccggggcgatgaaacctgttgtcgaaactagatttcggcaataataaaagggggtggctatcaagctggaaaagtgtatgggttttgagacaaaggatttatacaggttcaggccttcttataaaagaagtaataccctactcctgtccggggatgaatccgccgagtgtattattgattgtatgattcgagaaaaatcaacatatgcccctagaggcgcccggaccccccttatatatgggaaggagtccgggttacaaaagataatctatatccctaacggaatatgaaaatataggtaagatacagtcgtaaccgactaagtttcagggtgtttccttgatacacaagttaagaaacaaacccaagatacaaataagaaattctatctacattaggtatcctgtgcccagctcgaataccatcgccgtgtagatatgggatacccatgatctccacagtagcccccgagtcctttgcagtcgaccatcgtagccttctcaaagatgataatccgagtacttcaaactcttcaagccaaaatctgccgagtggactgtaaagggcgaaaagataaagaatatggtgcatcgaatagatgcacctaattaggtgtagcccccaactatgtgattagttaacaaactaaacatatagttgaaagacaaaataataacacaattgtgcattatatgacaaaagcgtacgcggcgcctaaataggcatgctagccgactgctttttagccacaataaaagaaatccgagtggtttacactctaaaaggttcacgaatgaacacacttgacaggcatccgaataaaaactctaaagattactcatcaagtattataaagattatggtaataaataagtcaaatagcctaggccatgactatttaccataaaaacaggcatataagacgccaaggaaatgactataataaaaacaagtcattcctagttaacccaaacagtttttgtagcctaaaaaagcttgcaaaaacagcataacgcctttctgtcgggcacctttttaatttgcattgcaataattccaaagaattatatgaccgcataaaaaggattttatcagcattgggcaacactgttgtgcgcataatattgccaaagcaaaatatgcctaagtccctaaggaacacaatgggccacgctgttaaaagtattgggctgaagtactgttcaggcctaggcccattagcacctccgatacccttaactgaaaaatccgatatccaagcgacgcttcgtcttccccgccggaactctcgccattttccccactccctgctacagtgcaaagctgcgcctgcgaactagggttcacaactccgaccaaatccacctccgaaaagtgcatcaaaatccttctcgtgatccaccgcctcaatccctcacctctcccaagccatccctcgaatcaaatcagcacatttgagtgaaaccgatggcggaagagggagaaagcttcgaaagccaatgggcgacatccgacgtaacggaggagaatcttaaggagatggtggcgcacggcgttctccctgccaaggaaatcatcgggtggcgaccagcgcacggtgaggctttcccgtctccggatactcatgagattgtggtcttctcgcatttcttctacggcggctttgctcttccgacctcaaaatttttccgcgggatcttgaatttctatggaatcagcttgcatcacctaaacccgaattccatagtgcatatcgccaatttcgtccatgcttgtgaagcctttttggggatcaaacctcactttgccctattccgccggatcttcttcctcaaaccccaaccaaacaagaacaaaccgtgtgtagtcgggggggcaggattccaactaaggggaactctaagccaaaaatatttctcgatgcccttcaagacttcgaacaaaggatggcatgcgaactggttctatgttcagaatcccgagcctgctcttcccgggtactcttgtcttcctccaatgtaccaagacacttggaactctcttccgatcggagatgaagcagtacaagccttggagttgttggatcgtatgttaaatcttaaagaacaaggcttacagggagagcaaatcactcggcacttcatcaaatgccgactggcgccaattaaggaaagatcccgcacagcattcgagttcgacggcaaacatgatcccaaccgtgaagaaccagactccttggatttcaaaatcatgaaggagaggatgtataaaatcttctcaaatgcaattgtagtcagctactctcaccaactgccggtcgtgccattcaacgcattcaatccgcctccacaggtatgcatcggaaactatcaaaccatgatcagaacatagttttatcttcatgctgaattgactaactatggaagcatcttgtgcaggaatatgcattgatgaagtcagatccaccagtctctcagcgccggtctcctcgccaacacaccgctcagggaggtggagggccaacgatcagaccagatccgcaacctcagacctccaaattggctggtcaaacaggtcctcgcaagagaaaactggtacttgatgatgatgaaggcgacgatgataaaactggggataagggctcgcctaacaaacccccaaagcgcaccatgcccaggaaaaaactggctggccgcgcaatgccaaagatcagaacatcttccaggtattagacctctcggtataattccgcttcagcatgctttccgatgaaaataatgctaaatactgaaaaaacactctgcaggaaaccatctgatatagatccatctggaaaagaccctgatccggctaagacagagcaaaatatatccaaggactccgagccgactactgaaaaccagccgactgctgaaagccagccgactggcgcccatgcttcgggagatagggccaatccgagtgacctgccgccgactggaaaccagtcggcaacaactgaaacggcaacaactcaagagcccccgactggaaaccagtcggacgcaggccctgatcaagaaattcccgaagtagaaacgcagacgacgacttcgcaaggaccagaggctggtaacgactcgacaatcgggtctccgggtaaagaacaaagatcacttcacgctcagccaggtacatcttcaggttagttgtcttctcaaacaatgtcgatttaaataacctcagtttatctgtctaatggcttggaaacacatcaggaccatcaggagatgacggagaagaaatccctcgcataaaggcgaccgacgactctcgtcctcctatcttgatcaaatggtgggacgagaactcacaagccgcaggcatagtcataaaccgtcaaaaagaagatgaagaagtgtgccagctgaagaaagcgctcggagaagccactcgtattgtaaatgtaagtcttccgggtgacggccttcggtaactttgttttctttttagcagaacctaaccgtgaaccatcgtgcagagaatccatcttcgcaatgaggccaagactacaactttggaaaagctggttcctcatttgggaactcttgaagcggttagggaccagctacatgaggccaaggagcacgccaagaagacggaaaaggagttaagggaccgaatcgctcagctccaggattcaaactatgagctgagtggttcatccaaaggtaatcatccagatctgttccattgaattatgctgtcataattgcatcctcaaacacttggatttcaaacagcgcaagccaccagaatagctcagatggaaaaacagattgaagccttgaaaaaagacaaaacagagctggctgcagaaagggactcagccgtgaaagaagttgaaggtactgccggctgatgatctgaactttcctcttttaaatgcagtagattctgattataaatgtgttttgtagaccgtaaaatcaagtctcaagctcagtttgacgtcctggttggtaagatcaagaggcttgaaggagcaagagatgacgtcgccaatgccgctgcaccaattatccaagccatgttcctcaataatggtggtccgagtgcactcgacgcaaccgaaatatttgacaagctgagtgttgctccggaagtatatttcaagaatatcaagaaagctggaagcatgggagctggcatggccttggcgatgacaaaatccttgtacccgagaattgaggttgacaccattgatgggtttgcagacgggacaagtgaagaagctgcccttgatcttatcagtagtgcgcaaaatgcggctgacaaaattgcgagcgatgttgtagagcaatttcgcaacaacgacctccagccgagtaatgaagactctgatgatgaaaggactgattctgactgagtttgaatgtaatacatggaggctcaatttgtacaatactggtgtatttatgctgtgcttgatgattcttgcgaagtttttgatttcttaaaagtttttgctaagcttagttgagcctagaacccaaagaagctattaaaaactttcagtcctcgcaaactaagtagaaaaaccaaacaaggcaatgataaaccaagtaagcaaactaaattgataaaaaatcacactccattattatgatgatagcccccgactgacaacttcaaggagaaaacttgatgtttgacagtcaaaatagggaaatacagtgataaagttaagcgtagaaacgacgaagatgttcaatgttccaagaattgtcgacgagagtgccgtcttcgcgcttgagtcgatatgaacctggccgggtaacttcagagataataaatggtccttcccatagaggagataacttgtgccgatctcgtgtggtttgaattttccgtaaaaccaggtcgccgactagaaaggcgcgagatcgaacattgcgattatgataacgtcgcaacccttgtaagtaccgagctgactgaatcaaagctgcttcgcggacctcttccagtcggtgcaagtcgtccactcggtcttcttcatagcgttcttctcggaaattacggaagcgcaaagactcaaattcgacttcactcggcaacattgcctctgccccatagacaaggaaaaaaggtgactggcctgtggcccgactgggagtagtacgcaaagaccaaagtactgatggcagctgttgcacccatttgccggcatagggttttagccggtcaaaaatacgcgctttaatcccttgaagtatcatgccattggctcgctccacctgtccgttgctcatggggtgtgccactgaagcgtagcaaatcttaattccaaagtcttcacaaaagtctttaaaaactccgccagtgaattgtgtgccattatcggtaatgatccgattgggcactccaaatctgtgcacaatgttgatgaagaaatcgcgagcattatctgctgtaatcgtgacaacaggcttagcttcgatccacttggaaaatttgtcaatggccacgaagaggtgcgtgtaaccgccgactgcctttttaaacgggccaaccatgtcgagcccccaaaccgcaaacggccaagacagcgggatagtttgtaactcttgagctggcaagtgaatttgtctggcgaaaaattggcaaccttcgcacgtgcgcacaatcttgtcggcatcagacactgcagtaggccagaaaaaaccttgccggtaagctttgccgacaatggtgcgtgcagcagcatggtttccgcatatcccagaatgtatgtctttcagcaattgtctcccttcctctaaagatacgcagcgttgcaaaattcctgaagggcttttcttgtataactcagattcgtgcataacataaagtttgctccgccttgaaatccgctcggcttcatctttatcttgagggagctcttgagaagttaaaaatcgtatgaagggctctcgccagtcggcttcaaccatagctacatcatgagtgtccgcaacttgagtggtatctttgtgaggtaccgtcggcgtataaaggtgttcgacgaaaacatcagagggcgccgcctcacgcttggatccaaagttggcaagtctgtcggcggcttcattgttgtgtcgaagaacgtgactgagctcgagtccatcgaacttgtcttccaacttgcgtacctcttgtcgatatgccatcatattgtcgtcaaggcaagaccactctttcataacttggttaacaaccagctgtgaatcgcctcgaactattaaacgctttatccctagggaaatcgcaatccgtagcccatgaaggagggcttcatactcggcaacgttgtgggacgccgaaaaatgtatccaaagcacataacttagtctttctccagtcggggaaattaaaaccactccagctccagtgcccgaaagtctttttgacccgtcaaaatgcatggtccagtgctctattttctccacgggggtatcctcttggcactcggtccactcggcgacgaaatcagctaacgcttgagatttgattgaagtgcggggcttgaatgatatgtccaaagacatcaactccaaagcccacttagcaatccgcccatt

SEQ ID NO: 8358 - DNA, 18537 bp, Oryza sativa
tgtgcagtacatcgccgagtggaaacgatgtgaccaccgttaccgggtgaccttgaaagtaatgagacagcttcctggtagtaattaaaataccatataacagcttctgaacctgagggtacctcgttttggagtcggccaggacctcgctgacgaagtagattggtcgctgaactttctggacatggccttcttcctcacgctcgacaaccaagactgtgctcacgacctgggaggtggctgatacatacagcaacaacggctcctgcgggtgtggtgaagctaagaccggtggcttgatgaggagttgtttgaaatcttcgaaggccttctgtgcttcgggtccccattggaaattatctgttttcttcagtagcttgaaaaagggcatcccccgctcgccaagtcttgaaacgaatcggctgagcgccgccatgcatccagtcagcttctgaacatctttctgagtgcttggcggtttcatgttgaggatagcagtaactttctccgggttggcttggatgcccctatgagacaccataaaaccaagcagcttccctgacggtactccgaaggtgcacttttcaggattcaatttcatcctgaaagcacggatgcttgcaaaggtttcttctagatccgagatcaaatcatccttttgcttggtcttgacgactacatcatccacataggcttcaacgttgcggccaatttgtgttgagaaacatctctgaatcatacgttgataagttgctcctgcattttttagtccaaacggcatggtgacgtagcagtatgcaccaaaaggcgtgatgaatgaagtcttcaagcagtcggattccttcagtcggatctgatgataccccgagtagcagtccaaaaaactgagaagctcacagccggcggttgagtcaactacctggtcaatgcgaggcaacccaaaaggatctttgggacaagacttgttgaggtcggtataatcaacacacatgcgccactgtcctgtctttttccgaaccaggaccgggttagccagccagtcgggatgaaggacttctttgatgaagcctgctgctaacagcttggtcaattcctccttgatcgcgtccttcctatcttgtgcaaatcggcggagtcgttgtttaataggcttggcgtcttctttgacatgtaaggagtgctcaatcacctctctgggaataccgggcatatccgaaggtttccacgcaaagatatctttattattttgaagaaaggtgatgagcgcgctttcctatttacaatctaactcggcgcctattacagcagttttggtaggatcagaaggatctaagggaatctttttagtcgcggcttctgtttccccaccttttgaaatcttggcagcgggcacttcgccttcgctcaccgtggttgcagccagtcggatttcctctcgggcagacgccatctcgcgggtttgggccatgtcgcaactctccttgtcgcatgtgacggcttgcttgatgtcgctccgtagggataggactccacggggaccaggcatcttcatcatcatgtacgtgtagtgcgggacggccatgaacttggctaacgccgggcgtccgagtatggcatggtatgctgtctcgaaatcggcaacttcaaagctgatattctccgtgcggaagttttcccgagtgccgaaagtgaccggaagagtgatctggccgagtggagttgcggataatcctggaattactccgtgaaaaggcgcattgcttggctttagctcggagcgaggaatctgcatatcatccaaggtcttggcgaagaggatattgagtgcactgccgccatcaatgagggttctgcgaagcttgacattacggaccactgggtctagtaccagggggtaccgccccgggtggaccactcggtcaggatgatccgagcggtcaaacttgattgcaatctctgaccatcgaagatactggggcgtgtcgggctgaacagcattgatctcccgttcagtcaacttttgcttccgtttagactcataagccatggggccgccgaaaatatggttgagctccttgcggtggtcttgaaatccagccggggtgtcgccgtcatccttcttcctggacgtgctttgctcttcgtcggagttcttccgagtagacttggtgtactgctccgcgaactgcttgtagatgaagcactctttggccacatggttggagtttgggtgatgcgggcattgggagttcatgatcttgtcgaaggtgttgacgcgcgaacgctgtcgagaagagtgagcggcggtcgcaacaagttcctcaggcttacgcttgcggtccttatgattgttacttccacctcctcccgtagccggcgtatttttcggtttccaactgggacccgactgcttcgatgcggtgacggcgtcttcggctttggcgtactcgttggctttttcaaacatgagcttgactgttctgggaggtttgcgcccaaatttgccgaccaattcttcgtggcgaatccctttggtgaatgcggcgatgatgacgtcgtcggagatgtcggagatcttgttacgttgttcagaaaatcgtcggatatactctcgaagggattctccggatttctggataacgttgtaaagatcatattgtgtgccaggacgctcgaaggtgccttggaagttggcaatgaagtggtcgcgtaattcggcccaagatccgatcgtaccacggggcagtccatggagccaagatcgggcggaatccgctaaagccactggtaaatagttcgccatggccttgttgtcacctcctgctgcgcggattgcgagactgtagacggtaagccacgattcagggttagtggtgccgtcatacttctctattccagtcggtttgaagccggctggccaatccactcgacgcaggtcgtcggtgaaggctgctactccatcaaggtcgtcgtcgtggcggtccggcgagtgatggtagcctcgagctgctcggcgctgtatgattgtgtcgcgaagatcgatggggcggcgacgaggtggtgagcgaggccgttccactcggcgctccctatgaaagtcgggaggtgagtgaacagaccgctcgtcgtgacccctgctcctgcggttggatcctgcgccggtgatgctgaggcttggatgacggtagtcatgagatcggaagtgggggactcggctgccagtcggcgtgtggacgctttcggagttaactggaaccgaggccgcaatcatggtctttgtctggttcaagatgttgacgacgtggtcggaacgattgagctcgttttggttgaggagggtgtcgaggagggtgatcgcggcaaccgcattctgttgaggggtgcggaaaaccggtgtcccttcgacgtcttgttggccgatgagatcacgcgctcggcgccctgcttccaaagctcgctgacgtcgatcttcagcctccttggcgatccgctcacggtcctgctgctcacgccgtagccgctcttgttcttgtgcttgatgctcctcctccagtcggcgacgttcttcggtctcccgggcttggcgttgctcctccgtctcattattggccatgaaaacgccaaagtagagaggggtgtagttgtcatcaaggcttccgtcgaagtcgtcgaagtcgttgtagcgagaactaaattcgtcgtactccacgatgtcagtaggacgtgagtcgacggtgggagagctgttgtagtcatctagttgatccgtcgaaaccgtgccgagtggttggaggatgacgccgacttccctgaagctaggcgaaatcggtgttgaagccgacttccgcctaggcctacgggatgaagacgctgtcgtggtgaagacggccgctaaatcgtcggggagcttcatcaggactggtgggtaagccccatcatcttgatctggtgtcgttggagaaggtacgatctcggccgagtggtttgaagccgactcgattgagatggtcttgaagtaggtttcagccgcgtttgggaatccaaacgggactgagatccggttctctcccgactggtccgattccgagtcaaggagagaaatcttgccgaagttgttggtgacgaagtcgaggctgccgaaccgaaacgtctgcccgggtgggaagacgaggtcgtcgatgccggagaaaggacccattgcactgatcggcgaaaagcttgacgctacccctacctggcgcgccaactgtcgaaactagatttcggcaataataaaagggggtggctatcaagctggaaaagtgtatgggttttgagacaaaggatttatacaggttcaggccttcttataaaagaagtaataccctactcctgtccggggatgaatccgccgagtgtattattgattgtatgattcgagaaaaatcaacatatgcccctagaggcgcccggaccccccttatatatgggaaggagtccgggttacaaaagataatctatatccctaacggaatatgaaaatataggtaagatacagtcgtaaccgactaagtttcagggtgtttccttgatacacaagttaagaaacaaacccaagatacaaataagaaattctatctacattaggtatcctgtgcccagctcgaataccatcgccgtgtagatatgggatacccatgatctccacacctgtagcgtgggccgttgtttatgagggcgttcttgcgccgcggccggagctccacaagatatgcggtggacagtttctgctccggcagcggcagcggggaagagacccggctcggggacagcggtgagggtggctcctcgtccaactgctgctcgtagtcttccgtgacgccgcagtatcgcaccggcggcggcgcgacctgctccatggatcgatcgtctctggatcagcactactaggaagatcgatctgatgacgcgtggcgacgaatgaaatatatagacggatactctgatccagtcccaaaccgtctcggtgtcggtgtccgcgtcgcatcaggtcacgcgtgcggaacagcggaacgcgcgaacgacaatgcgtttcttcggaaaagactccgcgtaggacgtcaaatatcggacgccgtgcatcatcacaccacctacgtatgcagcatgaaaaagttgaaaaatttatgtataggaaagttcgatctgacgaaaaagttgaaaagttgaaagtttgaagaaaaaagttaaaatctaaacagggcctataatacatgcagttgtagttgaagtagctagctagctactccctttgtcccaaaatgtaaatatttttaactatgaatctatataactgtatgtccagatttatagataaaaattatatgtctagatttatagataaaaattgttatattttggaatggacgtagtagatggctacaggaagtgtccggcatggtaggatgttccgtccttgggatgcttcatctcgtcgtcacagctgaaccagtagttcctccgcgacggcgaggtgatctccggcaggtccacctgcgggtcggcgccggcgccgccgactcggtcggcctcgtcgtccagggaccagaggcacgtcgggatataccgtttcttgtccttgcgcacctcggcgaagaagagccgctggtcgcacgagctgccgccgccaatggccctggcgatgaagttgacgtacgtggccgtaggcggccttgcaggtgaagatggcgccgctgaagatggccctgacgagctcgtacttgacgccgccaccgccgacgtcgacggcggcgttgtagtgctccagcaccgcctccgcgtacatcgtgctctgccgcatccagactgggtcgtcgggttcgaaggtcggatattcctcgtaggggcagatcggcgaaggcgggctcggcctcggcgttggagaaggcggcggcggcgtgtggtggtgcttggacttgttgtgtttcttcttcttcttcctcctcctcttttcgccggggcggcgaaacctgtagcgtgggccgttgtttatgagggcgttttgtcgccggagctccgcgcggtatgcggcggacagcttctgctccgcagcggcagcggggaagagacccggctgggcgacttgggcgagggtggctcctcgtccacctgttgctcgtagtcttccagaacgccgcagtatcgcaccggcggcggcagcggggaaggcgcgtccttctgcatggatgtcgcgcctctcgatcgatccgttgcgtgcgctttaatttcctcgtggcaacgaatggaagcagcttctggcctcgcctcggcccacggtccaccccgccaatatatagaccgatcgattatggatccaattccaaaccggcttggcgtcggagtccgcattgcattaggtggcctagcgttgacggacgcgtttctttcccttctgtctccctcctcctttgccgcgccagggtttgcagttacaaaacgtttttttttctgggcgaaagaaccgaaatttcggaattttttcttccgaaatttttttaattcaaatatgaaaatttcgatcgaaaatttggagtataaaaacttggggcgctccgagcacaattttgcagtcagataattcatgattttcaaaaaaaaaaataagtcatcttgcaaatcaatcagtccattacaattgcatacaccaataaatccattacaagttcatcacatagctttgacagtccattacaaaggtttcaaacattccaaatgtgcttaacaatatatcaccagtccaaaaattgtctcaacaagtcaacatagcaaaataacatcatccaacaggtagtttgtacagtccgttacatagtaaaataacataatccaacagatagtttcaacatcttccaaaagtgctccctccgtcagaaaaaaaaaaaagccaaatcctgagttttcgtgtccaacgtttgactgtccgtcttatatgaaatttttttataattagtattttcattgttgttagatgataaaacatgattaatactttatgcgtgacttgtcttttttaattttttttcttaattttttcaaataagacggatagttaaacgttggacacggaaactcagggtttgtcttttttttggatggagagagtagttattcatggacatccatctcctcattctcagtaaattcgtgttggagttactctttctttgtctgatctgaaacaattaaataaagtatatatgtactagtcagtgcacattccatgtgatttgttacaagcaacatcatatggtgtttttttcttctaaagatgaagataaagattaagttttttacgcaaaataaagtggtattaacgtttgattgattgggttttaattattaaaaacttgaaaaatatattaatataatattttagagtaactttcatatagaaagttttcacacaaaacataccatttaacagtttgaaaagtgtgccacgaaaatctttatcttcatccaactcttgttggagaaatgaacgggacatgtaggtttctaatttgtccatcacagagctagtgtaaaatacaagttttatttcttattttctaaaaatacaggaccagtgtgtggatgttgtcatatgcttaattgctgtcacatcgaatgtttgaacacatgcatggagtattaaatataggaaaaaactaattatatagcttgcgtgtaaattgcgagatgaatcttttaagactaattactccatgatctgacaatgtggtgctacagtaaacatttgctaatgtcggattaattaggtttaataaatttgtctcgcagttcaaaggcggaatctgtaatttattttgttattagtctatggttaatacttcaaatatatgtccgtatatccgatgtgacacgtcaaaaacttttcaccctagcatctaaacacaacctaaatacactcagaacgcaaagtgagctggttttagtgattgagggagcctctctatggctgattttacagttaaaaggatacgaatagttgaggcagtcgaaatggattttcttcaaaagattgctccttattttgaataggacaaatgtttgcatcagaatttaactggacctgggatccctatatgagcttctcttgggcctcggttgggcccaccgtttcttccaaccaaaatgggcccatgtaaaccgatgttagctcaaggcccaactagcccagctgacggtgtcctcctcctcgcgttgccagcatttcacaccgtgcgccgccgatcatggccgccgcccgccctcccgccgcgcgccggcgacgcgcatcgctgggcagccggagacccgcgccggccgcggcgctcctgttgcagcaaactccatctccgtttctccactgcaacggtacgagcaatagctgctctctttctccgtctttctgtgtctgcacgaggtcgttagggtttggggttagaaaggggatcgttgagatgcgacatcccggcgttcatcctgttaaattccaatcaaattgatgccgaaagccgatgctgcggctcatctgatccaatcaagttgaatcacagctgcagcagcggctgtgctggtgctgtgaattgccccaactgcgtctcaaaatctgccatgggaacgagcaatctaggagcgtagcagggttcgtaatagtaaggtgcgatgcaaatatcagcacgattcattctaccataggacaccaatgcacactttgtccaggactccaggttctagctataagttcgaatcattgcaacaaaatatatgtagcatagtaattgcattactaccccattatttctaaattgatacattgcacatttcagaaagcatagtacatgaaaaatcatgcattcagtacacaatggggcttaagcagttcctcttaatgcatcagaccaaaagacattttcttaagtagatgatattttagccaattatgaaagactacaagatatattctgtggatgtcaaatggcaaagctctttaccagaattataactcctaaattgtagaactggcttcatcaactgaaacaagcacctccaccacactttccatggtgggtcttctacctctgtcttcctctaggcatgaaacagcaagcttcatcattgctcttgcttgcaagtcattgaatcggccatttaatctggtgtcaatgaactcaacaatccacgattgtccatccccacctgacttcaaactttccgcgagtgtcctaattatcctcccgaggaccatttccacctcttcatcctcatttgtttcaagatccgaaacacgagctcccttgagtaattctagaagcactactccgaagctgtacacatcaacctttgctgttatcgggagacttgaaacccactcaggtgctaaatagcctctagttccttggatccgtgacacatttaatttggatcctcctctatttagcagcttcgcaaggccaaaatcggcaatctttggctccatgttttcatccagcagtatattttcaggtttcacgtcacagtggatgacccactccaagcactcatgatgaagatatgccaatcccttagcgactcctagagcaatgttaaatctttgcttccatccaagtaaggcctgtgagcccttagcaccaaataatattttatccaatgatccattctcgacatactctgaaatcaacatcctgtgtggatcatcagaacagaatccccaaaccctcactagattcatgtggtagatcctgccaatcacactcagttcatgcttgaattcttcctcgccctggtttatgtctaacaactttttcacggctactgctctcatgtcctttaagatccccttgtatacaatgcctgatgctcctcgtccaatctcatcctgaaactttctggtggctatcatcagctctctgtaggtgtacctacggaaatggtttgttaccatttcatagccaacctcagatattcctcttgctagtttgccctcccttcgcaaaataaaccatccgaatacaataaatgttacctctgcaagaaatattgctgataagaaaccatagaagtacaaatacttcgattcattttgaccactcttatgctcgtccaaatttttgttagcattgcagtcaggaccgtattttggaccaaaaggctgtgactgtgggattgaagtcattgaatgctccgacagttgtaattcctccaacacttcttccatagggagcttgagatacatggtgccagtactaccaatgtgaggtaagcttacaccactaagaagaacggactttggatagcacttaccaattccttgccaatatacaaaccccatacaattgcagtccttcaagcatatgttctcgcaagctccaagagaaacataacgaagaggacttaaatcagaatctaggaattgagtgtttggaaggctaacaaacattaccttctgttgtacatcacaagtgatattgactcttgggctgcagcctttgctctgatcacttggatcaatgaagtcataaccgggaggacacgcacaggcaggcacaggtgtgtacacacatatgccatttataccacacacaccacgtacattgcagagctgaggaaatgccatccatgtgactgaccatgttccgcttgaattgttcagactgtataacctgagattgccgtcataatctagtgttaatctcctcataatcccaagaccccaatcagcagccatgaaagttaaattttcactttcaagaaaatgccccgagctattaagagtaccggtcggtatgatattatacaacatcctttccctccccgagatagtccgagtcggatttggccagtaaataaaagggatatcattctcttcataaaacagtgaaagctggaattgatcattaaagtggaaactatagcgaccgggaacaagtaatctgttagtagatgtgagcttaattcgaacagtaatgttttgagtgggtaacaaggtatcggtaggagaatcaaaactttgccataaaatggtgtcacctttgcccttcacaatgaggtttccagtattcaagagctgagcttgaacttgttcaccatttgaagagctcacgttgttggtccaaacaatctggccactattatctgtcaaaaccatgctgccatcggatttcaactccattttggatccctgagtgtagacagggtggagaggatttgcgctccagacaactgttttgtcagccgagttggtgaaccagatagagaaggtgcaggaattgggggagatcttgtagaggccgcaggcgaaatcgccattcggcgaatagagcacatcgtcttcagatagagatgcgcctggcgagaggaaatcatgtgctgatatgcacaaaagaggatgaatcaggagaaggagcagagaggcagagcttgcaaccatttttgctggagctggagagcaggtgttcgtctttcaagcgttgctgttaacttattataagaatccatactggtcagtggtttctggatccagtaaagaaaagtgtacttctttggataacaggtttttgaagcttgaacttcgtggcagatgcagcctctgaacaactgtgcacacatgcattccttaaaaattcaagggtgtagagatctctactgttaaaaaacaagtggggtacagtgtattgattagcatacatttaggctcccccaccagtaggcattaaccttatccgttgttcatatggcgttgttcaaataagaaccttcaattgccaaaaacaccagaaaacgcgagagattctgacatccttcaattgcaataggaggttgatagcactggagtcatcacccagtcagccattcagcgagcctgtgtgctcagtccaagtcagtgtgcaagcttctttcaaaccaggaataggattttaggagtatgcaagatttcaagttgcacagcaatgcaatgttgcgagtaattcatggttttatgcatacatttccaacctgcttgacatacactgtatatggcaaatgtggcatgacctgtccttgtcgatcaggaaccgttaatttaggcagtaaggtaacatctgcaacatggtgatgaattctgtgctactaccatgcttcatggctgcacatgcacatattgatctcgctttttcaaagaaactgacttgtaaataaacaagataattttgctttcttttttaaggtttgctcccaatgataggattcagagggagtgcaaatttgaagtgttctcagcaggtcaccacgcctggtcactgtcagcaatctaacacatactgtcaacgaaatagcggtgcagccgacaggtcacacatctccaggaaaccgaaatgtactactgctatcaaccaaaaaaatagtggattacagtgtattgagcaatgcattggttttcaacaagcagttgtgacttgtgacttgtgattcgattttttttggtcggtaccattttttaaatacaatattgaagtttttataggaagaacatatttagtaacttttttttgttcatagggatacggtattgtctcaggtataatgctagctcatccaaatgatccttataaagatcactcccatgatgtgtatatatgcacagcttaagatctctgtttccacattccacattgctgatgcactcgacgaagaaaccttcatttggtgaaacccaatttttggaggaaacgctccgccattgcttcgggagacgctgagacacgatatcaaccccggccaaccaccggagtaactcaccgtgctaaaaaaaaagtatcttctggttgcatctactccctccgtcccaaaataagtgcagttttgcactattcacgttcaacgttttactgctcgtcttatttgaaaattttttatgattagtatttttattgctattagatgataaaacatgaatagtactttatgtgtgactaaatatttttaattttttcacaaaattttcaaataagacggacggtcaaacgttgggcacggatattcacagctgcacttattttgggacggaggtagtacacaataattataattaattaacttcatattttcttacaaactttagtgaattaagatattgatatatatactccatctgtcaaaaagaaataatcatgggtttatatccatattcaaatttaggattgggtttttttttctggatagatgaagtatatgtcacaattctcgtgacatgtatgtgtgcatccccaacataattttttttgggtctggccatggtttgaaagcaccattttgtagttccgggcgtccgtcgtcagtttaagatcaatgcggttagagtgggattagagcgaccatcacacctttggtagagctgacactttcatgtaccagttgcatgtatctagcacagccatttcttaaacgatacgagtgactgtgaagtcgaagcttgcagcattggaagacgtgatgtgtgatgtgtggcaacaatggcatgagtttagttttttttaagaaaaaaagggtaaaagctttgcctcatatatattttgatagagcaaaaagagaaaaaattataaatttttatttacagggcatcaaccgaggctcaggtaagcttttttttttttttgttttttaacttcccaaagcggtaagctcatggcatgagtctagtggagttgctgggtgttggtgtgggccgagttgctgatcttgttccataggttttaatgttttatataacagcgtattgtaagatttgataacaatttttaagtaaaataagacactcttctttaatataacgcgtcgggccttaattaattgcggtggtcttgatgtcgaggaagccgttcagtccccggatgtcgtagttgcatgacacaactgtctcggttaatcggttgaggatcacaagtatcacacgatcttgatcgattgcatgatagattactatatgactatatatataaggcaatgcatgcatagaaactcaagcctcttttagcttactcaagcccttggtcatcaaatggcaaacaacaacggtaggtacatgcagtatttgtgttgattagttgattatggctagctagcttagtttattctctcttgaccatcagttagtataatccatattgtcagttttttttttttttttgagaactactcatatcttcagtcagcatttttatacatggtaccaagtaattgctaccctaatttccaggatatggggatggtgatgatcagctcaccacatgcaccaagctggcgttagaccacattgtaagtgactagctaattaattaactgctatcatgcatgtcatctctagatctcttgatatagatcatcatgcattgaattgaatattgtcatttccaatcgattatatttgtgtgtatgcataattgatcagagtgatatatgctcctgtgcaggacatcgacctggagaatgtccaaggcttcgacagcaacgccttcaccatgaagctgttcgacgacaacgacgatttgatctacttccacgtcgtgtttaccggcgagacgccgggacggcgcggcggcggcggcaagcgttactccttcgccgagatcgtcggaaaagacaagccggaggaggtcagaatgtggaaagagatggacgaagaaagtgaaagtaagcaagcacacatatataccaccagcagctaattaactgatcaataattaattagattcatgcaactgaagcgttttcaatatgcatctgggcaactaattaactagctaaatattaatcctgtgtgttttcttttgcaattacagattgcaccgtggagaactgcatcttctgcaccgggatgtggcaccctctgtcgggtggcttctgtggatacaagaggaagaagaagaaccggagataggctcttctgcaattatcagccactgaagctgcatgtctcgtcgtctcatctttcttctaactttgttttctagaaataaattgggtaccaattaagtttagttgttatcgatgagttgtcgctttgatagatcgcgacgtagctggctgccgtgcttgcttgcattgcttagtatacatatgtgcccaaattaatttatatgtaatttctgttgcttgcttgaagaattaattacttcatcagtgcgtttaattaatttcatgcgtgtgctacattaatttctgttgagcttttctccatttcattatgcttgcgaatgtgaatatgtgatcggttaagtagttttggcagctgtcatagacttatagtactctcaattccattatatttggagtaatacatatggtatatattaattaacgtacccttgaaccttgatttctacttcccattgagcaagctacatgaaacatttacctcttaatttttcccttttttcacggaaatcttgacctcttaattaatcaagtgatcacaaaatatatttatagatccatgatactgttaaagtgaaccggtaactttcgatataattcaaaactgaaatcgttaagtttcgatgctttagaaccaaattttgtatgcgtttttttttctacaaacctcattcatctatcctccggattttggattttaatgtggacaaactatctccatgactcaatcccatcatgcattcaacctgcattttattactccctccagcatacatttcatgtttggttcacgtactgtaagtttaattgatgttctaactaccaccaactacctcagagagaagatgtttggttacttgtacatagtaactcacagtttgccagccattgcgtcaacaaagtgagactaccaaaaattgccagagaagtgttttgtgcaatttttgcatttctttagactacaaacaacaatatttaatttgcactaataaatcaagtcaacaaaaatcgatcagaaaacttaagattaacatcaaattgcaaacacccctgattcatgagcaacgtatgaagcatttgataattaaaatggcatgcaaagggcatgtccatatgcagacaccccaaaatcacaataatctgttttgtgagggatacgtatccacaaaccacctcacacatagataaggcacaaaaaatataggtctctttaatttactatactccactccatcatgcttgcacatgtatccaatcagcagtgtttcctattttagcggaaaacaaattaataaaacatgatttattacacttatttacatcatagagccaacaactgtgactagcaagaaatttcagaggcaaatacattcaatcgcagtcttttacagcatgattattccagttatttataacattctattacatacattactaattgtcccaactagcaaatacattcatacaaaaaatctcacgaccgaatctaattttcaccaaaagttgaatagctaatgagctacagccaagaacatccccaagaacagccgcaagaacacatgaaacaaaaaacttaagagtatagttattaggaccggaccaaacagactagcaaagaaaaaaaaggaaataaaaaacagaagttgagccttagttggtcccgtttagttaaaatgaagggaccagaccgataatccgaccagaactaaaatggaaccatgcaaactgatggttgggaaggcagttccttaccactacattgcgttgatgttagtgtgatagctatgaaatctttaatttcttaaaacatctttagaccagtgatccaaccggttgtaccactcaaaccgtgaactaagaacctaaaatttcagtacaaacaccctcaaaccgatggttagacaaaacaaattaaacatatattaattagaggatatgtcgagagcttatgccttagactttggtgggacttgggataagagttggccctatgcaggattttcttacaacaacagctatcaagatagccttatagatagccacattcgaggcattgtgtaggagaaaatgctgcaccccctctcctttaattgggatcaaacgagagaatgtcggctctttgggagttgggactggcatccaaaacgaagcagagaaaaaagtgaaaatcattcaagaaaggctgagggtagcccaatcctgccagaagagctaagctgatagtcgttaaagagatttgtgttttagtgaaggagattttgtgtaccttcgagtccccccgtttcgaggtgtaccctcttacaaaccaagggaaaattggcaccatgctatgtggggacatacaaggttttgagtcacaaaggagaagtggcatagaagtggcataccagttggagttaccccaagtggcataccagttggagttacccccaaccatggttgtcatatatgatgtattctatgtttctcaattgaagaaatgcttaagagtgctcattgagcaaattggcctggatcagatcgagatacagaggatctgacttgtggaaagaaatccatccgcatccaaaccagcaaaagaaacacacaaagacgagtggtcagtttctacaaggccaaatgaagcaatcattcaaagttgaggctacatgggaacgagaggataaattgaagtccacccatctgcacttcttagccagcacctccgaatcttagggatgagatttcatttaatacgggtagatttgtaataccctgagtttttcccctaagtaataattccattaatagtacatttctagaaattgccaaaaaaatcttataggaaaatctacaacaataaaacccttaaataataatctattctagttgggtgtaattttcttaaattccccatgctttaaattactcacagtatttttgcttgattttttttagagaattggagctacttttaataacccataaacaaatatcataataaataaattcataagagcttagaaaaaactctcatactcttgggtccactctcggtgcatccttcctccccttccgcccgcgcatgctagcaagtcgccatagccatatcctcttcacactcatgccagcctagcctcccatgtagtcgtcaccctaggacactgtgtcacgtcctaaaatgaccctaaaaatatatccttaaaattatgctcagaataattaaaatccaagtgaaagcctccaaaattaaaatgtgcaaagttaaaagtcaaataaggcttgggggattttttatatttcctaaaagctaaaatgtgtaaatagattttagtggaattttcagagcacaaataataattatcaagaaataaacaaagttaaaaaagttttataaaaagaaaaaccctaaaaatcccctccctctctctctctgggctgaattcggcccatctccctccccctctctctcttcccccgcggccccactcggcccctccccgtgcggacgtcgctgacgggcgggcccgcccgccaccctcgctgacgggtggggcccacccatcatccccctcatcccgccgctcccttcgcccgcgcctaacaccgccgccaccgccaaat

SEQ ID NO: 8359 - DNA, 34958 bp, Oryza sativa
ttattgccctgtgctcgtaggtgtgcccatcagcagcaacataagggtcatccattacctcctgcaccaaaattgtcattgtttctatttagtctagggagataatcagaactggcgcactcaactagttagcaaattttacctgcaatattgggcagatgaagtggctcggcacagctgcgtttggacttcttaatgtgggagaagcagtaattctgctcagaatgctctcgatctctggcagcacctccgattcaaggctaggcctgtctctacattttaaagctgtacaccgcaccgccaattttgccaagatctctgcctcagcgattggccaatcaatctgagaactgtcaagaacatcggaaattgagtctttttttatcgcttcttctgcactaagtatcagcccgtgtgggcgcttgccagtcagtagttgaagaatgatgatccccagagcataaacatcagatttcggacgaattgtcccagttaactggtattccggatccatgtaatacagtgtgccggcaactgcagtatctctgtactctgtgagcccttccggcacaatatctgatatgagcttggcaagacctacatcaccaattttgctgacgtagttcttgtcgagcaatatgtttccaggcttcaggtcacgatggacaatgggctctggtttcgttgcatgcaagaaagcaagcccacaagccacctcaaagatgatttggatgcgcaggaaccaatgtagtgattgctgacctttgttgttaataagttgatcttctagacttccattctccatgtattcatacacgaggcatccaatttcagggcagaaaccaagcagaagaactaagttgggatggtgaagttggctgaggatctcgacctacataatatcagataaccaaataagtaattctaagcgccagtaacaactttattgcctagccaagaaagtcatccatcagttatgatgaagattagaaaaagataggttaggatacctctctcaagaactcatcaatcttgtcactggaatcttgctgaataaccttgacagctacttcagtatgatcaagggtacacctgtacacattcccatagcccccctcaccaatcttctttgcatcggagaagttatcggtggcaagctgtatttcacgttttgagtaccgcctgcaacttttgccagttgacagaagagcatccataacctttgtcttctcagcaatcaccatatcagctactatttcagccttatgcttggaaaaagcctcctgagcgaacaaagtttttgccatctcaacttctgtaacagcttctagatgtctggtcttctcatctgcaaccttctgcttcaacaattcctccctatgtagtgcatcttgcaccttcttcgcttcctcagtacactcactagaaagaaccttaatctgaaacatcagagtaacatggaaaaaaactaattaaaacattcacttttaatatatgaatatagatatcttcatgtacctagtaatgtaaaaaactggtcacagtaactcaagccaaacagcagccaaaagaacttaaccttatcttggttagatcatcacaagctttatcacacatcactaacctttttcttggcatggacgagatcttcacaagctttatcatacatcactaacgtatcctgcaattcctttctcagttttgctacttcatctactggttgagactgcagatcctgctaagaattgaatcacaattaatacaacttatggaaagcttatgaaagccaacactagtcagaatattttcaaggctggaaacaggtctgacctcatcaattgagctcaaggcaacataagggatttccttcaatcggccaatagcatcgggatccgtgttcacatctctgcccggtgtttttcgccctaagcttccaaaaaggcttcttccatgacttcctgaacttttaccagcattagtagaagtgctacgagagctgcaggtatgagagcctgcataactcgtatctccagaagattttggtgttccatcctcagggtggtcatgcaaagattgtttgtctagcagccagttcttctgtattcgggaaaatgatttatgactgattgactgagtccttacacaagcgcttgactctgcaaaaaatagaaaggtttaaggcaaaatgagtgcctcaccattgcatttcccaaaagaaatagtagagaatatgggcaaaacatactgcttgttcgagcctgatttgcaaacttaatagtcaatctgtgcctggacacaacaaatacattgcacgaacatggcatagctttcaggacagtagagggcacatctcggagccgtaatatcctgaaaaaggtaacagcaataccatttaacaacaacagtggatttggcaaaagtggccagaaatcgatttacatttacagagatgctcattaattttgcttatgagtttaaagttgacaaataatgaagataaaaatcccccgcattaaccagctaaagtgactaatctatttatcagcatcatgaagacaaactgatgttagttgcgctggctcttaccaatatctgtggcttcctgggtcctaattactcaaaaggcataaatgcgagaaaaaaagaaacgaatgtcaacagaaaaaggaaagtttaatcaagatatatgtacgtgcacacacctatcacctttactcagaacaagtgacaccatcccaaaaaggggctcaatcttcccttttttttttctgaaaaactttttgtcccatatacacagcatatctagtatgcactttccagttatttttatactttggggggaataaagctatacaggtaagaacaaaaatcccccttatccctatcaatctatcattggtagttgaattctcaaaagcgaaattctaacctttactagtagttgggaaaggagatttgtcacccaaaataaagtgaagaggattatatttttcaaaaaaaaaacaattaatctagtataccttttgaaccagttgagggaggtggatccaaccacgaggttgcggacgccggagtccgccgcgtacctgaccagcgccgccgtgacgctcggctcctccagaatcaccgtctccacctgcaggggaggaggaggaggagggggagctcgaattttgaggcgcggatcgagcaaaatcggcggagattttcgaggaggaggaggaggagacttacggttgtgcgggcgaagaggcggcgcagggggaggaagacctcctcctgcgcacgcgcgcggcggtcctccgcgtacatctccaccgtctccgcgtccatcttctccaccggcaccctctcccccgctgcgcgcgccacgcagagaaaaacccatcagctcgaaccgaatcgacgacggcgacgacgaggaggaggaggaaggaggaggagagggcttacagggggaggggacgaaggagacgggggggatgacgtggacgagcgcgacgcgcccggccccggcgccgtgggcggcgaggttggcggccgcccacctcgccgcgcggcggctggcgcgcccgtccccgcgcaccgccaccgccacgacgatcgcgcccgccgccgcagcagcagaggcagaagcagaagcagaagcagcgtcgcctccacccgaggaggaggcgagcgacgacgaggaggaggaggaagacgaggccatatgctcttcgtcggcggcgccaaccactcgacggcggcggaggcggaggtgggtggcgaggggggagggggggaaggggagcgagtcaaccgcgacgaaataaataaaccgcgggggaagggaagcaagcgaggcaacggcttcgcgcagtttcttcgggtgggacgaggacgagtcgagtgataaactaacgctcttttttttttttttcgcgcgcgaggcgggggcggctcaacggctgtgtgggggtgggcccacacgtgtgggacccacactcttgttgttgtttgactgtggcggcgaagtcgctggctcgctgctcactggaactggaatgtttaaccacgtgtggatatatgatgcttttattatccatcaggcccgccagatttttctggctaggctgatataaacagataggaggagatgggagaagaacgactctgtgtgtttaaagtagtaaagaaataaaaatgatagtattaggaagaggctagtaaggcctttagaatgaagattttttttataaatttcatgagaattgaaatagtttatgtatgaaaacctggtgaaattttcacattcaaaaagaactttcataaggcatgtcaaaaggtcacacttgattttcgatgcatcctactctagttactctagttagattctcggcgtagctcgaagcgggaagatgatcacgaacagcatgagggtgtagggatggcagcgatcaaaaacgacaattgactacaattgagctatgttccccatgctgcttgtacacattgacagagatggactgattcggctattcacatacgtggacaagtttgagtgagcagtcatttacaacaaattaacctttgggggtttgaaaacaagagtgacaattgaggtggttatttcttaaatctttataacaaaatatcatatggtaatatttttttaaaaaaaaaagatgttttactctttgttctctttttttttcactctgttgcactttaacgtttccttggatattgcacgtattaggttcctgatgttgcaatcaggttttcactgttcaccaagtgattaaacattttttattgagcagtgaaacattttaaatcatttttctaaaatatttttttactgagtatgagacatcttaaatcattttttttgctaaaataatttttattgggtgataaaacatcttaaatatttttgtacatatggtaaaacaccattcggggttttaattatgatccgacatctgatcatagttgccttgtatttttctttctgctaggcccgtcaatatgagagtttcgtagaggtcgtatttttcttttctgccaggcccgcctttaagaaaaataggaagtgctgtgaaggggatagtaagacattctttacattagaaaaaacttcttaggaattgaaatacttcctctgtttcataatataagtctttctagcattacccatatttatatagatattaatgaatctagacatatatgtatatatagattcattaacatttatatgaatgtgagccatgctagaaagtcttacattataaaacagatagagtagtttatatgaaaatctcataattaaaattataacattcaaaaatgcctaaaatataagttgctaatacagagcaaaacttcatatttattgaaagcatagccttacacttgactaacagaaaagatatcttcatcctttaagagaaaaaagagagatccatgttgtaaacaggtgttagtgtgtggatatatacataaggaaaacagtccaaacaaccactaaacttttgatggaagtacatcaagcacctttaacattaaaaccagacatctaacgcactaaacttaaaaataccgttcatactgtcagggttaccgataagacataccctctctcctagaaatcatgaaatatacggatacgatatatcctcaagtatacggaaaggactcgtatttaagataaggaaatcaatgagtccgtatggaaatattctttaagggtggaaagtattagagtactacttagagaggataaggagtgtgtcatattgtacgaggtccgacgtctccgagttctattgggagacaaaggtgatatgaggtacaaatgcatacccccaggaagatacaaggcatcgaatcttagtgcaagacacccgccatcatagacgcaatccggacgacttgaagcctattcaccaatgatctcgtcagtaatctcggagttcaattgttctcttttgtaccacaatgttttcttctataataccatataaactggattagggctattaccttacagaggagcctatcgtgtagattctcgtaccaacgtacctcaataccctcagattataatccgtggtatctcccgtcggcacatattatcctgagatagttttgattggtggtttgtgtatttgaaagcttaaatgggtggctttgaataactaatataatgtttttatatataatcaacggtactcccttcgccccaaaaatataagcacttataatgttcaaattttatcccaaaatataacaacttatagcgtaaaaatttatcctaaaatataacaatttttccaccaacattctcttcagcattcaaattttccagcatcataaccttccaccattcaattttcctcactgcctcttctcaaccaatcacaagaatcctaatcctacctacttctttctaagtgagagtgaacatgaggtaaaaagaaatatttaagtgaagattttaacacatatatccaatgcctatgtcatgtgatgtgatcaaactcatctactgtataatacaaattagaaaaaaaaaatactatgcaaagctatattagagggctatataaatggtattgtaaagtttaaggatctaaatgtccggttttaaaatgtccggttttaaagtttaggtgataaatgaacttccatcaaagtttaggggtgtatttggactttttctttttagtaaataaaacccatcctaaatttttatcaaactttggatgttggaggtccatctttactttcctcttcccttagcatgtggttaacattagtaatctttctaatggattgaatattatgcatcacataaatgatatatcctatcttttgcacaacgacatttctcatatcaatgatgggaatggctatatgaagtggggatctatatactccctccatcccaaaatataatgctcaaccacttttctctcatatctctaatataagacgtgcatgcatacatacattaactagcacctcttggtccaatagaattgatttgtcttaaatcctataccatcaaaccacccaatcacattactcgcatgcatcaaggtgatccaatcaagaaggtgattaaatgttttcttggtttttgtgttatgagtggttgagtcttatattttaagatggagggagtatcaaatatgcttgtctcaacctattacatgcatgtatagtactctatactcaagtaaatttatggggataagatgactagaagcactttatagaccttattatatggtcatgaccaatctagctataaattctcacatggttatacgtgacagcgggtatatatatgaaaagccatatggtaaaaagacagttgatcgaacaagtttgtgtattggtcgttctcgtataaacaacaaagacccccgaaaaccaaacatccgtagtcaagatcggaagcaaaatagtagtgtctcatttccattggaaaaatccacaaagggcttaatttcgatcaatctgcgggcgaatttccccgtgtcgtgtagcgtgtacaaggacattaattctgaaagctatatgcattgaccaatgaattctctctatctgcagttgtcttctcctcatcggaagcttcagaattgaccgctcgatcataccagtgccatgcatgctgcactttgctccgatgtgtgtagggatgaaaatggttcagatagtattcagtttttggcttttttttccggaaacaaaaagtgcgggtctgaatattattttcagaaagtttcgaaaacggaaacaaatttagaatattttttttcttcttggaaacgagtatggtaatactactatccttttgaaactggaattagtcaaaaactttccggaaacgaatttgaaacagtaagctggttttcaagccgtttttcaccctacccgtgtgcatgtgtgctcattgctctttgtggcagtggcgcatggcagcaaacggccggcaagggaattaggttgtgtttagatccaaaatttgtattcaaacttccaacttttctcatcacatcaacctatcatacacacaaactttcaatcacatcgttttaattttcaaccaaacttacaacttcaccatgaactaaacacagccttaggctacgacgtgtgcaaaggcggcgcagcgcccttgtctcactcgtggtttctgactttgatcttctgatttttttaaaaaaaaaatttgctgactccgttcgtagcttgttcctgctcgtgtgtccccctcttcttcggttcttttttttttcttaaggattgttctttgacatgatcaaattgactgaatatggctggtgttttttttcttttaaatttccccttgacgaacagattgtattttgtctgacagagagcatgtcgcgaaaagatcgatggatttaattattggaagggtatgttctagaaatgcgaaatgaaaactctttttttttcctcatctcggttgctaattaatgacaagtgcggcgatgtacgggctgatctactagtcaatatgaaactctctagtagagtgcagtgcagtcatttggctcaattgtccggtttgagtccaactcgcgatcaaaataactgttccgagtccaacacggtcctagcagtatccagtcggtctcgaatgaaatatgtagttcttttctacgcagtaatataaatatttgtgaaaggagagagtattacgtccctccgtccaacaatataaacatttaaagcatttaaattttattcaagaatgtaagcatttctacactactatttatcctctcccaactaaactcccacctctctctcccaaaaacaaaactcacctatattcatctcttatttaataagttttttttcatcaatctcaattgatgttaaacaacctagaaatatgtttgatggatggattactattgattcgtacatagttagctagctgtctggttggctccatggggttaatggcgacaacgccgaccagtagttaggtatagcttggtttgacgtcaaagtcagtctccatgttgacgcgttgctcaaaacgtagtacgtggtatccgtactagtcgctgctgggtctagctcacggtctactcccgggctggagtagtgaatcatgaattaattaggagtaatcaatcttgtcccgggctcatgattggtcaggactcacaggccatagccataaaaattgggttcatgacattgcattggaggagtagtagtagcataagagatgaaactgcttgtgtttgcagaagaagttggtagtgatcgtccacatggaagttggtgaagaagtacccagccatcttccccgatgcctctcgctgatctacttgccaatttggtcccattctgcttgaactttccaaggtgacaactgtgacgttgatcgatctgtgaagcttcagaccggcgagaaccgagcatagtggagtagtacctatatatggagttatactagtacgtagtacatactacaaatgataatggcagaacttgtttgttttcttttgcaaaattaaaaatggtgtagtggtggcacgcattcattctctagttcgatgtgatcatgtgatgtgaagttacatcacataactctttcatcatctcatgaataaacatgcaaaaaaaactgatgatgcattcaacatatactccgtactatataaacagaatgaaatgagacaggcatgctaacagacgagacgacaatttttcaaaaacaagaaaaagtgttcggtactgcatcaggattaccaccagcgacaccaattgatggttcttgtcctcaaaatgtaatccacaaatccataattctgatggggcgaaatgggccaagcgtccatgtaacagttctagctaggccttcagcatgttgttgtcagttttatttgtagcgccaggtttgtactcgtcaaccgcaactatgattctctagttgtttaatttgtcgttggcacatattatgttatgtacgatcgccaagacttttgcgccttagcgcatgtgaaacgtttttaattgggccatttatcgatcgatcaatcgatgtctttaatctctggattctcacctaaaagagaagaattcatgcatctcgcaagctagaattcttcaagatttcaaatcttcagctaacttcatcactacattgtgaatcttgtgcaatttgcagaacaaaacctttgagcacgtcctgcggtatgatttttttttccgaacatcaaggatggcacatgatcaatttaagaaatacaacacaaagatatacaagtaatattcctgaaagcaggagagcatttacctcatgatcgatgacgcttctgggcatagcaccgggataagcgatttaaccagcttatttcgcactttgatagaaccgctgcactggaaaacgaagccatatgccttgctattgtgaatgacatacaatcctgctgaaaagctttgtcaaggacatcagaagtccatgatttggcatatgactccaaaatttcttcgtcaccctacaaatttaatgtgaaaataagaattgcaaaatatgaaactgttttatcgcagacgcatgcaggaaagtacacacatgaagatgggaacaagcatacaaagaatcaaggcatgcagctcaggaaaatagcatgcaggtgtgtatcctagaggtgtgtaatgtgcaagcccaaaatagttactttcttcattttatattataagactttctagtatttctagattcattaacatatactccctccgtttcgttttgtttgtcgctgtagctcatttcaaaaagagtcaaaatgtttgacgtcgtagtacaccggccgataccgtttccatctttacccctcagtcggcggcgcggagaagcaggaggagctcctccgccggcggtcctcctgcccctgccacggcgaggccctccacgcatggcgctcaagtccggcgccgcctcccacgcgcatagtccccttccgccgacgaagcgccgccgcggcaccatggccggaggaggagccacgctggcggcggcagcgtgggagatcgccgtcgtcttccgtcctccggccgctcctcgccttcgccttcgtcctctccatcatcgccctcagtacggctgccctctcctcctctcgattcggctttggctcgagggcttttccctgattctttcgttcgctgctcgcggcggcggcgggttcgcaggctgatacatggcgtggaggacggtgctggtgcacgtctcgttggtgcaggagatcgccgggcttcgaaaagctccattgccacaagtctcctcctttcttttttctttcttcagctggatgtccagaatttacctgattatttcatccggttaagatagctgtgcacttgattgcagattaagctactgaacggcctgcagattgtctgatttggttagccgtatgttgattgttgatgttcgttttttagagaatgcacattgcatttgcttggctatttgatgttcatcgaaggggaaatttttctgtttctgggaaattctggtcgtgttcactggggactgattgttgtgtatttgatcagatgattagtgcttagtactgtcagtgatgtaatatgcgtgggaattttggatgttataatgagaaattggaaacaaaaattggaacttgagatacagattcagagatgcacaccaagcttgtaaagtggctgctgccatcccagctgatgtttcttgtaaattgagatagctagtctgtaaacagagtattcagacacagagcttgtaaagtggctgctgccatcccagttgctatttcttgtaaattgagatagctagtctgtaattatatcaaaggaccattgacagttcacaccattgatcttagataagcttagctaatgtgttcatgtgaaataaaaatactaataaaaaaatcaaaggacatattcaggtccatatatcctcctgctttctcaaaaatcaaaggacatgttctgcacagaatgactgcacacatgggctactttctagaaaaagagagaaaaaaaagaaagcctccaattcattctgttcagatcaacaacagcaccaacaatttcagatatcagcaacagcagtaacaccaacaatttcagatatcaacaacagcagcaacagcaacagcagcaacaccaaaaatttcagattagcttagcagcaatttcatatccgcaccctgctgcagcaacaaacaaattcatatcaggtatctgccatggtcctgaaaaggagtaaaaagaatgccactaattagcacacatcaaactagttaggcacatgaagcgattttcatgaaaataaaatataaccaaagtagtttacctgagataattgttagcattatttactgacttagcatcacaccttagttgcaaaggaaggcgaccttgcctttcaagcactcctttttttatgtgtggaagatcataggagttgtcaccgagtacttctatgacttccctcatgcatgcgtgaagagacaagaaaatcctgtttgatagcctcactggataatcttcaaatgctcgatcgatggcggctacaagttcttctgttgttgttgaggctgatttgtactggatggactgaatggagttgaagaaacccagatccaagacattcaaatatggggaatttgccggctggcaaacaagtttgatgttaaagccgtcttgcttcgcggcctcacaaaacattctgtcgtccggtgcaatatgaggccgagcattatcctgctggatgtatataggtttgccagcgtcttcacgaggccacttagcccgaacagctggcaataccttttctatcatgaagcttcggattacctcctttgtgattgactcaatgggcttcatctcgattgtccctgcaggacggttcacacttgacctctttgcagctgtgtatgtcacaaaaggaaaacatccaattttcatttgagtcaaaccttggtctggcgagagctgttaagatcattatttttgggatgaagtttttgttttgaattgtcctgatgcgacgcgaggcagttggagctgcgtaatatcgcacagtcttcctcgtaatgttgaaccacttctcatctatgaaaatgaaatcaaacagtggtttgaagacaagattgtgaggcacactccttgggtcaagcatttcaatacaccacttcagccgatcaattttgttttggtctgtcaagtggggatccaatgagctagatacacgctttatagcaccctcttttttcattctgtagaccttactcgtgctaacaccaagttgagtagctacatcttgtattgtggtgcggctcaatattgaaatatcttcgagacaggacacatccaccaccttcttctttctgccacacctagatcttccactcgcaacatcaactgaaataccttgatccaaacagcttttgccttttttccatatccgctgtactgtcctgataggcaccgagaatttagctgaaacctccttgctctcatggcccttcaaatatccttttcttgcctttacaagcatggcgtcaaagattgctctccgtttgtcattatcaagcacgacattcttgtgtgtattctcctgaggaactaggatagcatcatcaacatcagaatcgaagaaaggatcaaactgaggctgtacattctcctggccagggtcaacacctatctcctctagagtgactaggacatcatcatcagcatttgaatcgaagggatcaaatccagcctctccattgccttgagcatctatggcagcactgtgatcgaatctagcctctccattgccttgagcatctttggcagcactgtgatcaaatccagcctctccgggatctgtggcagcatatgtatctcccggttccaaatttaaatcaatatccattgttctttgctctcgaccttgacaaattccatgggttgtagcagaaggtgatgttcgttgttgtatagaaggagaccttatccgtatgctaggggacagtaacattctgctcaacggggttctaaagaatggcattgccacgcagggagacttcctttttttgcctcttttccctccaacattggacccatctagtgtaaccctgcaaaaggtgttgcaacgaagttgtcatgaatgcacattttggattataagttgcatcaaatgttaagagtgaaaagcatagtaaggttctgagaaaagataaaagcatccattctgtaagacatctagtactggttgtatagcataactggacagacaaccatgtgatctaacaagaaattatacaataacaagaactccaatttatgaagcaataagataaggaaaagacttatgctaaatgtttgcataaactagaacaaccagcaacagctccctgtaaatagaaatacagtgctatttccttgctctaattaatcgaattttgcacaagcagtagccatgaactgaactatgtgaggttagatgtgaaaattcatttaacctcgcaatagtgagcatctatagagttttcctgaaaataacacattttaggaacacaaaatacatcatcgaaaaaaaatcgaatacgaaccttggagagagagcagttgaggacaaagccgcggcagcgaggcgctcgacacgatcctctgcaccgccgtcgccgacctcctgagccgctttcttccatggtgtgacaaatttgcgacgtctacctaccctgccctcctccttcgtcatgaccaacggcgtccaggaagaacacccggtatcttccatacaaaatcaagaacggacaagaaatgaacaaccaaataaacatggtaaaaaataccagaagacaagaaacacatggtaaacaacaaccgatcaattcaaagaaactactccgtaaaccatacactgttgtccaggaatcagatagaatttatcattttaatttagttctgctggtgtagctcaactatagtgtcagcattacattaggcacaaataatgttcagataatatctactttatccactgatctagctcaactgtggtgtcagcattgcattagtcacagattacctaggtaaaactgctaattacaagtgaaatattggtgccatgatggtcattgtcacactaagcattttattagaagcaaatcgttcctgcaaaatgaagaattatctgcaacacaccttgcaaaaattcagagcaaatctacaagtaatattgcgaataatcaaaagatcaaaagctactgccacatgaacaattcaagatcaaaccttaatcaccacccactaaaaccttattaaaccaacatcaattcatcatcatcatcatcatcatcatcttgaacgtgatcagcatcatctaaacccaatatgctaaacctccaacgagccgccggacttggcagtgccgcagtgtgagtactaccctgaccaaaatctcagtacgccagcttcttgctgggctccggcgatggcgagccggcggcgctgcccagtggtggcaaatcgcaaagaacgccacccgccactacactactctacagcttcggaggagaggatgcgtcggccagatacccctagtagccggagagcggcggcgggatgcggtggccggcgacttcgccggcggcggtgggcgcaggctcgcgaagagacgggagggaggtgagagaaggtgtgggaagaggggaaagagaagggtgtgctcaccggcggggggaagcaggatgccggcgccgctgcccgtgggaaggggaagccgcgacaggggtggtggggaagagcaccgccgtccccgccgtcggccctgccacgacgctcgggatcgggatggggcaccgccgccgtcacgcgtagaagggaaggggaatgaatcagtgaagaggaagggcaaaagggtaaattcacgtcaaccttaatctcgccgaagctgtcggaaacgacaaacaaaacgaaacggagggagtatataaatgtgggcaatactagaaagttttataacctgaaacggaggtagtataaattaagcaaacttctaaaacgaaatttacgcagttaattatactaccaaaaacgccaccgaaaagacaaagcaatgaaaaaacttaagaaacaaatacctcaagaagctaagtatccttggacgtcaccaatgcattttttccagaggaggtaattaataacagttcaagcacataagtattagacagtagtgcattccaagccacaaggcgaattgtggattcaacactccgatgcaagtaattaatgtctccaaatgggaacagctagctgcaaattgctcaataaggctatcgacaaaaagtagtatagctttcatgaatgttgtcttgaaatctgagaaaaatatcgtaatatttttaacataaagcaagcatattatcaaaatatattaaattatagttttaatgaaactaatttggtattatatatagatgttgctaaatttttctataaatttagtcaaactaaaaaagtttgacaaaaaaaagtcaaagctagttataatatgaaacggaggaggtagagcttatatattcttacatgggcctggtttagtttccaacttttccatcacatcaaaactttcttacacacataaacttccaactttttcatcacatcgttccaatttcaatcaaacttttaatttttgcgtgaactaaacacacccataattatacgtgacaggggtatgaaaagctagctatgtgataaaatgtacggtgatggaacatgtatatatgagttctcgtaggcctgtttagatcccacctcaaaattttacaccctatcatatcgaacatttaaacacatacatgaagtattaaatatagggtaaaaaaataactaattgaatagattgcgactaatttgcgagatgaatcttttaagcctaatttctcaatgatttgacaatgtgatgctatattaaacatttgctaatgacagattaattaggcttaataaattcgtctcgcagtttacggattctgtaattagttttttttattagtgcccgaacacctcatgtgacaccccacataatatccgatgtgacacgctaaaattttacacccctgaatctaaaacacactctaaataaataaaaaaggacccccacgaaaccaaacatcgatagtcaagattggaagcaatacagtgaagtattactccctatgtcccaaattataaggcatatatttttttacacggtcttcaatgatatactttgaccattaatttattccatattatgttactaacgaatatgaaattagcattacatgaaagtactttaaaatatgaatctagtgatataacatgcataatacttagcatatatatggttagtgtgattgttagtcaaaagttatcgggtttaatttttcttaaaaagagagcgccctatattttgggatgaagggagtatttcatttcctcgggataaacgagaaaaatccacgaggccccctttccattgatctgcgggcgaatttcccaggtcttctggtaaaaaaaaattcccaggtcttgtactaatgaattctgaaagttacgcttacgcacattgactaatgaatactctctctctctctctctgcgtagttgtcttctccttatgggaagctttagaattagcagtttctaccgcacgttttttttcagactatttaacagtacgttttgtgcaaaaaatttatatataaaagttgctttaaaatacaaatatattcattttcaagtttataataattaaaactaattaattatttactactacatccgtcctatataaattgcacttctatctaatttaggacaaaatagtaggattgaaaaatgactataataatcatatttaatgaacacaaaagatgcacacattctatatatataaaattgattaaaggaagtttgagacaattaaggaaacatttttagattaaaaggaagattgtggaatgaaatgttaggagactatatgaaacatatttagattaatcaatttgctaggtcttacgtgattagaattatagttttttgagacaaagcctgagagcatagttgcagtttatatgggacggaggtaataataggtttcacgttttacgtacgataacttactctttattttcatcggtttcaaacaccacattactagtgccaatgcatgctagctgcttctttttttaaaaaaaaaacaactacatgctgcttttctgcgtgtgtttccttgctctgtgtgtcggtggttcatggcagctgacagccggcaaggcttagctaagacgcgcctgtctcctctcctctcctggcgatggcggcatcatcttcaaaccgcccgtatttgagtccgaggcatcatcttcgtctctccttctatctcctaccttcacaagtccagatcactcgtggtttctgacttttttttgttgactccgttcccaacttgttcgtggcttcgtgctcgatcgtactacgtgtcccctctcagcctcttgtgctcttcaattagtttaaaggaaagaaaaaaaaagggttattctccgtgtcaaattgactgctgttttttttttctttcttaacgaacaaattatattgtctgactgacagagaacgtgccgaaaagatcgaccgacgacctaattattgcaagtgtttgttctagaacagccaaactatgttctttttccctctgaaatgcatggctaactggtaaactaaagacaagtgcggtgcggcaatggcgctgctctgctatagttgttcatgctcaaggatactataatcttcctaattgtccatttgaccctgatgacgtgcatttatccggtttgagtccaactcgcgatcaaaacaaatggtggtccctgatagcggtcggtctcgcttgaaatagttcttttcacgcagtatcagacgagaagaacagaacaagtcatgtgtgctcacatttcttaatctcatgataaatgtaaaattaaggatgtttttcttcttggcacagcacacgtacgtaaactcatgtctcatcaagatgatcaggggcggtcctggcggagataagtgtggggcaactaactatagaaataactatagatgccgattgggaaacccttatatgtgccggttttctcaatcgacatctattggtcggcacttttgtgattagaaaaaaagggctcgatgcatcggctcgaaattaagccgatgcaccgagccaactctccatcatcatcatcatcgtcacaaatcaacatcatcccatcaactaaacacaatcaatatcatccaaacacaatcgcaaaaaatgtccaaacacaatcacaaaaagattacaatcacggtaatcccacggcctcccatcgtcgcgtcgtggcggagaggaggccgcacccaccgtggcggagaggacagtgataaccgaagatctaggttgccccccaagtatttaatgggacgacgttggtttgtaagggtctgtttggttgctacccgaaaaagttgtgcttctggatgtacggatttaggatttatttgactcttccattgcgttctctcttttttttttcatgctttttctttcaagatttcaatcctcgtaatgtacgcaagatttgtgcttgtgcatgggaggttagagtaatagatggatcttagttggatcttgtgccaacgtcccattaatacttcatttagttgtataatgatcaaaggcataattgcgggcttaattattcactttatagccaattttatctttttaaaatttggcattgccaaaattttagcaaattagcaacattagtaagttttgataaaattggctaaatatgagatatgaccaatatttaataacaaactaaacgccaccatatatttatcaatttaccaaacaataatatggtttaaaatattgtttaaaatggtattaatctgaacagacggccatgcatatttgttgctcaggcagcaataaccaaccaaacaagcacatactcaggctgcctgaccaggctagatgcattgtcttctcatatgccactcaggcacacagaaatttcaggcatgttgctcagggtagcaagcaaacaactcgtaaagctccagggcaaacagctcgtaaagctccagggcagactggcagtgacagccggagatacatgcggcaagtgataacggcaatttatttcttttcttttgcaaagaaacaggtatagtgctggcacgtatccatgctttgatagttctacgtaacttgcatcacataactcgttcctctcatgaataaacttgtacagaaaaacgtatgatgcattctgctaccgatgtatgcaagttagcatgtataattctttttagataatgagttagcatgtatatacaaacagaatgaaatgagatgggcatgctaacagataaacaccatgaataaatgtcttctttcaagaacacaagagagggagaaaatgttggatactggagcataaggttggagttagcatctctgtaacaccagtctgtttcattgtcctttaaaatgtaacccacaagccacaaccgggagcactcctacacacactgatgttttcctttggttggtttgtaatgcaaagtaaactcgaacaatgcaactattctctagccatttgtcattgacacatgttactatttacaatcaccaaaaaaattgctccttctctgagtgcatgtgaaatgcttttggggccatttatctatcaattgatgtcttcagtctccgaacctcagctaaaagagaagaattcatctcacaagcatccttcatgatttcaaatcgtcggctaacttcatcattacgttgtgaatcttgcgcaatgccttgtagaacaaaacccttgagcatatcctgcggtatagaattttccaaacatcaaggatggttcatgatttatgaaatatatgactaatattccggaaagcacgagggaattacctcgtgatggcgcttctggccatagcaccggataagcgatttaaccagcttattccgcactttgccagaaccgctgcactggaagacgaagccagaaaggtgatgccttgctactgtgaaagacattgcatcccgctgaaaagctttgtcaagggcaccagaagtccatgatttagcataagactccaaaattccttcgtcatcctacaaaattattgtgaaaataataatcagaaaatctgaaactgttttatcacacagatgcaacaaagtacaagcaggtgggaacatgcttacaaagaatcatggcatgtgctcatgtatgtaccgaaatcaaatagttaagaaaaatagcatgcattgtttactctttgcatactctatgtaatgtgcaaccccaaaagcagtagtataaagcaaacttctagacccaaatttacattgttactacaaaatgccaaccaaaagacaagcatacaagaaactaaagagacaatacctcaagaggctccaagtacccttgaacatcaccgacgcatttgtctagtggaggtaacagttcaagcacataagcattagacagagcgttccaggccgcaagccgaattgtgggttcaacactccggtgcaaataaatggctacttgtcgaccaaaaagagcatcaccatatgagacagctgcaaattgctcaataaggctctcaacaaaagtagtatagtttgcatggattttctcctgaaatctgagaacttcagtcctggtcaccttttcttcgtccacagaggctgatccttctttcttgacagagtgagcactgtcatatttctggcataatctatccaaatgcaggccatacagttcttgcaaagcatgaaaaatatccctacttctgtcttctagaagcaaatccatgctactgcggatagaggcagaaagtgcatgcatcttccaaaccaaaggagcatgaagacatggagccgctgaaatggcttccagacctaaaagaaagaagagaccagcttttgaaacatcaacagcataactggttgataggttggcttttggatcatcaatgcaacagactgcacttagaatccagtgcacaggaaggggcaatctctggtgtgcccactctacagctaacacactgcaaggtggatttacagcttctgctaactctgtttcttcttgaatcgtctccaatgtctctggtatttttggcacatttgtgccattgttatttcttgtaaattcatctgaatgcttcttcttgatgaccaaccatctggatctgaaatgtgaattcagtacactgctaaaatggagatactcatcttcagttatgtcccattcaaaagcttttgctaatttcatgtgtgagtctagtactgaagatttgagaaacttcagaacagaagggtggaagaggatatcaaaggctttctctagtgtagatatctgcccaggtcctgccatcaaagatacactgaggacagaactgattctctctgaagtgatggcaactgaatcagtcacattatttccttcttgcacaattggattcacacttttattgacggtgacaaggccttctggccccgtggacaagattttcatcaattctagaacaaaatgtgaatccaattgtgcaagaaggaaattcaaagaccaaaatcctccaccatatgctccccaaccaaaaccaacaccaggtgctggtcctcctctaccaaacatctctatgttttgtaatatggaccactgtgaggaaatcattggcaacaatgaagttagcatgtccaacaagttattacgccagaaattgcaaataccttgttctagtatcctgccagctatccctgtttttgattctttcagatgctctgtacaatttgttgtggcgttctggattactctgtcaatagagcaagatagctgcaataacctttggaagcaactaattgaacacaatgatgtgtcaacattaccctgggatctcaaatgaaaaagtccctgcaccaacgatgaaccatggaaagatgtatgttgctcaagttcaacggcattatcatccaagaagttgaaaaatccattagtaataactcccaggccaattttgggtacaaagtcaggtatccaaggcaagcagtaacttttaccatcatgtgtactatctggagatatcctttctagtattgaatcaagcatgcctagcacagaagaaataaccaaagcaaagtagcttccctctagtatattcttactttgcccactgattagcaaacacacataaggaatatcattcaggcatagccaagatagcgccaaatctaccattggaactgcatggctccacgaccatgtctcaacttggataccagaaagtcccatgtcttgcttgttaagctgctcaactgaatgaagaagtggaagcctttgagccagagctcctaatacaagataactctctgttgcaatggaaataaattcagctacaacatgctttcacttagcttctgaaacatcgaagggctaagccacaggcataaaataggaaagaaatctgtgaaatgcgttatacaaaacccgtaagagatacaggtcctccaaaaccgcagctgctcaaccattaatgctgaagtaagcttgcagtgctcctttccagatcttatccaatcctcaagagtataggcttttctgtaccagtgccacatagcctgatgaaaaactccagtgttcacaaaattgaagcatgtttgcctgttgtacttggacaaaacctaggcaaaaggaacaagaaattagatgctagtgaaaaaaaaatctttgacaaatttagaaatagaagtaatgattttttttagcataatctgaacattcaaatcttatgactatggtgtttctcatcttaccataataatgaattaatggggcaactaaagtgcccgcaggagggggggggaccaaacagttgtgtgttgacagtgaaggcattgtgcaaggagtgtgattgattcagataacagcaggcatggctaatacaattgctatgtgttaagatatcagaagcagcaaacaaaaaaaaaactcataatgatgctgttggtagctaattaccaacaaaaggaaaccatttcagatgtacaatcagcaattgcaagtggtattactggcagacttgatctagttatccttcagaaggaatccttctgaaggataactagatcaagttattatcaaccaatgatatagaagaaaaactatataataaataatctgcaacttccaaaactacacaaaatcagcatactcctataataaaagattatttatatcaccagaagataccttcaagagattgactcctttaatttgcgaggagtgaatttccattgatccttgcttgactaacaacttaacaacactttgaacgagccttgggcagttcaagatagcatcagcagattgtggagagtgtctcgctaatcccaaaagaattgaaacaagattatcttctagaattggatgtgggtccatctgaatcaacaaaaacttgaccattaagatccgtaatcatgaccatcactttctcgtagaataggaaatgaaaacataaataaaaagaagaccaactagctcaaatgatgtttactagtgaagtaatagaactgcaatataaagctatcactataaaacaaacagtcaacaagcaagagcaccaagggtgaacagaacaatctacgagacagtccaataaccagataagaagtttgaaagattacgggtatcagatgacatgacatcatagaactacaaaatacttaaaactgcaaatggataaggcccatagcttcaggaaataaaaaatattgctaaaaatgaaaggctatacacaatttatcatagtttggttgttgaatatcaaaattgtaattttccgatggtaaaagaacaatcaaagccagccacaaattctgctgcaaaccagatttcctggtgaaaacaagtgatgtgtcaaccaggtaaggaggcatttcactgccatttcaaggatggatggcaagtactagacaggattgaacatcaaggaaccagacaattcacggatatagtaaacaaaagatgacctaatgcacccatattgtgcatgcatggcggtgggattctgggtgcatgcatggcagtgggattctgaaagaaacaatggcagataggggatgagggagagcagatggccagaccctcacctccaaaaggaagcagatccgtggaagtattcccattctaacaagaccagcagcaacatcttgacctgatacaaccacatcatcttgaatggtatgtttctcatcaccttcttcctcatcattctcaccataatgtgggagtatattggatggttttgtgttgtatttccagaaacctccttcaagaaaacccccattctgatcaggtttgctacggaaaacaggagctgtacagatatccttcccttgatctactactttctgtaatgttgaaaatcagccatttaaggataaagttctcaacgaaaaacaaattagaagataaattagtaaagttacctctaaaacatcgaaatacatctcattcatttcatagctcagcatagcattgataactttagcacaagtcaaaactacagaatcatggttatcatccaatgacatcctgcagatattccagttagtgatgacacataagtagaataaacaatgaaaaaagcataggccattttaaggtctaacactggtgcaattaactcatataagcaaagaaactaattagatggcatatgagagaactaaataaaaaaaacctatagacaacagttaattaggtcacaccgcagttttctgagattataacttattagggaaaattccatctatagcacaaagttttcactggtacctaataataccatggatttttccaccctttcagaaataccacaactcagaacagaacaaggcggggatggacagtgccattttacaaagaaaatgcccagattaccacgaaggcaatggattatttggcttgattcgcagcaaatcctgccaaaacgaggtgttttctgtggccaagagaataacacaaggaggaaatggatttaggcgttcggatttggggacatatgattcggatgcatgtgtggatgttgcaatggccgccggcaataagagcatcatggagacctgtgagaccaagtgattggatcacgctagagcaggtcagaggcatggccatggttgccagaccttcatcggttacgggaggagtgcggaagacttcacctcgagagccaacgcctcagcggcctcggcgctggcggcctccgcggctggcggcggtcgctagtcctcgaggacggattgtaggtaggaccgtgcttcattgccggaattcgtggccaccagcttcacttcatctcgccgagagagagagagagagagagagagagagagagagagagagaggagacgagtggaatcacggggagactactgaatgcagattgaagaaaggccaggggcaattttgtccatggtaatagttcaatttgtcatacgttcagttctgtaaaattttgtggtattttttacgtgtggtgtcacattgtggcatttctggaagggttgaaaattgtggtatttattagtacctatgaaaactttgtgctatagatggaattttcctaacttattatacatgaaacagccaacgtgactgcaaaaagaaagacaataagggcatgtctagtgcacaccttgaccgatgctagcaagcggatttgaaggcttagtaatgattctaggcactagaagaggagatgctaggaacaaaatcgatgcatatatggtttgatgcgaagcaaaatgttttatttgcatacactaggaaagccagtttttaaaatttctagtggagtccactcaaaaactaaaatcgatgctagcacactagagaagaaaaattatccaccctgtgtatcacatggctgtgatgtgacaaccttagcttcacctacactagacatggcctaagttaactggatacatcttcttacaagtgctaactgatagctaatggacaagatgaccttatgctgttaatgcttgcctgctgtcatgaattcatgactaaaatacaagatgtggcagcccaaattttcaggcatacaattttaagcataggtgcagacactaaagcatgtgttaaggtttcttgattatttagtcttaatagaattgtccggtatatttcagttaagtactcttcactttggtaactaataaactcttgcatggaataagcaaatccaaattaaaattattattatagtttgaaaacaaccagtttaccttagagagagaaccaactcaggttcaggtccgatggcatatgcccaaaccgcttgccagtcattaaacttgtcatcatcatttgattctttaaagttatcaattagatccgtcttatgtaggttctgcaaggccctattaagaatcaaagcaaggagctgaagcgcaagcacgcgctgtccaggaacctatggtttgaacgtaaaaactgaattattacatttatttatcttgcaatattttggaggcacactttagaaatgatgtaagaaaaacattaagcgatgatggtgtatctcagttatgcatgatatgacatttaaaaaaaaaaacaacaaaatccattcacatgcaaaggttaatatctctaaaaatactaaagagaaactagatgttgtattgcattgggtaaagtccatttttagcccttgaactttactcaaaagtccattttcacactgaacaacaaaagaaagtaacaaaccatgctcctgctaagtgccactgcttcattaattgtgtacccaacagctgcgggatctccctctgttcgaagaaaatcacgctcacctacagtttccacatgtgctttcttgcctgtaagtgggaaagccaggttgacatgtaacgggtaccagaacactagaagctaaaagcaacacaagagcaaagaaaaatgatttaccatgttgttgctcctgacaagattgaaaccccaaaatatctccttccaatgtgaacctacaagacctgatccgctctactctctcactccatgccttccaagtgtgtccactatgctcaccagctgacaaccattctccaggcatagccttcgagatcttccctgggcctgaaatccccccacccttgccctttcccccatctttcctgctcccagacttctccttcccccgtcgtttcagcatctccacaaatgccgggtccatcctattcaggatctctgcctgtgcctctgcaatctccccagctgacatccctgccagcctagccatgttctccgcattaatctctgcggtaagagatggttccccattatccgattccataccctctcctcgcaattccacattcctcacatcatctctagcatcaacctgtttcatcggcttccttggcgccacatcagacatcaaagcagctccacccaattcttccttaccatttccaacttccagctgcataccaattcccccggagcgcttctcctgtgcggtgccacccgtcgttgcagccacgaccccggtgtcaattttctgcgcagtctgtttcttcggctgcaacggctttgcctgccttcgcttcgggggcgcatcgtcagcgacgaactcccgccacctgctgaaatccatgcccttcttctccttcctcttaacgggcccagctgcggcggccacgggctggtagtccgtctcgtccacatccatcccttcctcctcctcgccctccccctccgccatggcagcatccctcgccgccggtttccagtgctgcggaagagcagatagtcagtcagggagtacaaaaccaaagcaccacatcaaacctagggttccgagatagagggcggcggcggaggaggcgtaggcggcttacggggccgtgggagcggtggcgggcgacggggaaggggaggacggtgggactcggggcggaggagggcgcggcggcggccgcgccggaggagaagcccttctcgacgatggcgccgacgaggcgggaggaaggcggcgccacggcggcggccgggggaggggaggggtcgaagggctcctccacgaccttgcggcgcgcggggtgggcggcgcctggctgctgctgctgctgctgccgccgcctccgctccgccgcgtcgtccatcgcggtggtggggttttggttaggggagctcgctgtcgccgcgtggcgacgaggaagggaaggattaggagaggagtagggtttaaggggaggaggcaggagggggatggtttggtgcttttgccgatcaccaagtcggctgtcgcgccgccaccgctgtgttttggctgaaagcgtgaaggcgaggtcgaaccgtcaaacaggaaacccctttgaaacagattatttcctaacaattcctttgaaatttgcatcgaatggaccttcctagagcaattttagagaaaaataagtgtgaggtctcacctcatgttttcctcgtatgtctaagattcctacgattttcctgtgtgataatcaaacgctagtttggagattttaatgtgtttaaaatctcataggaatccaataagtgtggcattctgtttctacgtttttcctatttctctgttttctcaatcctgcaatttaaaggggcccttgggctgcgctcggcagccaaggttgtcgactaatcacttatatgcacggaaacagccgtatattagcgtgtgattagttaagtattacttcctccattttatattataagactttctaacattgcccatatttatatgtcattaattgtgggcaatgctagaaagtcttatataattgttaacaatgaaattcggtaagcccctgagagaattatcacgtcgccaatagtcggattcctactatattcggttatgaaaattaatctgttaaagaaagcttatctagaagtgaccgagtttaagaaggatgcggcatgacagtttatctattaattaggcaacatttgttagttttcttttatatttaggaaagcgtgtttagtgtcctataagaactttatgttttccttttatctatttatgttttccttaggaaagtttctttcttgtcctataaggactagtatcttcccatgggtataaatatgtacacccttgtgttaacgaccaaatttggtaagatatgaactaggttcggcattggaaacagagtggattcggcaaagaaatagattcgaagaacagagtatgcatcagctgcgaaggaatcggctggagtctgcatcggctgagatggatcggacagaggacagccgatatagccgattttgttgaagacagttgtaaaattgtttctagaatcaatcaacgtactacacaaggattgccacgatgcgagataagctctcagatagataattgtacctattaattaggatattttaaatagtttcgttagagatatgtttaggcaaaagtctgtcgtaaagacttatgtgtatcttagagatttagagataagagtcgtgtccaccaaggacatatcatgtatctcgggtataaatatgacccgaacccatgtaattaacaacaacagttcaataacactttcggcgcatcgccatccttttactttcgttctatttcgatgagttcttactttcgggttgagctgcatcggtttcgatcttcaactagaggtaaacttgtcatggcggtttgcattctcgggattagtgcttccatctttatgacaccctaatcttgtttatgtaattcgtcgagttatcatatatacttcataatctttattagttgctctatgtaacttgtaatcagctggtttttactgttagaaagtagccgatagagttagatttcgttattaatctagattatattgtgtatctaccatctcttagagattttcattatcttgtttagatcttacagttatctttatacttaatgctgcatcggttgagttcgatctattaagttatatctataattgtgatatctagcctgtttcatgatcatcagtagagatagtgtcggagtttcagccgatcttatctgatttagttatttttatctcatatgcttaattgttatgctaaatatgccctttatattaagatcttattgcattagagtatattatgcttcttgtttgatatattttgcttgttttaatatcttagtataaagtggtgtcggagtattagctgatacatgctagttctatctgaccagctatgctataaacgcctatataatcattgctttaatgtatttttcgacttaagtgatttatactgtctcggcatggcgaccaatctatcccaatcacttagtttaaacatacgtcgaaggaaagattatatgtcgttaatatctacagccgaccaagtagatttagtcttatcttattcattcattactgccgatcgattccaacatgacatcggctcgaagataaatgatatatcatcggcaactagccgatcggttatcgtttatggatttaacctcattttcttgtcttttattcttgttgattgcaggatcaaatcaactggcacgctcatgaacctaaaagcaagattttggacctgcacaggagttaagcagatcttccaggccagtgtgtgtttttcgcatcaacaccggggtcattgtaaacaatctccacaatcaatacaattcggcgcatcgccaccttttaccttttctactttattttattgtccaacgggacttggcacctgacgcggggctccatcggtgttcgatctccggcgaaggggtaagtccaatgttccgccggcccaggcaattgtctcatctacgtcggcgttgttcaaggctgcatcagtacattcgacctcttggattgctctggtttggatgatatatttgcctacctatttatcatatgtgttagttaatctagtcttagtatcttaatttagctctatcggttgtctctcgctttagggtttctgccggtatcagctaaattgttttactaaattagattagctaaggcatctaccaccttaaagattagtcaagggcttgattgcctagatattacgtttcttttcatacttagtgctgcatcagttaagtttgatctactaagttgtgcttagaactataatctctagcctgcttcttgactgccaataagggtttcatcggggtttcagccgatgaggtatctggacgttgcatcggtttacaaggattgcatacatattggatttagccgatgacaataaaggttttcagtgttttatctactcttatggattttatggcattggacctccagccgatgtatgctttaaccttcggatcaatactcattctatcatatcattgttagccgagccgattggtttctactagattatattattgttatattgtattatcatcagctgattgcctttatattggtatttatatcaagtgtcagaatatacattggatatatatccggtagctccgaatcctatcactatcggctggtatcggcatcggctggaattactccatcggcttgtcagccgatcgactatttgatctgctatttctatatcttgtcaattgaggatcaaactgactggcacacccgcatctcatcaacctttggacctgcactggagctaagcggatctcctaggccagtgtgtgtttttcgcgtcaacacatctttggcacgcctggtgggacacgagttttgcacccaacatgtctaagaggaagtcaatgccaagaaggaacaatctcctaagtcgatggttgaaacatttcaagctacagtagatgaagcagttcatcgtgccttgttcgatcaatcagaagttttggcggatacattgtaaaatttgatcaaaaggacagttgatgagttaattatgtgtgtgtgtgtgggggggggggggggcgagcggtgaagtacgcacgtcgcggaggcaaagcagctcgcgcgccaccacagcccacgtaggttgtccccacacacttcgctagcaccatgtcctccctgagtgtcgttgaagatgggttgcgcccacatactccgccaacatagcgtccttcccggataaatgggtggagcactcctacgtgtgagatgagggtcgtgccgtcagacgaaggtcccatggatctacactgccaagaacgcttgtgcctccttggcgaagcgatggagttgtccggtcatgcggtcatggagaaaagacacgaccttgacgtcgggactccttgagtgtgacaaagagtccctagcagaggaggcaaatcggtcgtgccctagtcggtattgtgatttgggagaagattggaagacattggagctaggatgggagtcttggatacacaaacacgagttgggaagatgcaagataggtcttgcggtaggcaagagatgttttggctcctatcttaatcaggacggtagttttggaataaagatatcggacgtgatttaatcagaataggacaaaggaaaaaaaatcatgatgggacaaaatgccttataatctgtaatagagggaatactgttatattattattttattacatcatcatcaaccgattgtctttatatcattatttacatcaagtgtcatattctacattaaacatatagccgatagctcaaaatcctattgctatcggctggtatcggcatcggctggaattactccatcggcttatcagccgatcggctcattgatctgctatttgtatatcttgtcagttgcaggatcaaactggctagcacgctcgtatctcatgaacctttggacttgcactggagctaagcagatctctcaggccgttgtgttcgtcgacttagttcgcgccaatacagttctagcaccatcagccaagcgcggatttttcatcaacagtaagcacggggatccccaaaccctccccaacgacagttttatatcaggccttattttcacatagtgactatgttgaggatgaagctcatgttgttgtacatgataaaactagaaatgcctatttgataccgcaatttccttgtttacatgttgactccaccaataaacaacaactatttgtactttgtagtaaaattgattagttgcgcaataattatggcaataatccaaaatctgagaaaaggcatcacacctaaacatgtgtttgagctcccataaagaaagattatttcaaccactgtcaatgctgttgtaagtattgattgctgattcattgtatatgactttgacacccttctcaatgttagcggctggtcgaagaaagagacaagacggactatagcaatggaagaaaatatatagttcttttggccgcactctattattataaggaagaagcagattggctcgaacacttttgctaatttggtaattcggtgtcacactgctactagctaatatcacggcactttctatatgatgatgagaaaatgttgtgatattttatttatcttgatgatttattgaatgcattgaaccaaaatgataaattgatgtgcctcaatctagttcttaatgcaagtatgctattaaatatatcctaatgatcaggcaatatattcaaagccacaaactattttcctacaatcattcctggtgaacaatgcacaattggacaaatgagtgaaaactagacaagccatatgccatgactcatggctaatttccaatcactaattatagccagagatttataacacaacaaatatagtggcatatgacatatatttttatctcccacaaatcacatcattatat

SEQ ID NO: 8360 - DNA, 4103 bp, Oryza sativa
ggtgggaatggagaggtgcgccgaccttctccccaccgttccatggcgcgccatcgcctcacgggccgccgaaggcggaggagctcgggcgccgcccggtgacgctgcgtggggcggcggcggccgccgcgtccattggcgtcagcggcggaagggacgaggccctgccggctgcggcccgcgaggcgatggcgctgggcacgctcctccgcccgcgaggcgatgacctgaacgccgcggagggagggggccgtggcggtggcggtggcggtggccggaacagatcgacccgggcgataaaaggggatcggcgataacagggagtcgccgaggatgccgaggtcgacgtcgacgtcgtccgcggcggagggcggtcgccactccctctcccgctggccgccgtcagctgcgcacctctccctccgtccgtcgccatcaagtccccgcccatggctctcggccatcgccggcctccctgcgtcctccctccctgcccgcctcgccggtctttgcgcgttgctccctcctctcttgccgccggccgcgcgtcgccgcgcgccgttgtcttctgtggcgcctggagagagcagagatagggagatgaagagagggaggtggggagagaggaggaagaagagggggtgagttggactgacatgtgggacccacgtgggtcccactatttttttattattttctatgtgagactgacatgtgggtcccatgggtcgaattgctacgtaagcgccacgtcggacaaagaccgagtcaaattagccacgtaggcgccacgtcagccaaaaccgctctcaaaaccgccgagggacctaatctgcaccggttttaatagttgagggacccgttgtgtctggttttccgatcgagggacgaaaatcgaattcggtgtaaagttaagggacctcagattaacttattccacatgagcagagatatgggctgagtttctgcccttctctactcaattgcaggtgggcagtgtttgaattttttttatttataattttttttattaaaagttttacaaaaataattttccattttgaaaattaacggaaatagtcgcctaccgccctctgggagggcgatttttaaaaatcgccctcccagagggcggcgaaaatgacgtggcagacggccgttcgctctcgggcgacggccgtcaacgaaatttgcaggcggcccccttgccgccctccgcgagggcgattttctactgtgcggggggccgcctgcaaatgggcggcgagggggggcatggaattttgcaggcggcccccttgccgccctccgctagggcgattttgcactgtgcggggggccgcctgcaaatgggcggcgagggggcatggaattttgcaggcggcccccttgccgccctgggggagggcgattttgtactgtgctctatattttttttatataaatatcaatagttatcaaatctttttatattgaaaactatacaagattaaaatctccaagactggtaaaatacaattttattatttttagggcatatttggaatgttaccgtacaaatattttgttaatgccaaaatataagcaagttttggcactaccaaatatttggtaaggtaaaattgcatttgatcatatttggtttgctgccaaaatgtaaaattgtagtgaagaatgttgtacataatctcaattctagattacgtattaccaattaataggcttccattttcgtgtgtggtgtggtagtgggaaagaagatatgaagaggttgccttcagattgtcaattatatagcgtcgttttcactgcaatatatgtgaactcaatgagatacattattcattagatgtgacaagacgatcacgcgtgggcgtgattcactttatgtcaacaggcagcgccgaaagttgatagtgataactcgagctgccgcttttcatgtgtgctgttgtggactgtgcgcgctactggatatggcactaccgtgaagcgccgaaagtgtgttgttgtgagcataagttgttcaagcaccatacgaatgaaaagaactacgtagacgagacaaacacaagtagtactgcagtagtaatagcaaaagtagtactgctttacaagtttgtaagccaaaagaaacggtcacataaggactgaagaggtagaacactactgacgaggcctcttacccctgtccctcctaccctgcgccctaatgtgcccctgggagtacgtgagtcggtccgggggtacggcacggccaacccgtcctgcctgtacaggtgtgacctctggctgctcctgagtgtgcgcctctggagctcctccaagctgagaggagcctagtacgtcctggtggtctgcaccgtgcaagtcgtcgtcgtagaactggctagtaggaccagtcctaccggcgtgagacgaagaggccccagtaccgaagatcccggctgcaaatcctgctggacaaggaccatcagtttcgtacaggtatttaacagtattaataaaaagtaaagtaccgtgtgggcgagggatcgacgctccgtgagaggaagagctggcgaacgcgcccgaagaggtggcgaacgcccctgcggagctcgcggaagcgccggtcgtgcctgcgaacgcgctcgaaggcatacgaggtcctgcgatgaggaaacgtgcagttaaaacatggtgacacattcgtgcaaaagctgaaacaaaaatgaactaatatctgggctgaactgtaccgtgcgaaaccggtgctataggtcgcactgctccgaagctaggggcgctcgaagacaaacgaggtcctgctccgacggtaggaccgcgaggccgtgggtgtaccggaccagctggaggtacgacgtccacggcgctgcgacaggagaagacgcgcatgaccgcacgcatcttctcctgcatccggtcgaaggtcgacctctgctcaacgtcctccgcttgctcattatccgaatcttccctctccatttcatcaacaattataccgactctctccccctcatccgccatgcccatggcctgctcctcccttggttgattttcctcattttgcatcgatggtccaacaacatcccctgcattgctaggaccctccacatcttcggtttgcattgaaacatttgtatctttctcttgtaccgacacaaatataacgaggggccatgaccgttcaaaagccatttccacataccgtctccaagcagcagtgctgtccatcggcattagttcccaaaaataaccttctattgcacgactcactacaacagatactgacattgtgtagacttcttggtctattctaaatcctctcaacaaccaactataaattgactcaaatgttctctccgcaggcctatcgatgcccttagatgtcattacaaaatctgacagatcaacaccatctggaccaaatctaatatttccttcaccgtgaactatctgaaatgtgaccttacttgacattgtgcctgatgaaaacaataactgcgttaacctcgcactacgccctaagttacattctctacaatattgttctctaaatttctaaaagtaggttacattctccagatcaaactaaactacatcttacaattaacactactgtctatgtctcaattcatactattatattctatgctctggatctacacatatgtgctgtgtgctacagatctgctaaaatatatggaactaaaactaaaacgcaacatatgtactcaaacgtaatatattagtacaaatgcaaaagatgtatgggagcatacctgtgatgaagtgagcgaaccagcagggcttcgccgctccccttctgctgccctcccctctctctctctttcgtttttttggatttttagtgaatataatgaaatttcacaggggaggggctgggctttataggggggaggcaaaaatcgccctcccccagggcggcaagggggccgcctgcaaaattccatgccccctcgccgcccatttgcaggcggccccccgcacagtgcaaaatcgccctagcggagggcggcaagggggccgcctgcaaaattccatgccccccctcgccgcccatttgcaggcggcccccc

SEQ ID NO: 8361 - DNA, 27739 bp, Oryza sativa
ggccttgcgcttgctggtgtagcgcggggagcagaagaagtaccagacgctgccgctcccatgggttcccggcgccggtctgtgctcgccgacgagctccgtcggatcgtcggagtagacgtcggcgtggttgatgaggcggtgctcgaaggggatcttggcgatcttggggcggaggaagagggtgatgaggccgtcgtcggaagggcgaaaagcgtagcctggctccagagcgatctcgtcgtcgtccatggcgatcgatgagatgaactggatgaggaggtgaatcgatctggggaaggagagctgaggatgaggattgaggagtagggatcgatggaaccccttttatcgtcggcgcaacgcgcgatcgaatcgtagtcggaatccgatcgggacaagaagaactttcgcgcgcaaattaaataaccgttttttggcgggaatcaaacgagcggtcgagatggggcgtcagattgcaagatcaacgaacgacgagcgagcaaatgcgtcagacacagtacacagtacagcgaatgctctagcttcaggtgttgaaacttgtagacgcacgagtctccttgtggacacgctcacagctgcatttgtatgcaactctgacccatgtgttcatagttagctcgatcgatccgtctggaggacccattcgagggaggtcggggcatggtttagcgtatcgtttggaccggggttatcgtcaccccgcggtagcatgataaccacgataatcatctaaaatcgcacaaaaatcacatccaaaaattcgaattcaaaactcggcggttttgcagtttcaccgtgataatcgcacggtttatcgcaataaccacgatattcgcacggatatcgtgggttgtgtagctgaaatcatataaatgaaaaataaatagggaaaaaatacggttgaatatgtgtagaaaactagaaattgagaataattggaagaatatgtaggatacttaaggcccaatattgtcttcctttttccaatttgtaaaccttttcagttttgccttgaatttagcttactctattttaaaaaatttcttcaccattggcaattacaaatcaagaactatatccatgattttttttccggaatcttaaatttggtcaaaattcatccaaaccatattgccggtttctcttaccgtacccccgcggtaagcgcgataaccgcgataatcacgcgattatcgcgcgataagtgaaaccctgggtcggggattaaaaatccgactccctttcacctcttctctaatcacgctatgtattttgttgtcggcccattgagccaggtcgcgtggcggtgactaaatggaccgaatcagaggtctagccatgcagcatcgcacattcacatgatgtgcgatgctgcttggatatgcctataattcggcctcaagtctatctatgaataggttcactttaggttccttgtcttagttcgatattcgtcctcaaatcgtagaacaagatacaacacatatctcaactcataaaaccggtgtatgatatataggtcccatgattatatagcaactggtttcatcggacgtgacaattgattagagctatatatgacaatgaccatcccaccacaatattttttctcattccgagaagtgactattacccattgaaatggaacctaaccacaagagtgtccaacatatccataaccgaatacatcacctagcctgcatgcactacagaacaaagaatcaattatctccattttaaactccctaaattcagatcccaaccacgatcctcccacccactatccaatataatagctcccaaattgagcagatccaacaatgttctaactaaaaaagtactcctatgtactaaacaacaccaaaattgagagaatcatcgcatcgcataatacaaaaaagagaatagtaatggcatttctaaaccataaaatttataatggcatagatccaattaaacctaaaaaagaacaccatataccacgactacatttttttaacgactcgcataagacagtacggagtttatattgatagcagaaaaaaaaaacaatatcacaaccctggaaagattgtaactaggagaaacaaaaacaaacataccgacaccacgagttggcaactcctcacacaataccctggagaagacactattaccaagccgaccaccgctaagcgtgaccaattgccactaggccaacaaggggtttacaaacgcctcgccaaaacacctgcttaactccgaaagacaactgcttttactgtaaaagaacaccatgccacaactgtttttaatggatcaatattttctatgatcaataatagttctcgtgtcatggtgaaatcctgcttgatcagcagctgcgtcctcctccgttctccaagctgttcatcttctccaaatctctcatgaactcatcaaatgcaatctcagaagacccacctccgttgatggcatccagcgccatgtctctcgtctccaccaccctctccctgagcttcctcccttcctcggtctccatcaccagcctcaccttcgcctccacctcctccgccgccaccgccaccaacgcgccacccacctcgccgccgtcgagcgccacggcgaccttcatctcctccaccatgagcaccctgttcatcgcctgctccgcgtaaagcggccagcaaatcatcggcagcgccgacatgatcgcctccagcgtcgagttccacccgcagtgcgtcacgaacgcgccggccgcctcgtgccgcaccacctccgcctgtggcgcccagttcttgaccaccatgccgcgatgcttcgtcctctccaagaaccccgccggcagcagccgctccaggtcaggctccggcgatgtgctctgctcctccggcgggctcctcactgcccacaggaaacggtggccggagttctccagcccacgagctatgtccttcagctgcgccgccgggaacgcgcccttgctgccgaagcagaggaacacgacactctggcgcggctgcgcgtccagccacgcgaggcacgggtgtctctcgccgttcttgccggcggcggcgtcgaccagtggcccgatgcagtagaccctcggcgtgggcttgtcgggaacgcagacgccggcggcgagcgcgttcagggccttgggctccagccgatcgaagctgttcacgagcacgcccttcgcctccgccatccgcttgaactggtacagccggaccttggtcgcgtcgctctccttgtcctgcaccgtcgccaccatgtcgacggcgcggagcggcggcatgccggggaggcggacgagcgccatgcccatctccctgaacgacggcacgtcggggtagtaatacgggaggtggagcaaggcggcgagggcgctggcaccggaggggaagaagaagtaggcggggatggcgagctcggccgcgacgtcgagcgcgtcgacgcagaacgcgtcgagcaggagggcgtcggcggcgtcgggcagcgagcggaggaactcccggagcacggggttggccaggcggagcgcgtcgagggcgcgcctggccgggtgcgcggcggcgtccgggctgggcggcgccggcaggaggcggaacgtgatggacgggttggccgcggcgaggcgcgccgtcgcgtcggccgaggtggcgtcgttgtcgggcgggtcgatcaccgcgacgacgacggcgaggccgcggcggcgcaggtgcttggccatctccaccatggggttgaggtggccgacgccaagagacgggaacaacacaaacgtctttgtcctcatggctccgatcgatcaaaagggatgcgaaaatacgggaacaaatgctcataaatatagtgagagtgagagcggcgttgaatggtaagtaaccccatttcttggcaaaaaagccatgggaagaaagtttgacacgccataaggttatataaatattgctgtaccagaaaatttttccacatgagcttttatttaagttttggaggaattaattcaaaggatttttttctcagaagtctaatctaccatcacttgagtgagtcagcagttgagtgggctggtagacgaggaaggaaggtatatcaggtagtatcaggtagctcgcgtgtcacgttacggccgttctcgtcagcaatgactagaacactttgcgagtttttatttttttttaaaaaaaaggacgcgaatagtcgggcttttttttttaaaacattgtccgagcatatacagatcgcacgcaggatgccgaatagtcggtctttttttaatggcttctactgtatccgtcctataaggctataagtgaacttttaacctctaaagttctccacggagattaaggagagagcccattttctagtagtaacatttcaatcttaagagacatcaccattcaccaatgctgcagctgaacaagcacctgtaactgtaaggcagcctgcctgtgccttcatcggttcatcacttcatctccttgcagccctctatcaacacatttagatttcacccatttttattcagaacttacaacatccccgatcgattttcaaaaatggcagtcaagttctagccattcgatgctcactgctgcctagttagcacaggaatcaggaaacatgtgcagcaatccagctgttagaggcacagcctgcgttacagcgaccgaactcaaaataacaaagacgaactggcaaagtggccatggcaactaagatatcgaagagagtattcaagttatatttttttacagcagcaaaaatgataacctccacttcacttgcgagtactccttcaaatgcaatgatgaaaaaggatgccacctgttgatctcacttcctaaaccagaaccttttctgacataagctaaagactatgcgattttcttagaagtactctcccatggagaaaccaacaatgatcaactgatgatcagaaactgtaatgatcatctgatgacaagaaactgtttcacttcttgtttttgttgtccacattcagctgctggagcccaagcaagaggtccttggaatccaggtacaccttgttgtttgagcttgccatggtgtgagagatctccctggcagcttcaatctgtcggagagcgaggaaggcagggttgttgttaatcgcctcaccaatcagctgtgcactcttagcctcaccctgttcaagcaggcctcacagtcagactcaacccacaccaacaaaaatgaaatatatgaaacaatgaagaaataaacagtgccattgatatgtcttaacaattgtcactaaaactacaggtagtaaacttatcaaggaatatggtgaaagccatctaaaccagaaataatccattgcatctttgcttacctgtgctctgatgatcgcactcctcttgtcttgttcagccttctcaacaatgaactttgcacgctcagcttcttgtgcagcaacctgcttggcttcaattgcatgagtgaactcttttccaaagctgagacttgtgatggacacatcatccagagcaatgttgaagttgctagccctctctgtcaggatcttcctaatctccctgctcacagcctgtgttggataaaggaataattattaccatatatcctactatattagctcttaaactaaatatcatactactatattagctcttaaactagcatagcataccatggaaacatattagatatttaaacacagatagatatgataagacagtacctctctctgtgtgattagttgactggcattgtactgtgcaaccaccgctttgagtgtttcatgaatgattgaaggcaaaactctctcattgaaattctcccccagggacctgtagatggttggtagcttctctggtaacggtcttgtaaggacacgaagaccaattctcacctgtccaagttatcaaattgtatcaaactaaaaatgtgttggtactgacctctaccaatgttactttgaagcaaaggtctaaaacaagaaatttgcacacaggtaccgatgagcaaaccaatttgtatggtcaataagagttctaagttgtgaagaatcggaatttaaatgcatgtcaacaaaaaaaaaagtgtactgcctccattgcaggcaaagcataacacgcattgcaatgctagtcacacacgtaaatgttggttctaaaccaatgtaccaaaccactcacattctcaaaatgctaagcacatgatgaaaatgctaagcagttcagatatacccaacaaagaagcatctcacatacaagagtcacttagcgacaagtcctagtatagggacccaaattaagtgattaagcaagcacagcaagaacattccacacaactttgctaacattcgcaaatcacaaccaacaaatcaccttctacatgctacaaatcatcatctcaacgacatgacctagtcagaaaccccaagtgcaaggacagaattttaccatctggagatcacggcttccagaagtgctctcgacgaggttggggcgggctcggacatcgtagatgatcggcctctcgaaccacgggatcatgaagtgagtcccctcagggtacacctgcaccgagcacacaaccaaccacaacaattcattcaaacgcaacccaccaaatcacaagcacacgcatagcttctctgaaacccatcggcatcacatcacaagttcactagtaggcttcgatcgatgggttaccttgtccttgatgccctcgaggcggttgaagacgatggcgcggtggcctccctcgacgttgtagaggctgttgaaggcggcgtagatggcggcgccgcccagcagccccaccttcaccagccgccccgcggcagccgccggcggcgggctcggcatcttcgcgcccttgaagttcatctcgccggaggggggacgcgctcgcggcggcggaagcgtagggttttagctagggttttgcgtgatccggcgaggaggcggcggcggcggcggcgaggagaagaggtggcggaggagaggaaatgagaaaggagaaggggtgggggtgttaaagaggacgaacaggaggaatcacagccgttggatcttgatccgacggcgaggagggggcgacggggttgggtttctttcctccactgcaagaaaggagacggtgtgctttacttcctctgcaagatgaggcgcactcccgaaatcggacggtcgtgatcgtcttttcttgcgtatgtacgaagttggtggttatttccgctggagattttgaattttatttttcaatttctttccttcttttttcttcagggagatggaaagactctgatttcatatgatttcatgtagtcacagccagtttaaaagcggattaaaagctcccttcaatcttctgaagataagattaaaagtggacatgcaaaacaagaaaaccattaatatgtgattaattgagttttaattactataaacttgaaaaatagatatatttaatattttaaaacaactttcatataaaattttttcgcaaaaaacatgtcaatttatagtttgaaaagcgtgctaacggaaactgaggtaaaatcattatctttatgagaaaagaacggggcacactttattgagagatcattctattgagaatcttctgaagatttataagaaaactgagatcctttgtgcacactttctgaatggtgaagcatgtaacataaacaaaactctgaagttgaacatatctgcacctgcatcgacagtattgaatggtgaagcactgaacataaacaaaactttctgaatgattttctttatcatcaccagaccactctgaactgaagttgaaccaagcactgttactgcacacaatcttcaaaccaaagtccaaagagaactggaggagttacacagcctggaaccctgaagcatagattccaacctcaaaccaactgcacaagcacaccaaagcacaagcctcttcttctccaacctcactcacatcacatcctgccatgaacaacaacaacaacaactctagccaaagaccttatccacactgagatgggcacatagaagccactacacctttacagagcttccctcaggaagaaaaactgcgaaaaaagaagagctagagaactaggtgcgcagcgccatgaacaaactctgccttctcgcatgctcgggaaccagacgttcgatggcttctggagggatgccatttagctctgccaatgttgcaaatgttgtatcagtttagctgaggataaattcaaagcagcaggattcattttgacattgaggcgaacaaacaattaacggaacaattctgccatttcgggaagtggaagatcgagcattggcttcagtttgttcacctaaatgctaggtaccattttgaacataattcatgaaataattctctcagctcacataaatactgtctacatgaggtgttagacgaggcagagagatttaggaatgtttaggttgatgagaatcaaatcagcaaatgctaaggttcatatgctgttatcgctgtttcattcagctatgataccttgtgttctgaagttgaagagaggaggaagaggacgcccattaggtagacgagtgtttggatctctcaactcatcaaagaaagggtgcatgcaggcttccatctggagaataattaaataggttagatgagagagaaatctaacagtataccacatcaggctgctcaggccatcataacaaccaaaatctcatgtggccttacagcggtgcaccgaagatttggtgagtattgcagaaacctgcttacaaggtccactgcttcaggtggaagccttttttggaaaacctgggtaaaaaacaaaacttttgagttacaaaaagaacagtgagaaagtattgtttaattttccaattgaacacacacataatatggacattgctcacacacgcaggacccaactaataggaatgtcgaagcgcaaatggtaacacagaaattggatttcttttccatttggtttttaatcctttttgtcttcaacaaatatttcaaaatttaacagcatagtaatttgcgttaaaagatctccctgtcccaaaagtatgtaccaaatcggacatcgatattgcattagttttgtcaaggatgggcagaataccttgtgccatggatgagccttaatttgagggaatttgaactccgtgtagttcggattcatgcacttgatctcttcccttgttggagtacccaaaacctgcaaggcgctatgactaaacatgttattgtcaagatcaatggtcacaggagagaacagtttaggacatcatagaaaaatgttaccttgataatctcgaccagctgatcaactccactttccccagggaacagaggctgcatggatgaatgttattagaataagaaattgaacaaaagcaaaatattgtatgcatgaatgaaacctgtccaagcagaagctctgccatgacacagcctgtagaccacaaatcaatggcagtagtatattcagttgcaccaaatatgagctctggtgccctgtaatatcttgagcatatgtaggagatatttggctctcctttgacctgcacattcggcggggaaaaagctgcaatttaagactatcatgtgtaggctacctgcctaagttcacatttccttgcaagaaaacccagtgtgtccattcagaaaacagaaatgcttgtgaatttaaatttctgccaaattcagaacttaccaaaacttttgcactgccaaaatcacatattttgagctggtgtgtatgtgggttaacctacagtgcgaaggaagaccttattagtaccatcaaaacttagtgaatttcagtctgtaagtacatgcatgatcacggttttaaaataaataattgaagtactaacagtttgtctgcataaatgttcctttatatgtgcagtttataccgttttaataatcttatatatgagacttaatcttaaatcctgctgttctatatgtcaaataatttggcatcatagtcctagtagtggacctagtggtagttgatgcaatccaaatatgtggagccatggatattttctctttcaataaagaacaaaaatgactatgtataaccaaagtgctcttccatcagccaatatcatcaacaagcaaaacaatataaacagtaacatacagtttgataatatgataagttgataacatgtagcattggcaccaaacaatgcacatgggatggctcagctataggaaactaaataatgcacatgtggattgcttttttcagtttcagaatgttatatcatgtatgtggaaccaaccaataattaagatatttggatacatatgaaccagaatctcagtcccaatgagcaatatactttatgctcttcagaaatatgcaacagtaaacatatgaaagctcaatggaacaaaaggagaaaataagattgcccaagttcatttatgaattatgactaatattttcagggaaatgcagatacataaaaatgcaaagctttattaccaacattatgcaccttctctacaggatatagagtttgctgtgaatatttcatatagttaaaagtagacaatgttacatatatgcaactccttcatgtaccaattagttatgttttattttccatgatccccattaatttatatttgaggatctgtacagcaaaacatattaagcatagaaaataaaggggttaaaatctcacaagaacattctgtggttttatatcacggtggcagatgccaacacagttatgtatgtaagcaagtgctcggcatatctgcaaagacaacaggaacaacgatttagatgacttagtagttaataaataatcaaattttgtcttaagatatgatatcataaagaaaaatacaactggaagcacggtttagtgcatgttgggagaatttatttcaacagctacagagagcaaacaggtgtatagaacaactcattagctagaattctaactggagtaaatagataaatctaaccattagttaagagtatataaacaattacatgcactaatgtgaaaattttcagttaaacagtaaatgatctctgctggttcctagagagtagattgaagtcacgcaatcaaatctcagaatttttttaccggccaaaatgatgtgctacttatctcatgaaaaatgttatatttcactatcatctcaaatcatatgacagaaaaattattagataagtagatagcgcttgatgtttagctagacaaacaagaagcaagctgttgaacatacatatgaagtcaggaaaattgacaagctggcttgagtagatgtttaaatgccgattctccatggaagaaatcaatctgaatcattaatccaaaacttctaaacgttccagtgcagtcctgggctacttgaagataatactcgagtggacacaaggacaacacatgactgccaccaagtttgaaccatgcttcacatgacaggttttagaacatgcaaacaaattgggagagcatgaatgcctacattacataaaaattatggcactcagtgctcccttgcagatggttgaacatggtccattgatattttacaggaaaaaaatatgcatcaactattgataagctctagtgtggcatgcatgcccgaaggcactggataacccagctgaaaaattaagaactttgcaaatgtgcccccttgttcctcgaaaataagataaccaaaaatagattatgaccggacatccaaagagtttattctcttgaatctatagaagcaatcggtttggaatggggcatgagatggaaaattatattatttcctaaaggttactggtccaatgcaaaggcgagtcactcagaaaaatagacaacaaatcagggctgacctgataagtgtataatttgacataaatgaggggcacccgttgattcattctgctgtactgtctcgcaattcggtttactgtctctggaacatactcaaggacaagattgaggtaaagttcatccctttcagtggttgagaagaagtaatgcttaagaccaacaatattaggatgatccagcatatgcataatttgcaattccctgttcttgtaacgtttatcttgaagaacctttttaatggcaacaatttctcctgtttctcgacatttggcctaagagttgacacgaacaggttatttgcctttcacagtcacatagagaaatttttacaatgaaaaagccacaggcttacctgatatacaaccccaaaagaaccagttccgaccacatgctcagcaatataagtgacagactgttccattaccataaccactttatcagcattgtttcatggccaaacatcacaaattgcaaggatgaaagcgaaactatttttacctgtttaggtagaccatttcggccacggatcgtagtagctattatgtgaccagcttcagcgctagagccgtcgactacatctcgttcagtgttctgcaaatgaattgttggtaaaccaaagtgcagtcttggttcatatttccgtaggctttctgtgaatattcatgagccgtagaagtatgaagcagtgtcataaaaccatgcttttctagggtggacaacatgtcaaatttgcagagtagcaaattacagacaaattttttgaagttatgcagtgattatttactactttctcagaaaggcacagtggctcattgctacaggaggtgaacaaaataacaggaaccacagaaacaagagtttgattctggtgacaggtgactcttcatcctacatcaacactagttcactcagtgacaaacaaacacgaacagaaacctaccttttcatcaccaacatctggtttggaatccctcaattgcatttccagcatctcccttcctagacattcaaccgaactagccgggcccttgaatccatgtcccggccgagaggagctcccaacgccgccatgccttagtccagaataggccatcccccactacccgagattccccaggtcaggacaagaaaaacagaccagtattcactccattgcttgcagaagatcagcccgccattgcaatgccgtttcctccagcatcacttcagcaacagctgcatacacattccataaaaatgtgtcaagatcgagatgaaccttctatggcatagtaggaaatttttcttgtaaaagttgcttcatcaatttataactgatgaagaacatccaaaaaatcttcaggaagtaagtacactgcactcaagtacgaaacacataattcgtctgttagtacactactccaaaaggcatccggatttccagccacacagcgatcaagaagggccactaaataatcatcaagaaaaaccgcaaaacttgcactaaatcccgaacagatcaatctcaaaaatggcccaaagatcctccgaaaataaaccgtgcgatccatcccaaatcctataactcgataattgggtccaaaccgccgcaaaccgggtccgaaggagcattaaaaaacgacccttttttttctctctggtgggatcaaagaatctggagccacagtacctggagccaaaatcccacagagatgaaagaaaaattcttggagcaagcagatcaacaggctccagtgctcttggaataattatgggcgagcagggaatcggaagaggatgagatgagatggtttggggctctctctggtgtggagcaagtaggttaggtagggggggagagtggagtgaggtagtggagggcagctgctcttctccttccaaacttttccttttctggtaaaaaagaataggcaagggcatggaggagcagagagaaatttatggaggtgatgccatggatggaatggaaggatgggggagatgaggggggagaagcaaacaaaaaattgggttgtgagctgtggatgtgaagtgacatttgatttgaggggtttttggtgtttggctgcagtcaatttggcagtgaacatacttggattgattgacaggagtgttgacttgggagtgaactttttctgaattgtgattttgcaaggattttcattcttggggtagtgcaatttgtaattgtttaaacagatggaatcatgccaaattgccaatgttgcaattacaacaggcatcgacttttaggtgaaaataaaacattagagttaagctctgcttttaatattatggatttccgttgcttttcaaacttatataaacagtgtgtttagtaccaaaaaacctatggaggacttttctaaagtagcatttcaacttcatggcagtagtttattcattcgtaaaggctataaaaaattagataaactaccaattgatgagctatgataaaaattaaattaatatatcaatccatcattttcagctatcccagattgggcaatgttgctaaagttcagattttgccgaacaagattcagctcccttgtggttaagtgcggcttccgtcgtagcaaggcatccattcttctcttccaagcccttcctaactttttcttcgaactttcatcttttccatcacatcaaaactttcctatacacataaactttcaattttttttctttaaactttcaattttagtcaaacttttaattttagcgtagaactaaacacaccctaaccgcaaatccaactcatggagtcatgttcatctccccataccagaaaagaaatcgacaaaagcctgcatgtgccacagaactttcggtagaacgatacaacatgcatggttcgcctcaggagaccaacttgtcagcagctgcattaacaatgcgggaaaaaacaaacttcatgtagccctgcgtgtgttatcaagttcatcgttcatcagaactatggagtgtacaggatcatgcaggttttttctttaagaaaaacttctgtacataaccgtggttctcatgtactagttgtaaacgacaatcgggtcacagaaaataactcaaaattatccaatgtaaaattcctgcttatccatatgtttcttgtagtatctactgtatgttgtaatgtagtcatatactgttatccacagatctgcctgcctacctgcaaccagagagacttgatgtaatacaggaaaacaagagaaacatataacagaggcagtcacatggctatgcccgaatgaatagaaacaagaaacaagtggtagtaacaaacaggagaacccgaaaggtccaccgagatagctgttctgttcatgctcatcatgctaagagaccagggtcccgtcattcgttgaccaggtcatgggcctcacaggcggctatcacttcagtttgcatatgctactgtaaagtgctcatgtgtgctgtgagatgtggctacatcactattcaaagggggtcatctgttagctgtacctctgcatgtggggaggatgaacttagcttttaatcttcatagattaatattgatctctgtcaaaagctccacacagtagtattcttgcaaaacaaagtcatttgttccagtttcagtagccaaaatttgttccagtttccagattcttcagaatgaaacggttatgtgaaaggaagtagatactgacctgcacgtctgcatgtcaaattccaacagcatcaagaagctctgaatgttgtgacacggagactagcgtgtttgcgacaattgcaccacttgcagcgacggccggtacaccgatgcctggaaaagtcgagtcaccacagcagaatagctggggtataggtgttgcctgcccagggaaagtggcctccccagcttttatggctggaccataggttcctctatttcttcggaggaacctcttgtgtgttaatggtgatccaaccagcttcacatcgcatttttctctgctaaatcttggaccaagggcaagctccacggctttccacatcacctgagaggtttaaattaacttatcatagaatacagcaagtttctatttacaatcagtgaataaaagagtactttataaaaagtgtgtctagcttcgataactttttacttaacttttgatcatatttgcttcctatgagtcaagaaaattgcttccttaaaattctaacatgtagtagattattgttctagcctctggagtctagacggctacacaagccacccatgtttgcacgtgtggaaaagaagggtaaagagatgaaatttctaggaaatatctgaactgataaaacggtgttaaagcgcatggatttctagggactaattcccagttatcaggggagtaacgctagaagaacaagagcacagcatttgttctatgttgtacctcagagcgttcttctttcagccttcgatactcggcgcttttcctatctagtccttcccacaaactgaaaggttctgttcctggtgtataagcatgtaggacgtgctttccaggcggtgctaagccatttccaagaacagtaggaactgatatcaatacaacgttctggtcagcatcaactcctttgttccaatcattaaccacaatatgatggattccaaggtcctctctggcattctgttccagttacgtaagtagttaccgtgagagattgcctgagttaatgtaaaaacacacatcttaatgaatatgagtgtatgacaaccaacctcgacatcaaaacccaagtggagatgcataaatgattcacattgtggagttgctttcactttgtcttgatatgatcttgggacagcatctggtggcagcaaatccaaagtatcccacatagatgcattgctaacaactgctttccttgcgcgcacaatctgcatgagaagcaaattcccgacaagatttcaacagctgctgaatcttcaaaacataggttgcatgatggaagtcaatacaagggaataggttactatctagtgacctagaataacatgtggcacaatcatgcctctcaaaaatagattgcataagacaacagggcgagaaaagatatgccatcttggcctacatgatttctatggtctgccactactgcaaatgggtggaccaaggcctaaagcccctaaactaaatgtgatatgcagtactgaagatggtactttttggagggagggagggaaaatatatagtgattatcgtggattgtacactaaagactttgatgcatccatgaggctcaaggtaatgtaagtatcatatttgatgaaatcattaccaatagtaataatatggatctgcattgctatcattggttttgtgttcataacttgtatcacacaaatcctttcctactaggtaacagtttgttttttgtttggtaataacatatccttagaagatgcttacttgtccactttgtagcttgacaccaactgctcgaccattctcaattaaaatcttttcaacatgcgaacgaagagcaagcctgccaccaaatttttttattcctcgcacaagagcatctattattgctccgcttccctcaagaggatactcaagcgagcatcctggtttataccattctgcaaacatataaacctgtggttgtagttagaccaaatgatgaaacagaaaacatcataatcatcacttttaaagtatttgtgtgaatttgaatagacacaacagatgggagctaagtatcatagaggtaaatatatggaaaactctgcactgtaacttattcagaatcgcattgttttttgatgcaatgaatcgcattgctcagtgccaaatatttcgacatccagttgctgtggagcactccaacaagataaaagtgctaagattcaggtataagtcactgccatccaccaatgggaatgcatgccatcaacctatacaatttagatccactataaatacaatcactaccatgtagactgcattgactggtttagggtcacatgagagtgactacggaatagtatagattctgaaatagtatctgctaaataaactagatgtagaatatgctacattgaggttgttccaagttcagatgacatgagaacgtgtaacaccagcacagctattttatggaaagaagaggaacattgcaccgatgtaatactaatcccatgatgtcctcaccattagggtcaatgcacccacaaatatattgatagaagttgtgcaacaaaattattctcttattcatctatatattgccataatggtattggtcggtttcaacagtgaactaaatgttgtttctggaaaccagttggaaatggtaattcactaaattatggcaaagcaaaaggtactgaaattaaaggaaaacacaaatggaaggataatgaattcaatgttaggcaaagcaacagctactgcaaatggaagtaaacctgatggaaattagtttaccatttctgcagaaagagcaccatcagatttgactccagcaagtagaaaacacaagagatcgatccaattacgaacaaaggggtttttcaggcccaatgaatcaacgatctctgagaaaggtcttagaagttttgtagcaccaagagccccttgaggtcccatttgcaggattgatttcaacagagaaggagcatatctaccagcagatgtggagagaacacctaaatcacctcgaatggaaagtggaggcaaagccattgcagctgcagagataggaataactgcatcctgagattgttttagtatggtattagctcatgctctagtggaacataaaatgtcccaaagataaaaaaaataagaaatgatcctggaaaagaaactagtatcatatcatattcaagtacggtgcttttacattttttacaaaatatgcctataaaaggatagcacaggaaaggaaagcattaataatttatggattgctcatgtgttgcttagtactccagttcagtgagtagtgagttcatctacacgactatggctgcaaaagtattttccaaagagtcacaatgcagacaaaagaaactcacaagaagctttttccactcctggactgcatcagcaccaacaaattcatcaaggtcctgaaagaattgcgagtcagaatcgtgttcagagcatccaacataaataaattgttagcatcaaaactgcataaatgggagagaacatctctaagttcaataaccagccataccatttgagaagaaataacatatctgagtgagaactgataatgtcacaggtaaagttaagtgaatggttccaacgattacatatctaatggcaaaagactgctcaccttgaggaaatcagttggacctatccgcgaaaggaactggccttcaggtacataaaccatccaggaatcatatgaggcacatggaactgattcgcctagcgcatcaaggacctgaccaattgaatgaccacatcagcttccaagctctcaccacaattaacttgctctaaacccacaatgccataatgggaagaacaatttgctgcaatcaagtatcacctgggcgaggggattggcctgggggcctctggactggaagccggagaacagggaagggcccgagtcgaagttgaagcccttgatgtcaaacgagtgcgcggcgcctccggggcggtcatggctctcgagcacgagcacgtcctggttatacctcgccaggagccccgcgcagcacagcccgccgatcccgctcccgatgacgacgacgtccgcctccggcctctccgcctccctgaccccgattcagaacgcaaaaccggctatgcctatgagcatcgatcaatcgccggagagtagtggtgcggtgcgaaacgtacccggagagcgcgccgtcctcgccctcggggatggaggggtccgcggggcgctcgtcggcggccaccgccctgcagcgcgcgggacgagcggcggccgcgcatccgcgtcgtggccgtggggcggtggtcggtggagcgcgcgggcggcgagcgcagtggcggggcggaggcggcagcgcgcgggaggccaaggcggcggaagccatgtcggaggcggagaatagcgcgcgtctcgccggctacgccacatagcttcgggatcaggccgcggttggagtgaggcggccgtcgtggacacgtggcacttcgccggcctttctccttccgcggcagccgacccgatctctcccgtgagacatggagaagatgggaagcgaggcccatacggcccaacccaatggcccattatgggcttactgggaagcccattttaaagcgttcttcttcctctcctcggcccgcgcgcgcttctcttcctctctgctacctcttccggccgaaagctaagaaaccaaaaacgtacgcggcgagcttccaagaaaggcaagaacacaagaatctgcgaaatatatggatcaattaagtgaaaagaaggtgcctgaaaatctccaaacttaatttcgatcgattttcatggccattaggaaagtgaggaaaaaaaaacacggcctaataggtacggtactcagtcggtttcagaataagtaaacattatttttggaacctttttttttttgcggggaagagctgggaattactattgctcaaccgacaagtccttacaaactagctgagaaataagattacatgtgtcgcctacccaaaggaaagaaagcctatcagtgcgagctatgtctgctaaagcatggctaatctggttttgagatctgtggaccttcctgatgatgaaatccctctctccatcaatcaacactttaatatgtctaacaatgaaagcaagggaagagcggtccggttccttggtctgcatcaactgggccgccgtcaaacaatccgtctccacttcaataggaagctcatcgtccattgcatcgccaggctgattccttccacacatgctagaagctccgattctaacgcatcggagcacccttatttatatgtctctcgcctctcccttgacttgaggcggaggatcgaggattactggcatcgtcgtcttccttcgttccctccacacaagagaagaccaggcaagtcctcttaatttaccttcttcataccctaacatacatatctcagtttcttctaccggctctcggtgacctcctttggtctgtgtcctccctcctgttcgttcggctgccaatccacatggattaagttagtctgaataagctcgtttcttagctcaactatgcatggactgctaccctcaaactgtttcaccctcacctatccaagtttattttgtagtacacagctagcctgtttattacttatgttttctccaaccgtatgtacgtatgtacgttagggtcaagcaagcaccatcaaccttgacataaagccactaacgtctcttctgtagtactccctatgcattttattttaatgtatgacgtcgttgatttttcaaccaacgcttgaccattcattttattcaaattttttgtgcaaatatgaaaatatttatgtcatgcttaaagaatatttgatgacaaatcaagtcacaataaaatcaatgataattacataatttttttgaatgagacgaataatcaaatgttagacaaaaagtcaacgacgtcatacattaaaatattaaaatatagaggtagtagtaatatataacctcttatgaattggatttacaatgttacttttgattctgcttcagttaacgaaaagacgcggaaaattaagaggacgtctgctacgtactcatctcacaagaagctacaatactaaatattttgcttcagtcatggaatacagcaacatagctaagaagagggagggtgttattgttaagatcgtgacatgatacaaagccccaggagtagagacaagtaataagtcattgacctcaacttcatttgttatcctcttttctgccatatcttcttgtacatgctactatatttgatgactaacacccgtgttctatggcgttttaacttatgtctgggctctaatcaagataatctcaaccaaccacgaaatttgtctaagagcgttgtctcacttgctttgtatgatggtgagtatgctgctatagttacccaatttataatttaacaacaattaatatattacccccagttataaattaatgctttaacttgctgtcttgtgtaacaattaatatatgctttgtaatggaatctgtttttaaggttcttactggtggtgtgagagattagctttttatatttgaacattctagttttgagttaacttatcatatttagtattaattgtatttcattgccgaccactccttgtgcagcaccaggacaaaggtgtgggaatgactatctaaccgaaaagaattatcccaagccaccactaaacatattatatggtgagttatttgatgatattctaccagtaaacacctttttacagttctgttttatcactaactattctaccatgcaccttctaccagatggcatgattttggctaattcttttgaagagacttttggccatctatatggtcaaggttcctggtgtgaattcacatcagaaagctttcctaacaacattcgtcgtagtgttgttgcacttacttcatggagtggtgattttacactaattaatgttttattgattgtactatttcatttttgtatattttgcaatcactaataagatataataatcaacagtatgcatggtatgcaggagggaggaggcattttgcctgcacgggtttttttattgaatggacgaacggatacagaattattctcacatcagcgagcttggttagagagtctgatgatggatggtagattgctaaaaacttggctgtaggtgctagagctcatcataatttttattctcctatacttcctccgtcccataatataaaggattttgactttttacttgcactgtttgatcactcgtcttattcataaaaaaaatgtgcaaatataaaaaacgaaaagttgtgcttaaaatactttagataataaagtaagtcacaaataaaataaataataattctaatttttttaataagacgaatggtaaataaaacaaataaaaagttaaaatcttatattatagaacggatggagtatatcgctagcttctctttcaattctcacacactttatcattactttgcagatacaggtgttgcttccaaacagtacatgcgatgtagggtatttacaacattatagcttacactacaatgttgctctagtcagtacccatcacagttggaatgctcctccagtatgtactcggcttgaccagcacaattgtactccctccgtctcaaaaaaagtcaaaccttgggtttccgtgtccaactttaactatccgtcttatatgaaattttttttataattcgtatttttattattgttagatgataaaacatgattaatattttatacatgacttgtctttttaatttttttcgtaattttttcaaataagatgaatggtcaaatattggacacgaaaaccagggtttgtcttttttttttggaacggagggagtagttgggtagcagctataggatatttcttcgattcaggcaaattaatgtttgaaagtggacatttggttccctggaccggcacacttgattgccgcttccttttacgttcgtgttgcagaatcactaaggtacatatatactgctggctagctctgtcaatttttaatttctcacctatttgatttacatggtggaaatgaatatattagttgcatgtaacttatcccatctgtttgtgatgacaaatgacaacttaattacttgcccatgtcatgttggcagggtgggattggagggcctcttgttgatttggacgggaatgttttgggcatgaacttctatgataagaagataggaaccccttacttgcgatggcatgtgattagtaagattctgggacacttaataacagaagcaagtagattcatttctctttttttttggttattcaagtgctgctcatctgaagtcttcatgtttttttttaaaaaaaaatacttggttgtatgatttgctgtaaattaaatatattcaatggtgtgtttggcagcagctctgctgaagttgacttcggtagttaccctagaggggccactcccatgctacgcaggttagtttaatgatacatcacaaaactagtaaattacgacgcctcacaaaaaatttcttatcacgttgcatatattgaactacaggagtatatctacctggctggaatggaggtgacaatgccaacctaaacagggtttttgatcagactgcatgtacttcaaaatattgtttcgtgcttccccaatctccacctgttgcgcctgactggacaatcgaaacaggtaacagtgtcacgctaaacaggttagttttatgatacaattaatactagtgagtattacaaaatgtctcccaaaattaattttgtaatcacattgcatatacattgaactgtaggtggcccgtgcccctgccatattggcgtcaacctgacgatatggaggaggaagaacccccacgtggctttgaggacatgtacacatacgtggacggagtcagattgtgtaacttttagaatcatcatgtccttgttctgctctgttgaatttcttcctccttccgatgtgttcgctggtgtgacttgtgccatgtcattgaagttaattatacaactatgcccgctgttagtcctgtaatattattacatatgctgtgtgcacttgtgttttagaccattcagctatagtggtgttggaacttggaaggtatatgagtatataagtagcttttgttaactttggagtacataaatagcgtgcctatcttggatgtgttaaaaaaaaaccctaaagtattttgcagtacggaaagtgctgaattttcaagttggacatgtttgagtttgaatttgctgtatatgttgggtgattttttttcttaaaaatcacatgattttttaaccttgatagttttgccttagattttattttggggtaattgcatatttgccactgccggaacggtgaatttaccattataaaaactataattgcacatttaccataaaaacagtcagaacttagcatacctaccattagactcacagtttgaaccaacacggttagcaatgtgtattttaactaaaataggacaatagtaccccttccaacgaaatcgcagaagtcaatcaaaaatacgcgatcaaaactggtcgcgagactgtgtggcacttcgccggccattctccttccgcggcagccgctctctcccgtgagccatggagaagacgggaaacgaggcccataaggcccaacccaatggcttattatgggcttactgggaagcccattttaaagcgttcttcttcttctccccgcgcgcgcttcccttcgtctccacccgaaagccaagaaaccaagaacgcaagaaatcaagaacctgcgacatggatcaagaattccatttcgaccctttcaccggcggcgacttcgactaccccgacggcgagtctttctccggcggtgccgcaagcggcgggtttgactaccccggatcctgcggccgctcttcttccgccggcgaggaacttcacggccatccataccgcgacggctattctttctccggcggcgccgcaagcgacgaatgccacttcttgggcaggagcggcttcccttcttcaggcggtgagcgacttctcgttcaccggcatccagaccgctaccgctgcggcgagcctttctccggcggttacgcaagaggccacggcgacttgttgggatggagcagctgccattcttcctgcagccaacttctgcaagaccctgcaaccatcgtcatcgtcatcaatgacggtgctcatgcccatggcggcggattagcacaggctgggcaagcctcctccatgagcgttccattggtacggctacttctcctgcttctgatcaacgttctgtgctgcttctgatctcgttcatggcggattgccgcattttttttcccgatcatgatgttctacatttgcataacatttttgtgcacgataactctcttcttctaatcaatattactccatttggtctaattaaatatgcctaatcatgctgttcgatttacttaattaaggagctgataagaaaactcggtctttgtctgttgaaataagagtaaactggcatacgttgtgttgcgtgtatgggtacaaatgtttaaaaagacatcgtagttatcagtgttaactgggaaacatacatacatatacatattagtattttaacaagtttcaaatatgaatcattttgtgatatgggtagcattgtggttaattatgaatcatgctgaatatataatgttattcttattttgtaaatgttacttaatctaaattatgataatgggacaggtaaaatcaaaacaaggaacatcactggtgccacagctcaagcttggtccatcagctgccccaaacttattacactggctcatggagcacatcttatgggatgcattagaattctccatcagttggaccacactacgacggcatcaaccaaaactcccgagtgaatggagttggtggatggcaatgggttcaccgttcattcagatagatggttagttactgtccatatcctctaatttagaaattttgatgaactgctgaacaaaacaaacgtgtgttgattctactgatcttgttacaggaatatgctctatagctgccagttttatgtgtgtggaagcacaacataggctagcctttgagatcctacatggaattggtaggttccccttaaaagcaaagagactcaagggtgtaaagaagaaatgcataaacaaaaaggtgtggagccctgcagacggagcatttgtagaggatgtgctgaaggtggtggcgaagggaaggggagtgagacaatacagggtatcttcttaccaataaatggatatcatatgtacaaaaatgtccagaaagacgtcagtcatgaggcagcagtgcgtctcttactcgcccatggtccactgctggcaacattgtgggtgaatgacgagtacatgatctgcacaacaaagaatgatcttgtctaccgtgggagcagcaacagtgaaaaggatcccaatcatacggtggtctgcttcgcttatcggtttgttggcgaggaattacacctcagggtcctcgacgaccataccgaagatgggccagtgagatgggtattgtacgagtgcatagatgaaatccacctgttgacactaaaggaacctttgaccaaagaactcatcgacagatacagaaagaagggacagactgagagcttcttgtcaaactctgcaaacaaagtaaaggccatgctgattcgaagactaatgactaagtactcagaattagagagcagtcagggatctagcagttgtggtaggcagagttgggaaaaatagtcaaacttgttcaggtatacacattgaacaacagatcaaggagctccatggctaggcccggaggttgaggctttgttgtattgaactcggaagcaaagtacatgagttacattgcctcaagagtagttctgacagccacggttatgcacttattcacttcaaacataatatagtgaacttaacaagttttcagatattagcacacaaactatttgaactaatgtgacctctgctcagcctctgttatacacaaccacagaaaaaaggatttctataaaaagaacctttaaaaaaatggcactgtgatgaaactgtagcaattaatcatggtgcaagcagatttattgctttcccatcactt
